United States Patent Application Publication US 2006/0134663 A1 - sequence listing, part 11

SEQ ID NO: 23687 - DNA, 118384 bp, Homo Sapiens
gcaggtcgggcgtggttgctcacgcctgtaatcccagcactttgggaggtcaaggcaggtggatcacctgaggtcaggagttcgagaccagcttgaccaacatagtgaaaccctgtctctactaaatacaaaaattagccaggcgtggtggcgcacgtctgtaatcccagctgcttgggaggctgaggcaggagaattgcttgaacctgggaggcagaggttgcagttagctgagaatgcgccactgcactccagcctgggtgacagagcgatactccatttcaaaataataataataataataataaaaagtaaaacaaaagcttgcaaaggctcgtcattgccctgcatcctacaaaacccttcccccttcatccctctcaggccttggtggcagggcctgctctgtgggaccaaactctttgtcaggggaggagacgatggactacagactcccctcactccctgctccacttacctgtgtgggcctgagggttcttggtgactgtttaccctgaacaccaaaatgtctagcttcagcctgtgctgacacgtggaagaacgttcattagtggctcacatgctttgtgctggactctgtataaaaacaatgaatgactggaaagtttttatggacctgatataggcctggagtttttgttatgggtgttaacgcatattcaggacatatgtgttaatccaccaactctttaaccttaaacctggaagtttgtgtcagaaggggaggggtgttgaggggcagcgctggtcctccaggtaaggtggaaggaaaatgcctgtgattgtcaaggtgcaattttgctaaaagaattaccttggaatggaagcattacaccctgaaaataggccaccttctctctttaaaatggtgagcaacacccactgtgtcttgtgagaaggaattaggcttttctctgtggagaatgaaaaagaaaaggaatgcctggtctaagatttaggaggaaatagaatacgtttaacgtataacaaacccttaagacatttacacattaaacaaaccaccaggaatgttttccaaggaaaagcagcattcaggttggaaggggtaccgcctctggggtggctggattgctctagggaaggctgggcagttgctgagtgtgtggacgaaggccttgagtcctgggctgcttccctaaacctgggcagacagggtgatgatataccctgatttagtttttgcgtaaacataagggtacttttaatatgtttgcttgtattttttaataaaattctttgacagttacataatgatattcattgtagtcagttaacacattggagacaatgaaaataaagagctttcccccacacccttgaggtgatcccagtgttctcttttggaacatttccctcggcttatacacatgtatttatggatttttgaagtgcttgcttgtttttacaaaaatggggacaaggccaaggccaggcgcggtggctcacgcctgtaatcccagaactttgggaggccaaggcgggtggatcatgaggtcaggagttcgagaccagcctgaccgatatggtgaaaccctgtccctactaaaaatacaaaaaattaaccaggcgtggtgatgcacacctgtagtcccggctactcgggagtctgaggcaggagaatcacttgaacccaggaggcagaggttgcagtgaactgagatcacgccgctgcactatagcctaggcgacagagcaagactctgtctcaaaaaaaaaaaaaaaatggggacaaatttcatacattattccatggcttgtagttctcactttaagtaatagatatatctcttggtcaatgttttaaaccaatgctttttaaatggtaacttaatttcgtatagtataaatataccatgatttatggctcatttctattctccattcattctttttttaattttttttgagacagggtctcagtctgttgcctagggtggggtgcagcgacgccatcacagctcactgcagcctggcactcttgggctcaagtgatcctcccacctcatcctcccaagtaggtgagactacaggcgtgcaccactatgctcagctaatttttaaattatttttgtagagacaaagttttgacatgttacccaggctggtcttgaacttctgggcttaagcaatcctcccactttggtgtcccaaagtgctgggattataggcgtaaaccactgcacccggcacccagccttgtatttttttgtagagacaaggttttgccatgttgcccaggctggtcttgaactcctggactcaagtgatcctctcaccttggtctcccaaagtgcagagattacaggcatgagccactgggcctggccctctattcattctttactctcctctgtatatgtagtttttttcctaatagtctatatttttgcattttctcttttctttgtaatcaggctaccagaggcttatctatttaatttttttttaaaagatcagcttttgtttcttgtatttttcttttgttattttttcttctatttcattaatttcatatttctttatataaaatacttctctctattatctttttatttatgttgatatttttgtgactgaagttaattcttcgttcctttatttttcttttttttttttttttttgagacggagtctcgctctgtcgcccaggccggactgcggactgcagtggcgcaatctcggctcactgcaagctccgcttcccgggttcacgccattctcctgcctcagcctcccgagtagctgggactacaggcgcccgccaccgcgcccggctaattttttgtatttttagtagagacggggtttcaccttgttagccaggatggtctcgatctcctgacctcatgatccacccgcctcggcctcccaaagtgctgggattacaggcgtgagccaccgcgcccggcctatttttctttttaactaataaaatcatttaagactatacatttttctcttctgaacccaagtttagttatgcctcttgagtttttgaataaaacattctctttttcattactttgtaaaaaatataaaattttatttttcatttcttttgactttggcaacatgtgtcagttatttttctattgcattttggttgatttggaagttctactatgcttttagttcttctagtagtgacagtctaccctcagaagtcataattaaacttatccttttctatcataattttctacacttctcaaccaagacacattatttactagctcctctaccaacaaaatattaaacttctatgatacatttactttcctactctccataaacacccccacttctacccccagactcattgtgagaagacggtttaattttggactgttaattgctttccttaaagtaagtctctttggtttcaagcatccttatttacaacttatattgcaaatttccagtgatggtaccatcatctatttagcatcaacaaagtatcttatgatattcatagctagctactgtttcctcttcttcagcagcgaataataacaaagtcataataatgacggtagctattattattattattattttctgcccaggctggagtgcggtggcgtgatctcagctcactgcaacctctgtctcccgggttcaagggattttcctgcctcagcctctcaagcagctgggactacaggtgcacaccaccgtgcctggcttatttttatttttagtagagatggagtttcaccatgttgcccaggctagtctcagacttctggccttaagtgatctgctctccttggcctcccaaagtgctgggattacaggtggtagctattgtttctacaactctatgagccagatattgttctaggtctttacataaatcatctcatttagttctcacagtaaccttttgaaggttactatcattatctgtatttcacggaggggttaaaacactttcccaagtcagccaggatttggccttagatattttggcttcgcaattcatgctcctaaccaccatgcccttacaagcctcctgaggagcttcccccaccccctaccctgccccatcccctgttgctggcatctttgggctaaaaagcaattttagatacaaaccagaaggatgagatccactggagttactgggaacaaaaggcagcatttacagcttggctcacattgcgtgagcaaattgttctactgctaggaaaaaaaaaaacagtttggaagctttggatgcagatggtcccatggcatcatcctctgcatgtcagagacatcaggtacctgggaaagtggtgcccatataaatggtatccattgctacatttttgtcatttattttatttacttttattttgctcagataattttgaccatgaagagtcctgttgacctggccaaatactgatgaaataacgtcactatctcacatcacactcttggtgtttagtaaagaggaagtttgagttctgagatgaatgcaggaaaacattagtctctctgtctttctctttctctctctctctctctctctctctcagaaatgattgtatttccctcacatttcttgggctttccacctcatcctaatatggacagaaatgtttaccactatgggatgctggaataactgttaagctaagtgtaaatttgggggatgctgacaaacatgatatgtgcctagttgcaaagtgagctgatctcattgaagaatggggccttgttcacaagctcctttcaaatccagaagttgtattacccttttgcctttacacgaaatggctggaactcatggagcctgcttcccagagcaccttttatatgatcagcatatcacaaagtatttattgaatgcttgcaacatacttagcaaatgcaagtatttgaagaggtacaatcagcataaacaattttttaagatatttgcattcttggtggtggggtggggagacaaacttacgttcatgacatgataatagaatatggaaccagataattaattgtatggccttagcagttagcttactatttattcagaaaaagaggttgaggagaggcctcatggaaaaggagggacttgaacgaatgaggccctaatagaatttgttcccagagaatggcaagggcagggctacagtgattagagtgaccagctggccctgggggcagtgaaggacaaacctgaggagagaagaaggctgaggctgaggaattaggaaaagtgagactgatgttattttcaacaatttaatttgaaatgatctttcaaatatttcccaaaagataaaatcatgattctcaggcaaatataagaaaaacatgtgccaaggatttcatttcatttttttaaaaaaagattatataacaaatactcataggaagcctaacctggagcagggattttatttaatttatgaattaatggaggagccagtaagatgttaaagagcatctgcaaaggatgctgggtggacagaggtcagattagtaaattcataactaggcagttgaataaataaatgttaggataagattgctgggttagatagaaaatcagttaatgtcttacaggacaacaaatcctaatcttttgggttatatgttccactggacagaagttatttgcatctgtactggaaaaaaatccataaggtaacatgtaactttattaaatctggggcatataatgcatttaatcaacagcaaatagtgagtaaaatgaagtacattcacctagatagtccttgggtagcctttgccacatatgacgttgaaaaagacgtgccactcacttttttttttgctaagttttagataattttaaaaataatactgacctatagagaaatgaagaaaaatctggtttactgcagtgtccttttaaggctctgtagatgggaccccctgtgtgttcttgttctatatttagttcttgaataactcggactgagaaatccggagacctctttagcccagtgtcccatcttcttcctcccatagtcttttcatctttgttatcactgacagccagctctcagcttgggttcctccttcattctttagttgagatgtagacaagtagaaatggggcctgaggcaggttcacgggtgggaagggctggtttaaccctgcactggtcccaggcactgtgccttggtgccagtgagtgtgtccgatgggggtgcagggttctcagcgctgggcggttctgcccatgggcccatgcctttctgtcctgctgactcttctacctggaatcgcatgtcagtgtgttgcaggtgccatgtatatcaccggctttgctgaatccatctcggatttgctgggcctcgggaatatctgggctgtgcgaggaatttcagttgcggtgcttctggccttgctgggcattaacctcgcaggtgtcaaatggataatctgcctccagctgctgttgctgttcctgctggccgtgtccacactggactttgtggtgggttctttcacccacctggacccaggtaagcctttcagagtccagtatgtggccttatggatcttcactgctttagagatgtttgtaggtgtgagtttgcccaccccatctccccctaacccccataggctttaccataggctttacctacaattggtgtgagctgttcctggatcaggtgagcaggtgtgtcttggagcagcttcatgaggctagaagctcctcttcacacagacatcgcctagcacattttctatgtgtccttttattttctttttttaatgtatatttatttatttattattattatactttaagttttaggataacatgtgcacaacatgcaggtttgttacatatgtgtacatgtgccatgttggtgtgctgctcccattaactcgtcatttacattaggtatatctcctaatgcaatcctcccccctccccccaccccacaacagtccctggtgtgtgatgttccccttcctgtgtccatttgttctcattgttcaattcccacctatgagtgagaacatgcggtgtttggttttttgtccttgtgatagtttgctgagaatgatggtttccagcttcatccatgtccctacaaaggacatgaactcatccttttttatggctgcatagtatttcatggtgtatatgtgccacattttcttaatccagtctatcattgttggacatttgggttggttccaagtctttgctattgtgaacagtgccgcaataaacatacgtgtgcatgtgtctttatagcagcatgatttataatcctttgggtatatacccagtaatgggatggctgggtcaaatggtatttctagttctagatccgtgaggaatcgccacactgacttccacaatggttgaactagtttacagtcccaccaacagtgtaaaagtgttcctatttctgcacatcctctccagcacctgttgtttcctgactttttgatgattgccattctaactggtgtgagatggtatctcattgtggttttgatttgcatttctctgatggccagtgatgatgagcattttttcatgtgttttttggctgcataaatgtcttcttttgagaagtgtctgttcatatcctttgccccctttttgatagggttgtttgtttttttcttgtacatttgtttgagttcattgtagattctggatattagccctttgtcagatgagtaggttgcaaaaattttctcccattgtgtaggttgcctgttcactctgatggtggtttcttttgctgtgcagaagcctttagtttaattgtatcccgtttgtcaattttggcttttgttgccattgcttttggtgttttagacatgaagtccttgcccatgcctatgtgtccttttattttcttgctattaaaaaaaccaggccaggcacagtggctcatgcctgtattcccagccctttgggaggccgagacaggtggatcacctgaagtcaggagtttgagaccagcctgaccaacatggtgaaaccctgtctctactaaatacaaaaaaaattatttagcgagatctgtttgatgctaaagctgttgcctgaggtgagaagtggggcctgtttttgcacgatgatatgctgtctttttgtgacagcaactctgcttttccccttggaggccagcccggatgtgcacctacacagtcctgccttttagaaaaatgttggttgtgggaaggtcagcattcagttggcatccactgatctggccttactacttctgagcatgttaaaatcttctgttggaaaactgtcactcccctgaactccctgagtatcccctaccctctggcatcctagtccctctccaggaaccttcagatgccccaacgatccggcacctaaagggttaaccccagggcccactctaatgctcagggccaatgtgatgtccgtactgatcacctggagcccaggctttgcagcttgctaaatatttgacgcatctccaggaaggaaacagtgattttttttttttttttcctggccatgtaccaccctgcagagatggcccgcatatggagggagacttgctggcctttggctcatcaaactgtcagtgaaggaaagacagagtccactcaggtccctgattccttgtacttccccctccagtgacacggttgctggaagagctcaattagtgaaattgcaaggccgtgctactggcttctttgaaacctcacactagcctgatgtattttccttcttcttgattagaagttcttggctgctcttctaagttactccaaatatttttccttccttctggtcaatacattagtagagtgtagtgtgagatgaaatttattttcaatcattcccatagcaactggctcctcaagaatctgtttttggtatcactgatgtttcatatgggatattttctttgtggttaaaaatccaaactgaaaccaaactataaaccttcaaaatgaatttaacagagtgatttcaactcttaaaaaatgaggacatatacatagacatttgaaaaaaagactggaaggaactatgcataatagcgactatctttctgttgagattatatgtggctaaattatcttatttctacttttccttcaaatgaccagtgttacttttttaaaaaaaattaattcacttttagagcagttttaggtttatggaaaattaagcagatagtacaaaagttcccacataccccttttctctctcccccaccacagtttcccctattattaatatcctgtgttaatgtggtacatttactggaagtgatgaaccaatattgatatgttattgctaatagtttagggttcactcagtattatacattctatggattttgacaatgtacaatgttacgtatgcagcattacagcatcatacagatgagtttcactgccctaaaaattccctgtgctttgccttttaatgctccccaactcctggcaaccactgatctttttactgtttccatagttttgccttttccagaatgctgtatagttggaaccatacagtatgtagcattttcagcttggcttctttcactagtaatatgcacttaagattcctccatgtctttttctggcttgataactcatttctttttatcactgaataaaaagaaactggatgtagcactgtttgtccattcacctactgaaggacatcttggttgcctccagtttttggcaattattaataaaactgatataaacatccatgttcaggtttttgtgaggatacatttttcattcatttggataaatacctagatgcatcattgttggagcatgtggtaagactatgtttgtaagaaactgccaaactgtcttctaaagtggctgtaccattttgcattcccaccaacaatgaatgagagttcctgttgctccacatcctcatcagcatttggtattgtcagtttttttgtttttgttttttagtaattctagtagatgcatagtaatatctcatcattgttttaatttgcgattctctaatgacgtatgatattgaacgtgtttttgtatgcttatttgccatctgtatatcacctttggtgaagtgtttgtcaagatcttttgcccttttaaaaaacttgtgtttttttgtttgtttgtttgttttcctatcattgagttgttttgttctgttttgagacagggtcttgttctgtcacccaggctggagtgcagtggcacgatcttggctcactgcaacctctgcctcccgggtttaagcaattcttaacctcagcctcccaagttgctgggattacaggcatgcaccaccacgcccgactaattttttgtatttttatcagagatggggtttcaccatgttggccaggctgttcttgaactcctggcctcaagagatccacccgcctcagcctcccaaagtgctgggattataggcgtgagccactgcgcccggccactgttgagttttaagagtgctttgtatattttggattcaaaccctttatcagatgtgtgttttgcaaattttttctccccagtctgtggttggttctttcattctcttaacagtgtcttttgcagagcagaagttttaaactgtaatggagtctatcttatcagtgtttttccgtggatcatgccttgggtccttgggtgctgtacctaaaatctctttgccaaactcctagattttctcattctagaagttttgtttgacatttaggtctatgatccagattgagttaatattttgtgaagggtgtaagatgagtgtccaggttattttggttttttttttttttttttttttggctcatgaatatcaagttgttccagcaccagttgttgaaaagactctcctgtctccattgagttgcttttgtgcctttgtcaaatatcagttgactgtatttgtgtgtttctgggttctcttttctgttccattgctctgtttgtctattctgtctccaataccataccgtcttgattactacagctttatagtaagtcttaaagttggttagcatctatcctccaactttgtcccttttcaccagtggtttctttgtttgtttgtttttttgagatggagtttcacccttgttgcccaggctggagtacagtggtgcaatcttggctcactacaacctccatctcttgggttcaagcaattctcctgcctcagcctcccgagtagctgggattacaggcatgcaccaccacacctggctaatttttgtatttttggtagagacagtgtttcactatgttggcaaggctggtctcgaactcctgacttcaggtgatccatctgccttggcctcccaaagtgctgtgattacaggtgtgagccactgcgcctgaccagtgttactcttaaaatcagaaaaaaagtttttttaaagtacacttaagcctaactttatttcttcccatttctttaaatataaacaacgaaacaattccaaacaatcctgaaatgtataatgtaaaaatgtaaaaagtaaagtaaagaatgaaagtctcctccttcactcagtttctccacttctttccagagggagattggtccacgtattagttatctattattgtcaaacaaattaccccaacatttagtggcataagataacaataaacatttgttatctctggccttttctgtaagccagtaatttgggtgtgacttggctggcggccctggatcagagtctctggtgaggttcagtcagatgtcctcagggtctgtggtcatctgaaggcttaattggggctggaggatctcactggcaagttggtatttcttcttgttaggaggcctcagtggtccatgtggttctttcctgagagctgttttagtatccttaagacaaggggtaactgacttctcccagagcaaacaatcagagagagacagacagggagagagagagaaagagggagagggagagagagagaggacagagaagatgaatttttttttttttttttaagaaggagttttgtgcttgtcacccaggccggagtgcagtggcgggatctcagctcactgcaactgccacctcccgggttcaagtgattctcctgcctcagcctcctgagtagctgagattacaggcacttgccatcatgtctggctaatttttatatttttagtagagacagggtatcaccatgttggccaggctggacttgaactcctgaactcaggtgatccgcctgcctctgtctcccaaagtgctgggattacaggcttgagccaccatgcccggcctaatttttaccttttcaatggagaagtgtcaaagaatttgaagtcacatttaaaaaccacaatagttaattttaaaatcagaaaacagttataaatacacttaagtcaaactatatttttctctttatttttattttaaagacaaaatcaatgtctttgtttcataaaaatataaaatatcctgaaatttatcaagtgacaagtgaaagtttcttcccttcactccattttcccactcctactccccagagggagatcggcacatagcttctcagtctattttctttctttctttctttttttgtttgagacggagtctcgctctgtcacccaggctggagtgcagtggcgtgatctcggctcactgcaagctctgcctcccaggttcacgccattctcctgcctcagcctcctgagtagctgggactacaggcgcccgccaccatgctcggctaatttttttgtatttttagtagagacaggatttcaccgtgttagccaggatggtctcgatctcctgacctcgtgatctgcccacctcagcctcccaaagtgctgggattacaggcgtgagccaccaggcccggcccccagtctattttgtatacatgcacaagctcacatgcacatgtgcatgtacataaacacacacagcacagctctttgtaaaagtataattaaattccacattgttttgctactccccactctttaacatatcatggatatccttcaatgccagtacatttaggatgtcctcattcttttaaaacacccacatagcattccatattagagatttaaaatactttatatttaaagattagcttactgatgagtatttagatttttccagtttgttgctatcataaatattgctgatgtgtacatcctgtacaaaagtttgagctaatttctgcaggatcattgcttataaatagaattcacaggacaaaggtcaaacactttaaaaattttgttaggttctaccagattgccttccaataaagttgttgcattctgaacgatcactaacagtagctaagagttactgattccccataccttggaaaatattgaagaggctcaatttttcaagtttctgtcatgtgatgggcaaaaaaatgtaatctttttcttttaatttgcttttcttgaatgattaatgaggatttttttttgtattttattcccagttgtattttttttctttgaattgtctataatctttccctgtttttgctttctattttccctattttcttttccagatttctttttctacaatcttgttctgctctccctgtcagatgctgccagctttctccaaatgtctggtagtcgctgtccatccattgttggtaatgaggcaccacagagctgatcgggagttccatccacaacccaagtgggtggcagttgtgacaggtgggcatcacggtagggtgattggtggcaaactgcgttgtttcattggaagtcccccaaatgttcgtttctgcaggtctttctctggtatagttcgtattctccagagaagaattctctcatctcctgccagggacatgcccggctgcctcagttcggggagcagagtggaggtgggcaaaggggctggcagcctcatactcaggtgcagagtgtcattcgtcagatgctttcccctggcacacccctccctccactgtgtccttccgtctcaagttgtcttcccctgtcaccctcactctatgtcttgtctctcatttcatctccaaacttccaataacagtgggtcctcctcatcgtcctcatttcctcacctcctgacttcttgatctgcagcctggcagcctgggcccctcttcctttcttcacctcctgtcccgtccttccaaaaacaagcatcactgcacaaggctctctgaagacacagagcttcttcactgtaaaaagctaaatagcacgaaaacttaatttaaacaagaccctctcaagaatttgtttggcttaaagctactaaaatgccattctgttggctcatattttcatttatgtaagatgagtgtcatgccaaagtgattttattgccatagaagtcaggcaaatatagagaaaatacattttagaaaataaagtgacatgtggcacatttgaatcctatgttctgcatttagaaatgaactcatgcctctccaagctgaagctttttggttatctaggaagacggtagcctggtctctacagggttccactccagagcctgcactgcacactctctgtcctgccatggccctctgccatctgtgggaggtggatcagttgggccaggccaggcacaggtccatctcacgctgaatgtagcagacgggagctgcttctgctgggtgagggagggggcttgtgcttggctgtgaggacaaggtcactcctttggagctgtagaagggatggggcaagcatgcctgcctctgctgtctgctgagattcctttatctcaggctcccataatctcctgatcttcaaccccaggaccttgactcatttcttattcttgaaactttttgcactgttgaccacctatgctaatttgaaatggtctcttcctacttcttccacaatacaacactggcttagctctcttcttggttttcctgttccctgatgtgggcagggaggccacggggctcagtcctctgctatcacgtcactgtttttgtgcctttttcctcagaaataaacttccaccatcgctgcaccagtggcactcccctgcttctccagctttcttcaatatagctctcatatcgccagctcctgtcggatctctacctggctgtctgggcaccatcttgaattaaaggcagacaaagcgaaagccctcaatttctcactcctctctttagttagccttttcttcccccactgccctttccaccaattaatcaacaagccaataatcagcttatcatctgaatgcctatcaccatttccccaagcctggaaaacttggaaaagaacttttatttctctgtctagcttaagctcttttatcctttacaaccccacagttctcaccttagattagcacatgtcatttcctctgtgggccatttagataatgtccaaatcagaatttatcccttgaggatcttccctttggttgtccccagccatttcctaagggcgactgacacctcctatgcactgaagccagatcacttttcgtaaaacagtgctttgcctcggtcactctccagcttaaacagcatcagttgctttctattgctattggacaaaacccaaacccattctgtttgcattcaaagagccacatgggctatccctaaatttcccatttggttgtatctccaattctgcccctttctgaacaattctccgcaaaacgtgtttattcactgatttatgaagcatatgaatacagctctccttctaattctggaattctcttcaccatgccgtattagacctaagttcttgctcttggatgaagtagttcaggaaattgtacatgaagaaggcatggtctgaaatccaggatcccctgtgtggtcttgagccatgttagatgttctcagctttggttttctcattggttaaaaacaaggatgaaaatcatatttacatctccaggctgccttcctgcctgtcttagcatggctgccaggcccaaggcccgtggagatcctttgggtgaggggctataacagtctgctcaggaccccagggactttaatgagggcatttgggactctggttccttgttaaaatttttaaggctgggtgctgtgtctaatgtctataatcccagcactttgggaggctgaaatgggtggatgacctgaggtcaggagtttgagaccagcctggccaacatggtgaaaccccatctctacgaaaaatacaaaattagccaggtgcggtgcatgcctgtagtcccagctactggggaggctgaggcaggagaatctcttgaacccgggaggcagaggttgcagtgagccaagattgtgccattgcactgcagcctgggtgacagagggagactctgtctccaaaaaaaaaaaaaagttttaaaaatgtactgatgaatgctttcaagtatacaggaaagagtataacagatattcatttatccaccacccgaatttaatggatattattttgccagttttgcttcagagctctatttaacataaaaataaataaagcattacagatgcagtttaagctgtaccttcaccgaccccgtcctgttccccaagggaccactgtccggaggctcatcctccccatgtgtttttatttttctaccatatgtagctggccctaagtgatgtcggctattgttcagcgtttgaaaattttatatacattgtatcataccgcatggatcctttcacttgataaataatttgaatggtgagtgaatgattgtgcaatttgctttctttcagccaacatattttcgcaatttatccatgttaatgcatgtcatggcatttcattcattttaactgttcttcgtgcaagggagacacagaagagttactgagtggtgaaagtggtgtgagaggggtttgcacagggcacccgggtctcctggcgctccccgtacagtcggagagtcaggaaagactttttagaggagattgtctgggagctgagtgttaagggagacggacgcagaggccttgtctgccacccagcggggcttgggctttattttgggggcagcgggaaacctgactcaagttcatattttagaaagattgctcttgtcccaatacggaaactggcccaggatagggatgaagaaaggaggcaggactcacttgagaggctgctacggcaactcaagagagccaggcagggcctctagggtggaagagacgagatgggggcggggtatggggtgaggccaagaaaagggataaggctgacacctgactggctggctggtggcttcacgttctgggactcgggaggaacatggcagctggaacaggtgtgggggaaatggcgaggctagtgtgagaggtcagccgaagacagtggcccagatctcggaggtgtggtcagggctggggtaaagcgccccgcagcatgggagcaggagaagcggtgggctgggcgaaacgcttgggcagcctgtgctggtttggaagcggaaagagccatatttgttgagtgaatttaatttaccagaagaggcattttcactgttctatatatttttaaaaaaacctttctgacaaaattccaaacatcaaagtgggtaagctaaaaatcaatattctttacccagaaacacacccagaatctccccaggtggctgttccactcgggatgcagggaacacatggatgttctggctgctctctgggcctcgcagctggcctggcactgtgtctgcggagggccaggcctggggtcttcctaggatgcacggtgctggcctattataggtattcaggaaatacttgtgcaaagaacgaacacactgcgtggaaggttgtgatgcctgactcagtggccttttctgcccggacgggtgaggatggctcatccatgggtgcctggagggagccctccatgcccccatggggaacatctgcctgggtcccccttggatggggctctgttatcctcctgagatgaagagccagcagttagctaccaccaaaattctgtagaatcgtcctcccagcagggcgtgtccccgagtctcctttgtggctcccttcgccatgtggtggaagggcatctgcatgtctttgccaggaagggtcttctgggctccagtgagctagggcagcctggaagggccctgcagtgcccgggatggcctctgtgtggagttgtgattctgactgtttgttttctggcctctcatggctggaaaggctcgtcccaggacagcgggctcaacccttcctcactgcccacagaggtactaagaggaaacactcttttgcgtgaaatggctgtgggatcctggcattcacgttctccttctgggctggtggggtgggtgatgctacacagcatggccttccgcactctctcatgtgaccctcatgatgatggtgggagggaggtgggctgggttgctttcccctcctcaaagatgcaggaacagtgacctagagaggtgaagtaacttcaaagcccaggcctcagtctccagccaccttcctggcccagcagagaggaagaaagtctcagaatagctgatgagcggtttaagtgggggccccagcctcacagcctggcctccatccctggggttcttaaccctgtctgcacatcagaagcaccaggggagcctcaggtgtggaaagaagaatcccaagctccaccccagaccgagtaaatcagcactctggggtgggcccattggtctgtattttcaagtgctcctggtgctactgtgcagccagggttgagaacctttgcctttcagcctctactcatgcaggctctgctctgttatctgcagagatgggcgcccaggctcagtggaggaaaccaaggcaatccaggccaagtacctcagcgctcaggccggcaagaccctggagacaagactgtcatcccctttacactgggcacaggctcagggccaggactggaactcttcttcagttagcccctgacgtaaggactggctccttttcctcctgcatttcccactcgacctgcactcagctgagggccacaagtacagcaaacacctgcttagttgtgggtgtggatgtgtgtgacgaactgggaaggagcaccaactctgtgtcaggcactttgcatagattattctatttatctttgaaacaactgagtgagatgggtgagatggttattccagttttacagacaaggaagtcaaagccacagagaggttatgcaactttcttgagtttgcatagtctgtggctcagccaggattgaaacccagaggcacctgactccaaagcttgattccctggtgccccctggcacccgctggctctggggtgcccttggaggaagttggtgaactccttactgcttcctttctcctttcggatcaagggggtctgagaacctgccagtctccgctgggcccgttcatgcctggttaaaactgttagaggtgagcctctttaaggggaagcaggaaatgagatgtggactgtgaggaccaggagctgaggcggctaaaacatacctccccagtgccaccaggaacagaggccatagacacgctcagctcaggaccaaactcaagtcccacgtcaggcagggaatggtgtccggccaggcaggggcgctcccagctcagcccacagggcctcagcagcacctcctggagcacacagggtgaggccagcttgggagcccagctgctcggccccagccctctgcatccttggccttgggcagtctgaccccagcatcagggagaatttctgcccctttcttggatgattccttggaaggttgtgttaatcagcagtatgaagggatcacagggcccctaaagaggcagcagacctgctggaatttgtggccacaatgaaagacatgggaagcaccaagtagcatttctttttctttttttttaatttttttttttttttgagacagagtctcgctctgttgcccaggctggagtgcagtggcgcaatctcagctcactccaagctctgcctcccaggttcacaccattctcctgcctcagcctcccaagtagctgggactacaggcgcctggctaattttttctatttttttttagtagagacagggtttcaccatgttagtcaggatggtctcgatctcccgacctcgtgatccgtccacctcggcctcccaaagtgctgggattacaggcgtgaaccaccgcacccggctttcttttttttattatttttatttttgagacagggtcttgctctctcacccaggctagagtgcagtggtgtgatattgacctactgcagcctcaacttcccaggcttaagcgattctcccacttgtcagcctcctgagtagctgggactacaggtgtgtaccacctgtatctttttgtatcttttgtagagacagggtttcatcatgttgcccagactagtctcgaactcctgggctcaaatagtccacctgtcttggcctcccaaagggctgggattataggcatgagccaccgcacctggccccaaggaccatttcaaacctttattaggtttctcctgtctttttttctttttctttcttcccatccctttctgactctgactctttttcctcttcctctttttctagttctgatctctttccctctgcctgtacccctagctggacccttggtatgagctactggataggggtttctggccaggcctgggatccttcctcttactgccctcattcctctttgtgaatcaccattatgtatgttagttactacctaggtaggtacttgttgtattgcagatgctgataatgagcaggtgtttggaggatcccgagtgggtagcattgatgatttagtcttgaaaagtttactcatttgctaggtccaagcgcaacataggccaattaccatgtcccgcctgccacttggctgtgacaagaaagttcttaagaccaaaaacaatctgaatctggaagtcctcgctggtgctaagggagggatgaaacccaggaggtggagttggggctggtggatccgcaccacgctcctgttgcttccaccctccgttggctttgtctctggtgacgtgatctaagggaccctgctgatgggattgatactgggatcgcagaaaggtggtttcactgggggctccaggagtcccaggtgccagggttgctccatgagtggcctgtctcagcaacatgagagccttgaggactggaatctagctcagtcaactctgtgtcctccaacaccagcacggggcttgctgtgggcaggggctcaataggtttgctaagtgaatgaattaaggatgaatcaaaaacagtaaaagaagtacaagagaaaggctctggaacccacatggaggtgtggagaaccctagccccttagctgcttatctgcagtcgcctgggcgatggatactccccaggcctccctccagagaggcgccaaccttcctgtgttggcagcagttcgcaggtattccgtctacacagaatggcagaggatcgcacaatgcctgtgtggaggcccagcccagggtggggccagcttgcaagcccagtcagaccttcttgggaagaaggaaggaaggaagggttgcaactgagaagaaactgtggctttgaaagttttcctccagggtttttttgtttgcaaggaaaggagatgcttagggaggcgttatatactggacaaaagagtgcggccgggtcagtggtgaaatcagagtgcatgtctttcccacagcaggtcagcagggatagctttgtctgcgaatgcccacgtgctgggaagacgttgcagcctctgatacaacagctctgtgttccttagatttttttttttttttttgagaaaagtacatctgcttcatattacctgtgtccacagcacagatgtaagtgagtaaaatttaaacaaggatccagatagctgggacgaagagtctcttgacctgttctttccgactgtgcaggtttgagagaaagaccagggatccggcagtgttggccagatattcctgcaggtcagttggaatccagttggggatttgctgatgtgaaacacgcatgaacagtcacaaaaccaaacatatggggccagaaagcaagaccgacttgaccttaaacaaaatcctcctttgcttctgagctacacgccaggcaagacaaatttagggaaataggaatatggatttctatttgttaagaaagatacagttgtttctcatcaggcttttccagttctagcacataggattgcagtgacctcatttttgatcaatggccaatgcattcaactgtctggtggaataatctattaactgggcacctgccaattgtctagaataggaactagcttaggcatatgttttaaaaagtgataacattgttatgagccctgccgagacaagaggatgggaagcccaagcaggtcagcactggctctgaagtcagtttgggatgatagactgtgtttttcagtagactcactgccctgtgactgacctccctctctccctgcattaattacatggtatttaaaggcaaaccaacaaaccacttaagagtcccggaacccgggcatgtggaatctggatgagtgaccttcgctgggtcacacatagccactgttggaacccagttctcccagctccccagccagtgctctctgacctgtgcccccgtgcagctccctccgagtcccatgtgaccacctgtgtttatgatgagtcctcactcacatctgtgtatcgattctcttgcaaagaggccccttatggcactggctggtggaggaggcagctatgctgtttgacagcccaccagcaggctaagtttgccacttttagggatccatgtcttaatcctgagtgtgaaaagacttaaggtgttataagcgtcacccgcttcatctaaactcgcatttgcaaccagtggctgattgagagatggcaaaggctgtggacaccaggaagccatgaggagaaggaccccctcagcaagggtcaggacttgtggacctttggatggaaagaacttcacttgcagatagttatcatgtgtagtcagatgctgcttatctgtaatagtgaggacagtggtagctaacctttattgagcattactatatgccgggcactgattttttgtactttatatgtattaattcatttaactcttacaaaagaagtagatactattattcccattttacagtggggaaacagaggtggtgagaggtgagtacctcacctaccataggtagagttgagaaccaagtcgcactgggtgcggtggctcacccctgtaatcccagcactttgggaggctgaggtaggaggatcacttgagcccaggagttcgagaccagcctaggcaatacagtgagacttcatctctagaaaacattttaaaaattagctggacatggtggtgcacacctgttgtctcaggtactcagaaggctgaggcaggaggaatcacttgagcccaagagttcgaggtcacagtgagcactccagcctgggcgacagagcgagaaccctgaccctaaaaaagaaagaaagaatattaccagtaccattgcttctttccagttgcatctccacagcagtcactcttagacttttggttatttatgtacctactttctgttcatagagtcaaatctgagtcccagaaaagggcatgtgtctgggcagctggaggggccgtcataggcctggggttctagatgaccagagggagtgcttgggagagcgagctgctctgtatttttcctctaagctcctcattgcctacctctaggtctcaggagtgggtcaaaccagaacactgcctgggggctggtggctcacgcctgtaatcccagcactttgggaggccaaggcctccatctctcacacccatgtccagaaatacctggtgctgccagctcctgagacctctgagcatttggagggctaaatcagattggttctcagattttctctctgctgacttgacattccattttcttgggactgatatctgtaccactggactatctactttttaacttctgaaattttgttgctgtgttctactgttttccccattcttatggatttatatccttttaaaaatctctttaatgggtgcggtggctcttgcctctaatcccagcactttgggagaccaaggggggaggattgcttgagtccaggggtttgagactagcctgggcaacatagtgagaccccacctctaaaaaaaaaagttctttgatatatattagcaggatgtggggagggaacgaaattaggtacatgtattcagtctgccatcttaactgataagtctggtattaatatttttcaatgacaaactaaccatacttaaaaaatttttaattagagaattttattatttcctctccaaaaagtatcatttttcatttagaaaggtgtattcgtatatctctttgtgagagatcattgtctgtcttgctctggcaaactttacagtcctagattcaggactgtgatcactgtgaattctacccctgattctagggaccatttgtggaaatctgaatagtgctttgtaaacagatttctgagtctttttgaagccatttgggatggtatcatggaagagatatgaagaaggtattttctcttggtgggttgctgcaatatgatttctgacttagtgtcatcataaatatttgagactacttgttatcttcagtaggtgttaccttatgggctgatacttaatcacagcagtcagaaactgtgaatttgcatggtgacacccttccaaagtgactgtaagagccttcctccctgacttttgaggatttgcaaacagcagagaagcaagtttttaggtatcactccagggaaaatagtgatttcatgcttgaaatatgtgggaacaatatctaaagaaaaagcttaagttgtctaaagaggatcttataatagttggatacacttataattagaaaagcccactgggggcccaggcactgtggctcacacctataatcccagcactttgggaggccgaggtgggcagatcacttgaggtcaggagttggagaccatcctgggcaacatggtgaaaccccgtctctactaaaaatacaaaaattagctgggcgtggtggcacatgcctgtaattccagctactcgggaggctgaggcaggagaattgcttgaacctgggaggcaggagctgtaatgagccaagatcgcgccactgcactgcagcctgggtgacagagcgagactctgtctcaaaaaagaaaaaaaaaaaggaaaagctaatttgacattggggcttactaggaacaaatataagcagagaaatggcctacttagaaatgaaaccttagattgaaacaagaaaatgtatttattcctgaaaagattttccacagtgagttgtcaagttgtgtcttgctaacattcggtccctgattccttcatttccgccatccttccttggctcatgtgcctcttcatctctgtatttctttgtctcctccccacctagatctccctctctcctccactctaatcagttcactgaaaaacttttcctgagtcccactatgtgcagaaccaaagctagaaattgaggatacacacaagaataaggcacaggctctcccctaaccaaacaatcaccatttcctgggtcagtattttaaaggaaaatatgcaagttgcaggtggaggagagtggaagaaccttgaccttggggtttctgagatgtcttcaaggagagggtgatgcgagtgtaccccagaggtcacacaagtgttcacctggtagtaaactggggatggtgatcccaaggaacaggaacagcatatgtgaagactcagcgcgcatggaagagttcagaaagtgcaggaaggtaggtgtgctggagctgagtgtgctgggacagggtttggggacagagggccagaagggtacagagccttttcaggttcaagagagagttcttcccagttccctgaggtgatggtgcttcaaagcgaggaggcagagggaagctcagggaactttcagcttctagggcttccaggattggcttgtatcacaggtcttggtgaaaagcagaacagtagcttgtctctgttcagatcacagccgttatttttcacttatgacaggtttatcggaacatggccccactgaaagtcaaggagcatctgtatttataattagtgtatttccttccagtattcttgccttgcatatttgtattcatatatgtgagtagatagtacctactaaattataattttaacttatttttattaagaactatacatatttaatttaaaaatatatctaaaagctatttccttatagcctttttttcatcctttttcgttttaaagcataattgagctcacatagtatataatatttttgaagttaaaactaatgtagcaacattcagaagtcccagatggaatgtactataaacagaggcttgatgacatatcttgagaattttcttagtctctctagttagaaaagcaagcaaacaaacaaacaaaataaccagaaataagtttaaaattcaacacgcgttttaaagatacggaaatcataaaagctgagcaaaaggtcaataggcttttctttgaagcagggaaggggttgaatcagatttgctctttggagccctgcctggagttagggtaggcacaaatggggagggactgaggctggggcccttcaaacgtggttgcaattgtccagtctagagaagacacagcctggactgatgcagtcgaggtggggtagagatgaagaccagatgcagtttgggagacagtttcgtgatctcattttcttgatttgtttgtacatgcctcttaattgtttccattcccgcccttctcatcccacctctcatcccatctttggtccaccaccgccatcgggaacatccacatacttgttaaacacaaacaaaattattttaaccaatgagaactttgattgattttttgtctcgttagtttataatccaaaacaatgatgaaaacatttaaaagggtccaagatcctgccataagtatttacttttctcgcgccactggctacatgagtgggtgcacacatagacccatgcatgatcacacacactgatggcctggccctgagatactggagacaaagcagccggcaccatgtctggcacatgaactcaaacacttcacttcctctggtgaaccttggccagccccatccatgattcagtgacgaaatgccttctcactctgaactaaattcatttgcacggtttctagcgtgctttgtatttttagtccttttccacacatggcctctcccattggatggcacactccctcatcacagcactacagctcagccacatgccccgtgagagcatgatgaggcagccggctggggtctctgcctggcccggggcctggattatctctgtatgtggccaccatttgcatgtgaaaatcacgtctggctcacaagtctgtggcccaaacaatagtctctttcaccctgagcatacggtctagggatgtgaagggaaatttcccttgcttctctgagaatatgtgccacttttctgaaaaattaaaaataattggagttacgaagttgggttttttttttttttttggcaagagtaagcaataatgattaagaaaagtggttcatcaactgttaccctgctcttagtcctttcaaacttccttctttttttttttttttttttgagacagagtctcgctgtgtcacccaggctggagtgcagtggcgtgatcttggctcactgcaagctccgcctcccaggttcatgccatcctcctgtctcagcctcccgagtagctgggactacagctacttttttgtatttttagtagagacagggtttcaccgtgttagccaggatggtctcgatctcctgaccttgtgatccacccgcctcagccttccaaagtgctgggattacaggcgtgagccaccgcgcctggctcaaacttatttctaataagccatcagaaaattatgtcagatgtctacatcaattcctgcatcagaatctcacagtgtccttatcagacattctttaccaaacagcctcgccgaaattaatactttttgaaacactgagtatatttctgcttgtaagcagagaagaaagtaaggtggaataatttattaagatgagaaaaaagtcctgggtcaattcacattgctgtacatttcttgaatttaagatttgaaggtggtgcggtgagcaagggaagtaacacagtagcttccaccccgccacccacggtttcactttccatggtttccatttcccgtagtcaaccacagtccgaaaatactaaatggaaaataccagaaacaaacagttcatacgttttaaattgcccgccattctgagtagcatgatgaaatcttgcaccgtctcacccgggacatgaaccctgctttgtccagtgtggccacaccgtacacaccgcctgccatcagtcacttagtacctggcttggttatcaggtcaactgtcaagtagcagagggcttgagctcgaggccaataatagccaagtgctatgtcacgatgcctgcatcatccgcctcacttctcgtcacgtaggcgttttatcatcttacatcatcacaagaagaagggtgcatacagcatggtaagctattttgagagagagacgttcacataacttttattatagtatattgttagagttgttctattttattattaattattgtggttgatatcttcttgtgcctaatttataaattaaactttaccataggtatgcatatataggaaaaaacgtggtgtatatagggttaggtactatccttggtttcaggcatcccctgggggtcatgggatgtacccctaatggataagggaggggggatactgtaatagctaatgtttattgagcattctgtttgtgccaggtgctatactaagcattatacatctcactatatcctatctatggagtccctgtgtgttattgtccccatgataaagatgagataactgatgttcagagaggttagattgcccagcagttatccagctggtaagcaatggagccagaatttgagccctggcttctgacctcagggtccatgtccttaaccatcaagctcacattgtttccagctgctggggccgcctgctcttcactgactgaattagaaaacaagcaggacacataagtcccatgtagggcatggcattgaaaatgcagtttgcgaagctgctgactagtgaagtgaaaggggacggtagttaaagtattttgcactgggagacttgaagccagcattctctctaccactgtctgtgggaccctaggccagcaccccaatatctgtgggtcttcagtttccccataataaaacttgattttaaaattcatcatctggccgggcatggtgactcatgcctgcagtcccagcactttgggaggccaaggtgggtgggtcacctgaggtcaggagttcgagaccagcctggccaacatggtaaaaccctgtctctactaaaaatacaaaaattagctgggtgtggtgtcacgcgcctgtaaccccagctagtccagagctcaaggccaataatagccaagtgctatgtcacgatgcctgcgtcatccgccccacattgtctcgtcacataggcattttatcatcttacagcatcacaagattctcctggtgaggcaggagaatcgcttgaacctgggaggtggaggttgcagtgagccaaggtcacaccactgcactccagcctggatgagacagtgagactccatctcaaaaaatatataaataaataaataaatacataaatttcattatctcttagaagtcagtgggctgcccagccaggggcagaacttagtgcgacacttgcccaactcctcgtatttgtcttgtacttcccagcatgggagatgtgtcctaaatgaagaagcacaagaacatgctattgagaagagtccctcaattgcggccatcctttggtgtttctgaaagtaacaaaacaaggcatcagatatagcagaaagaagcactggtggtagctgagagagtttgataggcagctacagaaaatccccataccttggatgttgatggcacgcggtgctgagtaggaaatgcagaggtcattgtttttcaggctgtaaaaacctcaagcacaggaatcccatattattgccgttttatcctggcatcttggaaagtaccgggcacatggttggctctcggttgcactttgctgagtgactgactgggaaacacaccagagtggatcagcatccagtgaggcagatggatggacacagtcctaggaaacgtaatctgcgcagcttgtgaaagtgtgatgagagttgcaggagaatggagttgatggaacagattgtcagagcactgtctccaaagaagaggagtggcagggtggacggagcgcctggctgcacacacacctgttccgcctccctttctttcttcctcccatcctcccaccctataggtagtcatcaaagcctacggggtgccaggaggtaggctttgggatacagcggagaataggatagcgatggtccctgccctcatgaaacagggaatccatgtcagcaatatatgcttttctgattaatgctatcagaacacatgcttcttgttagccgtgtggctgtgggcaagtcaccgaaaccctttgagtttgtccatctgtctaatggaaagaaataccctcctggaagagtgttttttaaaggattagaaataatatgtccaaagtagttattttttctttgagtttggggggaggggtggttccttctctctctccccctgccaactgttttctagaaaatcagcacttactggatattgtagagaataattttggggttttattattttgaagacggtttcttctgttaaacttcttcctgcatcctcttgaactggcagaaataaaaatgctagacttttaaagatatgacactctagaatcctgattgctaaaaatgaaaagcattctaaagtaaataaaataacaaattcaaacagtaaatctgtaatgaccgaatgagcaccattttaaactcacacgtaccagaggtgatcgtggtatgaggaatgagcatggtacattctgaagctcctgaagtaatcaagggacttctgttatggcctaaagcaaacaaacagccaccatacaaacctatatacatttctatttcttttccctcaaatttctacttgaagcaaaaggaaagtcacttcttgctttctctgccccagtaactgtgggtggcagccagtttttggagcagttctggagcaattactctgcaatcccaaattcctagtgtatgaacaaatctgctcagacattatcagggaagaaatactggaacctggattttagtcctggctctgccactttctcaatccttgaccttggggaaatcacctaagcgtcagtttcctcctctagaaaatagagaataataatatctgcctcacagattatttagagattaaatgatgtaataaaacgtatttcctcaattccaagtcaccatcaattttaattcacaccaaattttcaggtggaaaaaagccttacattaagtcctcatgttgcttgtaagacatccaaatttcagaaaatcaaaatgtttttaaaaagttatactcaaaatgagcaactactataaatacgattgccttggcaaaggaagattctaaataaacgtaagacagtcttgttatcgtggtcatcctccctgggcggaggatctgcaatctgtgcctgggtttccctgtcgccaccactctgctaagcagccggaagcagggctgccccttcagcatttctcttgagacctaccgcaccccctcacaatcccagatcagatgccaaagccagtggggactggacaacatgatgagcccaaaccaatccacgctgagcttggcatctgatttgggattctccaccttgcagagaatcggaaagtatctccacaatttcttttggaccgagctgttcttccctttccatgagtttcttttacacctgacctagagcctctcaaccatttttatgtcactgcacagccagaaaatgataatatttgtacagcactccagggaaaagggaggaacagttgggccaagaggccaatgacttcaccatctggaacccattcagggcattccagcgtggcccaccttctccaattagcctcctcaatgaaaaagaaagagggggaggaagaggaagagaaaagaagaagaaaaccctggtaatgttcactgttttttgctttagaattataagggcactttagtttttcgaagcgtctttatgataatggtctggtatagtgatcaaaatacccttgggcttgaagtgccataaacaaacaagttgtgatacttgcgtgtgtatcagaatccctgaggaaacttggtgtgtgtgtgtgagcgcgtttcctaatagcctgaggcccgggaatctggattgtaagaagtgctccaggtagttttttatcatgatttttaagtcagctctgggaactactgtcttcgaggcccttggaaggtttctcctggcactctacctttcatgttctgcattgctcattctattttcccctgtaaaggtagcctttttgatgcagtagtccaaacctcgtcttgcggtgcccttgtatatgtgctcagtcctaccccctagtgtacaagaatcgcactgcaaggagtagataatcagctgacctgtgggaccagaagctcagcctctcaggcttgcaatgttctctgagaacagtgtgtctcagcgtttggtttggagatttcctgtatcggaattatctagaaactcattagaaaaacagtctgatccatactctcaaattttggactagtaatctacattttaggtaagcatactggaaattcttatgtacattcagatttggaaactactacgtatatgggatttactaatcctattgatctgtaaagggttaatttgactcacacattgttacctgtctttgacaggccccttactgcgaaataaccatccatgtacacaatggaccccttggagtaaccagccttgcttccaatatgactgttggggtagtaaccaggagaaggtgcttaggccctaaattctgtcactgaagccaatggtatgattaaagctcaatgtgaagacttgaatacaacacatcccaccctcattttagtttcatctggcaattgaggtgtttttgctttggccattatgggtctcccaatcagagtggagcttctagaataagtatttttaacatagagtccttgagcccctgaagttgcatgcaaaattgtatgtaaataagtgtatttttctaggacagggttcagaactactgccagattctcaaaggcattcttgacctgaagggggaaagattaaggattagaacagaggtacttttcagggttagaacagtgaagaattataaacaaaggctcatgtccaggtaaggatttctgagcctctgcagaccaagcctgaccaattgtccagcattccccaaaatccacctgctctccctcctcttttctttgtgcctcatcctttcttcctttatgcttttctctctctgttttttctccccaatccttttgtctctctttttcccctctgcccccactttgccatctccccatccctcctcaccttccatttcttctctttctctcccttcctggcctgaataggaagcaaagcatgttctttgacttgttctacctgttgaatattttcaatattccacttattttatgttggtggttcttgtttgtaaaattatgtgagttgcacatttaatatttctctggctagatgagaaactaatgctttaggcatccttgttccttgattgtttggatccagcccttgttagaaggctttctgtgggcagtggtccccatcacccctggccagcagcaggcatgccttaggcctccctcttgttctgagattgattctgatgaagaaaaactgactgaccagaatcccagacccctggctctgagcccctaccctgatcccaaaacccagctgtctctactggattattctcatttgctggctttggcttggggatcagagaaaggagccatgggctgaagaggccgtgggacctggtcaagtttgcagaaggaagtgcgagcgagcgctgcccagcttcgacccccgagtctgctcccactctgtgactctgtgagcaggagggatgggctggcccgactccctggctgggcgttccgggtatggatgcctgccacatgcagtcaccagctggggagggcccttccacacttctgagcctcgcccgcctcagccctgagcagctgggagttccgaggaagcgatgggtgaccgctgaggggtgggccgacacatcctgcctgtgcccccccgctgctggtttgtgttcctctcactgcacgtggcaggtgtcccctggctgtggggaatttgcagattactctccatgtgactgtagaagcgtccctgaaggcacttctggcttcaccattttgggggtacctcctggggtaggaggcaggatggtgggtctgtataaagcacaaagtgggatatgtgccctcaagtcactcacatttgggtggggagcaaggcagccagctacagacccagagaacaaggcaggaagtcctgggctgacagtgggcatgcagagagtgggctctgtggtgcgagcagcctgtgagtgctggccgagggttgggggtgggagtgaacccagaggtggagctggcaggagagtgccgcctcctgaggctggcaggagatgatgccccaaattgcaaatttgaaagttaaataatatacaaaggacccacgtgggccccccaccccactcttctccccactaccctcactccagggcccagacaaggccagtgctagagcttccaggcctgctcgcaatccaacttacatgtccctcttgcctggatcttcatgctccctggggactgaggcatgcaccttcatcttcagggacgtgttttgaagaaatattgaggcctctgccacagggttgacctaaccccaacacataggtgcccacaccccaggccagcactaggcaatggggcagcctctagacatctccctggggattgcatttgcctttaaatctctgggccccatagcgagttggcaagtggctgtccttgttggcctaatgtgaaagattgcatcacatatactacagttgtcagagacatggctttggagtcagacctccaggttcaagctccagctcagctataatttgctgcatagaattggtcaaggtagttaacctctctgacctgctctctttgtttctgaaaagcaggtaataacgcctgcctcgctaggttgccaaagcataaaataagataatgtttataagaggcctagtgtcatgcctggcacaaagtaggtgctcaataaataatcattgtcattatcattgcttgtcctggaagagtaggtccctggaggccctgggttatactctaaggcagtgcttcaggatctggggatcttgttaaaatgaaggttccaatgccgcaggttggggaccatactttgcatagcaaggtagtttcctggggcacctcaatcacgttcagtcaggagcagcagcatcctttctcctcctcttgctctcccctcgtgctctctgggttgatcagtcatcaaaacacttcccaggctgtccaggcaggatgtagggcaggatgtatggtcactggactcatccagcaccccagtgactgcagccacctgcggatgaggaggggatccggagggaggagggaacttgtctctgaccttgaggattcctaatctgacggggagatggtacaaacacacctcactctccataagcgcctgcagaaaaggcacacaacggcttgcaaaggaacacacagaggcacaggaaggggccacttctggttttctcctctcagagctagaaggctgagagcagagtgcccctgccagccccacaaagggaagcggagtgcagcctgaagctgcaaggtcaggtgatatggcagtagcccagggcagcccgggttaaaggcacactcactcaaggccggctctcatttagtggcaccgcaggttaaatgctgctcccaggccttgggtcccagtgaccaggaaagttttgaaaatgagaacatgtgttgaccctaggactaggacaacagcgcccttgattttgcggaagtcttccctggaagttgggcgtgcttgatattgagacgctgcactttgtgtttcttgacggctttgctgcaaattctcacacaccttgcccttgagtaaaaccccaaggattccagacgtcggcaaactcccgagcacaacggtcctttccacctaaacccctgagcacacagtgatttctgcctacattggtgactggtggtcagatggcttgctgggcagcttccccgccccgcttctcgtggaggaagggcctccctgtggtgggaagaggtgttccctgtggcaacaaacagagaccttgtctctacaaaaaatgtacaaatttagctgggcatggtggcgtcagcctgtagtcccagctagtcgggaggctgaagtgggaggatcacttgagccatgggaggtggaggctgcagtgagccgtgatcatgccgctgcactccgagggaggccacaactagtaggcagggcctgtggctctgtcctcaccttccaccatccttggccaggaagccccctttgtcctctattcccacatctgtacggcagggaggagcccaggccttaagcaaggatgcagggtgccatctctgaggatccctggggagggtgctgtggaaagaaatggcttgaggttttgtttgattgtttgtttgtttgttttgttttgttttttattgtggtaaaatatccatagcacacactttgccattttaaccgtttttaactgtacaattcggtggcattagttacattcacactgttgtgcaattatcctaaccatttgcgtccaaaactttgtcatcaccccaaacagaaactccgcccccagtaacttctgttctatgatactttctgcctctctgaatttgcctattctagatatttcataggcagtagttccccttatgtacagttttgttttctgcagttgcagctatccacggtcaacagtggtccaaaaatagataaaaatagtatagtacaataaggtattttgggccaggcgcagtggctcatgcctataatctcagcactttgggaggctgaggtgggagaattgcttctgctcaggggcttgagaccagcctgggcaacaaagtgagaccctgtctctacaaaaaatataaaaaattagctgagcatggtggcgccagcctgttgtctcagctagtcaggaggctgaagtgggaggatcacttgagccgtgggaggtggaggctgcagtgagccgtgatcgtgccactgcactccagatggggtgacagagcaagacccagtctcaaaaaagaaagaaagaaaagaataaaaaagatattttgagatgagggagagagaccacattcataaaacttttattataatataattgtattttattatgtcattgttgctagtctcttactgagcctaatttataagttaaacttgatcacaggtatgtatatataggaaaaaacatagtatatatagggtttggtattatctgccatttcaggcctccactgagggttttggaaaggatgccctgtggataaaggggagctactgtaaggggaattatacaacatttgtccttttgcatctggcttctttcacttagcatgaggtcttcaaagttcatctgtgttgtagcatgtatcagaaattcattcctttttatggtggaataacattccattgtatcgatataccacattttgtttatccattcatctgtggatggacatttgggttgtttccattgtttgttattattaatgttttatattttttgcatgtcccctggggctaggtgccagagacaccccagaaaataagagagcgtggtgcctgcccccacctggctcatagtctagtggaaaaaacaggcaagtagccagccagtaacagcagagagatggggacccataggacatattggacaagggcttggccacactgtgttctggtctcccctgagcagctgctaactttgtgacgtgggcatctcctttctcaggcctcagctttcccatctgtaaaatggatttgaggctaaagactgctgtgatgctaactttctacagttctatgatactgaatctttagccatggcattctgagggaggccctgctttgtttcttgggtaggacttggggtgggggagagctgcccatggcctcagaacttggtggggaaggggtctgagcatgtgaatattttcagcctggtgcttggcaggaggggggctctgcttacatatcggtgtgttgatactgactgccccttccctgcaggggtcacttgacctcccaccccgtctcagctgcctgcctggcgaggatatccaagcaacagtggggcagggaagacttcttgaccagcttggagctgtgcaggggcagctgatttgagggggccatgagttgagttaggattattttgggggtgtcaggggtcaggagttgaagcatgggaagtgggatgccagaggcagagacagccagaaggaataagtggtggctgggaggaacccacagccagggtggagacttcccgttaaaacagcccgttatcctggcaggagggagagtgcattcctttcccccaggagataaggaggccagattttcctttctcagggctcctttctagggtaggctagtgggggctctgtgggctgggctggggccaggtccctctggacccctctgcagggtcccagctggagcagctggagctcctggcactcatccaagactccctgcagccttggacaagcactgccgcagcagtggcagcacaacgtttgaatcccagttgcctctctgtgcctcagtttccttccctgaaaaaaatccatctacctcatagggtagttgtgaggcttcaatgagttaatacggtaaagcacttggaatgagtggtatgcagcggaagtagacagcactgttctcaccccaagatgcctcttgtttcctggggcccaggtgagaacctagtgtctcctcaagtcagattcttttcacattcttgggcatttgacagctctttccgctgtaggcctctctaggcaaaaatctcatctcagcttactgaccccaaggccattatgagaaaagtttcattaagcatttaaaatagagcccgtgttagcagatggaacaatttcttggttattagaaaccattcttcatgaagaaaaggcttatctttcctttcacaaatgaggaatccttagctcagaaagagccccgggactgccctcctagaccgcagggcatggcaggagctgctcttgttacgggacactttcagccccttccctcccaggccagggaggctgccctgacatcccccagtctggcctttcatcccctgggttgcccagccctgggggtccttcccactgtttcacaacagccagtcctcccacagggtggaggctctccccatggccaggcagggctctaggctgctcctttctaggcaggctgggcgggactcccctggccctctgggcaggtcaagccccacttcagatttcccttctggccactgttggaatgcccagccctccctctgtgtattttctctctgggtggggtcttaggctggaaaccctgtgcacatcctctctccaccctctctttgcaggaccaaagtcaatagggctgaagccagagaggagactgtggtccgaggaagactccaggctcacgcccaggactctttgggggcctcttcgaaacctatcattatttcctcttccaaatctccaggcagtgatcaatacaaagcaatacagcccgattcagtttaatttcaaaacagtccaacgcaatacagccgattcagttctatttcaaaacacttttattgaacaccaatagttgtaccaggattgttatgacccagttcaatgggagagcccaacagattgggacttgatactatctggactccaaactgtattctcaattagggttactgttccccttttgactctgcgtgtcttttgaacagttggcttcagctctgcacttcagtttcctcagttgttaaaacaggccaatgaattagaccatgaaggtttcctcatctctctgcccttccatgtaatctctcattatcggccagtaaggttttattaacatatggaactgtggtagtgagcttgtttcacggttctggagcacatcctgtatcaacaatcacagagtcagggaagggaggagggcatgttatggaagctggtttgggattttacctctgccattggaaaccaactgtgtatttggacagtgtgtcctgagaggcctgagagtgggcttctggctgggaagacttcagaattagaagggttctgaaaaatcatctcgtactgtgctactgagagttcgatctgcaggcaggagcgtggcatctccggggagctcattaggaaggctgggtctctggcccatgccggtctcgctgactcaaaatttgcgtttcaaagctccgagggaaaagggcttgtttacagtcccacagtgagtcctcgcataaccagggcccgaaccctggttcctgattcctgattttgccactgttcttgccttcctccacccagagatcttcagggtccttgtgcctggaagggggccctgtgcttcacgccgagggaggataagcatggcaaggacttctcccaaatctatcctccttgagttcagttttgactgggctcctccctgataacctgtaactgcttcaccctttgcagctcccagaagaaaaaccccatccccagcccagggaggccaggcctgctgtgtttaattgcccatctctgtgcctcttagcccatctggggctgggcagtatctgagtgagtgtccgggcgaggatggggctgcttgggaaggaactcttgtgggtgacaagtggcaggatggggcccgtggacactccccttcctcccctttccgcggaccccctgggtcaggcagtttcggattggctgcagatccccgtctccgtgaggccgcgtctggcgaggtacaggtgctgagaggcgctgggctgtccagaggcggcgcgcgaggccgggtgcgaggtcttgcgtgcgcgccgcgcccacttcctttgctgaggagcctcgcgcagtctccggggcctaccacttcccccgacgcccttcgggcgtcgtcgtgcgggtcccttcccagaagcggcctctcctttccctttcctcgcagagccgctcttcctgcgccctccgagccccaccctcctagctccgtccggagcccttcctccgcgctggctattctcggttgcgccagcctctcccattgtccattcgcaggaaagggctgtctggctggtcgtcggtcgctggtccaggggtgggggacccagaagagagcgccgccggaagcccccgccgcggcagcagcccgcagcccgcagcccgcagcccgcagcctgcagccccagcatcatttttagaaatctcgctttctaagttagtcaacagtgcaacccgacgcccacagggaggggtatgacttcccgactccctcttctaatttcagcagcccccagcggcgtagggggaggggatgtcgggggcaccgcaggtgccacccagagcccctagcagccgcctacccagggcaagggtcccatgcccggctgctgggcaccccaagcagccctgctggagcagctctcagtcccactagtgacccccgctgcctgcctttggctaaggggaggagggtaggctcccacgagcaccccttgggagcagatggtgggccctgaagagccacagcccactggccacatcacaagaagcctgagttacccgaattccgggtggaaagatcaagcctttctgcagacagagcttcaaggactttccctctgcctgttcctgcctgggtcttgttgtcatttgttctctctcttacccgcaccccacccccccccctttttgtttttgttcttcctaaaagcatacagctcaaactggaccaaagtatttttattccgtggatagagaaacagatgttcaggtcaaacccagatccattcacacgcagcagctgcaggccccaggcatcccaggcctccgagagttgaaagatgtcagatgacaggaccccagaccacaagactcagtttcaccagcagaggaattgaaagcccaacagagaggcaaagagactcttctgaggtcaaaaaacaagtgttggaaatccctggggaggctagacgtggtggctcacgcctgtaatcccagtgctttgggaggccaaggtgggagggttgctcgaggctgggagtttgaggttgcagtgagctacgatagtgccactgcactccagcctcggtgatagagcgagaccctgcctctttaagaaaaaaaaggaaagaaagaaaagaaaaaaaaaaaggaaattcctggggaatgactttgggatggattacagagggtcagtgtggtagatggagacctgaattcactcagatgtggggtccaggacaggctgtgtcctcccagctgtgtaagctccagccagttgcataccggtaggcacatggtgttccacaggataggactcctgtctgccctacacagatggggccgggggagatgccatgatctctgtgggcatgtttcctggggctgaaaggcaacctgtgctgtaagggggtgcagtgccagggcctgggaacccacctcctggagagaggcctggcttctgccaccgggagaggcagtgggtgaaatacaggcagatctggctatgtaaccctcggagaagctttttcacgttccggagcctcagtgtcctcagttagtcatcgtacaagtatgacattgtaaggtcttgttgttcagtggctggcacgtaggaagggttcagtcactggtcgctcagcattattttcagaagtgaggttgccctgtggtgtccttggagtgacctgcacaatctctgtgcacacagtcttggccattgcttggcaaggactgtggcatgaagacattattggctatgtcactctcagggctgctgtccactctgaggcagggcatggtggcagtcaggccttgggaagttgtaggtgcctcctggcgggacaatctcacgtgcagatgtagctgctagagtagaggtctcgaaccttaaggtccatgctctccagagaggcttcagaaatctgcccttccccaaaatggtatgcaaaatgtggtgtctatggggacagggaccatggtattcatcagactctcaaatgggggcaactaaaagaattaggaacctttgttctgggcatcagcaagtcaggcattaagagccactgtcggagggcatggcaggcggcatggacctcagccctaccctgggtgtgacccactgacctcacaccatgcttagctagccagtaccggccagtcagagacatgagtgcctcccctgggcacccactctgcataagcccaacagagagtcaaccatgcctgaggtctgggtgggccaccaggttcagggtgtgggaaagagacccaggccccagcaggcaggatggggaccagtgagcaagactctttggggactggctcaggacaggggaccgtgaggtggggtggtgataggtgaggggtgcaagtcatgagggcctgggaaaataggggcagaggaaatgaggcagggtccactgtgccagctttgggggctccttgttgtccactggaaagtggcccatgtgagggatgggccaccagatccaatgccctgcctcagtgcgcttggtcaaagagttagaaaattctctctgaataaggcctcagactgtgggtcatggaggtacgactgggggtgttctcaccctctctctcttttgctcagtttctttctttctttggtccttattttatttttcctgtcttgtttatgtttttctcataagccactcaagtcattttgggaaacagagtacaaacggaaagaaagaaaagctcttcatacatagaaaagctgacgagaaagtgggctttcaattgtgggatgttttgtttgttttcctaaaagatattttttgatgacaagtagattatgttcatttaaaaaaattattttgtcacccaaactggagtgcagtagcatagtcacagctgactgcagccttgaccttctgggctcaagtgattcttccaccccagcctcttgagtagctagtaccatgccctgctaagtgtgtgtgtgtgtgtgtgtgtgtgtgtgtgtgtgtgtgtgttttgtagaaggggtctttctgtgttgcccaggctggtctaaaacacctgggctcaagcaatcctcccacctcagcctcccaaagtgctgggattgcagacatgagccactgcactcagccctttaacttaaatgcggatgttttgtagaaataaaaaaagaaagtacaagaattgcctgtaattgcattatacaaacaaccacagttagtatttcggtgtgttttcttctagctgtttcttacatgtatagattaatacacctttttttgtatttatactataaatggcatccagttttctgaattagcatatagtatatataacatggacagttttctcttatactaaaaactctttataagcatttaaaatgtctcagttccacataaacatttagaacctcctctgattttttcattttttatttatttttaaattttaaaaaattgagatggagtcttgctctgttgcccaggctggactgcagtggtgcaatcttggctcactgcaacctctgcctcctgggttcaagcaatcctctcgcctcagcctccagagtagcggggactacaggcacaccccatcacggccggctaatttttgtatttttagtagagatggggtttcaccttttggccaggctggtttcaaactcctaatctcaagtgatccgcctgcctcggcctcccaaagtgctgggattacaggcgtgagccactgcacccgacccctcccccgattttacattattgtaaacaaagcattgacacatatttttgtccatagcgttctttgcaaagttaagactatttcctagagcaagattcagaactgagcttggcttcagcccagagcaggctgggccagcagtagtgtgagtgtgagcgtgtgagtgtgagcgtgagtgtgagcgtgagcgtgtgagcgtgagcgtgtgtcagcgtgagtgtgcactttgtgaatgtggcagggctgcatttctcattggccctgcaagagatggcaactgaggcaggcccacgagggagccaagtgactcattatctcagcctgtgggtcttgctgaagggatgggcagagaaaaggcttcccagtgactcatctattgggcctgaaatccctctgaaccttcaggctggccagggcaaagcccttcaggcccagtgaccaaatattcccctgtgtcagggccgcccttgggcccttggagatgaatatgcctgatgaagcgttttctgtcctgcgaggcgggcctgcagggcacacacagccctccgctcagatgtgctttccgacctgcacgttagtccagcttggctgagctcggttccaaggcaggctgggctggttttctcctccttaagactcatcagtgaggtcagccagcggataagctaaagttaacttagctattattgcttttttgttaatgaggggagggccagctacaaaaacgccaaaccattcagaaaagttgtacagcacttgggattgaatatgccagaacaaattctgtgttcaggcaaaataaagcaattgacaatgatttaagtcctgactggactcccaagggtcccttgtgcttccctgagatttcgtttcattattttttaaaaaaaatatttttcttatgaagttatgaatcttggaagctgtgtgaagtgcgggcgacctcattggactcatcagagtggcaggagccttcttttgtggatggaagcttgggctgtaattaagctccgagcgggtggaggatgaggcttggggaaattctgtccctgaaaccctagggttggctatggagtgacagctgaatacccatcctacgggactacaggggttgagggaaaaggagcagggattggcttctcttggacgacagttaataggaacaaaccaactccttctcagaggcaagattcagaagcagaggctgaatatcctgggtgttcctgaaaccaacaacacttgacttgtgtcttaaaattccacagcccactaacatgttcacagatgctgttcaaagtgacctcctttgacaaagaagcaacgtgcctgcagggttgaaaccacttgaaaaaagtttgttaaagtcgatgtacaaaaatgtttaaaatgctttgaggaaatgagatctgagatgttcctgctatgaagtaggctgtgaacaagtcaaattgaaagtgtggaagcgagatgtgtccataggctgagagatctaagagaaaggttcttttcagcgtgacccatatttgcaacctacctactgtgcaccagtgcagtgcttggctctgggggatagagatctgcagacctggatttcatgcctcaaggagtttagttggggaaagtcctactgtggccagacctagcgtcaagagcagtgaggggggaggaatagattctgattagggagtgcttataaagcccaaaggagcaccatttgggctgagcttgaagagttggcccactacgatgcttagagatgtgggagaagagtctggaaggccaggagactgcctaacgaaggcaggggggtgggtgtgggtggccttcctcagggtgtggctgctggggaggagaaaaagcaagggatgagtagggagcggtggctgttgccaggttgtggaggctttgataggagtttggacttgattctgtagctattagggacccgtggaaggttttcgagtacggaagtaacttgcaaatatcgattaattttttaaatggaaaacaaacatataaatacatgctcattgaaagatatttcagctatattaaagtctatgaagcaaaagatgaaaatgctccccttcccagaagtaaccactgcttcctttcatgttatgtcatccacctgtgtctatgggatcagcacacaaaagtcaaccctagaagtgggaaggtagatggttctgcagacccgctctgtcgctgtgtgtcacatacatgcccctacctttccaatatttaaagcgatatatgaaatagtaccataatctagggaaatgtgtcctgtgtcttctcactgggcttacgttgctctccattgcattatttcagaacatggtttcattggatattcacccgaactgctacagaacaacacgctgcccgattacagcccgggggaatcttttttcactgtctttggggttttcttcccagcggctacaggtattgtaatctgggttcttttttactctcaaattaggggtatacattcttggttccaaaattcagcatcatcattggcctgcaggtgctcttggtatgtatatccaactttagatatgggcttagctttgactaaaattttgttattttatctgtttatgtatgtattttgtagagacagggtctcactatgttgcccaggctggtcttgaacccctggcctcaaacataaaaatctattattttaacagagtttactgaaggccttcgatatgatttaatcctcctcactccttatacattgacaccttttattcatagaaaggatacatatctcatagggctgaacaggacggattcctcagcaggacaagccgctctttccacaggtggaataagtgcatacctggaatcgaaacttcccttccccctacccgtaccagcacatcttctcccagagggcagagaaacactattgtcttttgttttcttgctgtatcaggtgtgagccaaaccagtatcgcgggggtgaggaatgaatctccttaccctcccttccccaagttcctgctctgcagtgactgtagaggagcctcccacagccaaggtccctgtagggctcctgccccatgcttgggtccctggcctggaaggcaataagctaacatgttgaccagatgctccataaaaaataacatttgctagtgactgggcttgtccccaggaaacagactcttaatgaagagagaaaagcatttcactcttgatcaagagagtattgatggccagaggatatctgtcttgtctccttgtctctctctcctttccctctgccctcctacatatggccatttccttacttgttgtccccaccccaaatgggatagggacagaaaaagaaggagaagctactagagtgtctaagattgagaagattgtccatacaagtgttagcaaggatgtggagacaccagaaccctcatgcactgctgaagggaatgtaaaatggtgcggtgactttggaaaaaagtttgacagtttcttaaaaattacatccagctattccatgcctagttatctactgcagaggatcaaaagcctgtgttcatatgaagatttgtacatgaacttccaagcagcttaaattttaatagtcccaaactggaaatagcttgaatgttcatcaacaggtgagtgcataaataaactatgatgtagccacacaatagaaaaccactcaataataaaaataaataactggtcaggcgtggtggctcatacctgtaatcctagcactttgggaggccaaggcaggtggacacctcaggtcaggagttcaagaacagcctggacaacatggtgaaaccccatctctactaaaaatatatataaaaaaaaattagcctggcatggtggtgcatgcctgtagttccagctacttaggaggctgaggcaggagaatcacttgaacctgggaggcagaggttgcagtgagctgagatggcgccactgcactccagcctgggtgacagagcgagactgtgtctctaaacaaagaaaaataactgtcgatacacacaacaatataggtgaatctcaaaataattatgctgagtaaaataagtcagaccaaaaaaaaagcaaataaatatgattgtataaatttccatttatatgcagttctagaaaatgcaatctatagtgacagatgcctgggaatgggagtgagaggagcacgaaggagggattactaaagtgcagaaggaaactttggggggatgaaaaatatattcctggcctggcgtggtggcttgtgcctataatcctaacactttgggaggccaagacaggaggatccctcaagatcaggagtttgagaccagcctgggcaacatagtgagaccctgtggtctctacaaaacatgattaaaaagttagctttggccgggcgcagtggctcatgcctacaatctcagaactttgggaggctgaggcagccggatcacctgaggtcaggagtttgagaccagcctggccaacatggtgaaaccccatctctactaaaaatacaaaaattagctgggcgtggtggcatgcacctgtagtcccagcaactcgggaggctgaggcaggagaatcacttgtgattctcagctacttaggggtgggaggtgggtggcaggaggactgcttgatcctgggaggtcaaggctacagtgagctttggtcacgccatgatactccagcctgagtgacagagtgagaccctgtatcaaaaaaaaaattgtgtgtgtgtgtgtgcgcgtgtgtgtgtgtgtgtattcctgattatagtgatggttttatgggtatattcatatagcaaagcttttcaagttgttacactttaaacatgtacatcttatagaatgttagttatacctcaataaagctgttaaaatgaaaaagacaataactttaatcatctttaattgattttcctcaatcccacttttccttatagcaatagcctttccctctcctcttcaaagccaaacaacatggctccccatgtccattcttgtatcccctactcaactctcccagtctctcctttgggaattgcaagcctgtctctgcaatgacatggctctttcaccagtgacttccttgttactaaatgcagcgtgcatttttagtctctcactttatttaactctcagcaacaacccacttccccttgcatttctcttgccttccacgatgcaggcttctcagctccctcctactctctgacttgcctttataggtgcatcccctccacctgcctgtccaatgttggggatcttcaagctattcctaggccctcacatctctttctcaactattttccttggagtctcatccatgcttattgttgaataaccaccctcaaaactggtgactccaaaatttacacttccagcccagacttctcttccaagcttcacatcatacattcagttgtccgtgtgacatcttctcttggatatcttggaccgaacaagtttgaaccaaacccatctcacctacccctcaacttgtcctcctcctgtactcctgatgtcagtaaatggcacctccacccagccaaatgcttatgccagtgatcagacctccctctttctttccagtgccctctaagtcttgtcaattttacctcctaagagttgctagattctctctacttctccttatgtctaccacctgaccactctggtcccagcttcatctatcacttgtatcactgtgtcagcctcctgcctgacttttcttaaggctcggccatggaaatgagcctggaactagggcttggaagtggcaggtcgaatcctggtctacaaatccagatttgccagaaatagtgcgtcgctttcatttttataaaacaaaaagagtcagtctccgactctaagccttcattctgccaggatggcttaaaagtaagagcagtaattcagcatgcctccacctgctcctgccatgctctgcaccagctccaggggcttagggttttaaacagtacccagacatgtttggggggctctgcaattccttatctgtaaacagaaccaggccttcccattgtcctgtccatagggcctttcaggtttgtgctgcctctgagccacgttcaaggactggaaatctgagattgggaaccctatgcttggggtctatgtactccccaaacctttgcttctgggggtcttaccggctccccaccagtactgccagggagttggcggggtgggggttccacgtcctcatttccccagaacctgggaacagcctctctctctccctgcccccgactccagaaccaatcttctgtcaaatatggggacactcctgtccagggccagctttctgggtgtgtgacctatgcatttacactgtccccaccctgagaagggactcatgcttgttttaaggctttgctgttactaaaattcttgggccgggcctggtggctcacgcctgtaatcccagcactttgggaggatgacgtgggcagatcacttgagcccgggagtttgagaccagcctggccaacatggtgaaaccccatctctactaaaaatacaaaaattagccaggtgtggtagggcatgcctgtaatcccagctactcagggaggctgaggcagaaaaatcacttgaacctgggaggcagagattgcagtgcgctgaaatcgtgccactgcactccagcctgggtgacagagcaagactctgtctcaaaaaataaaaaaaaaatcttaataatttttgattctgcatttgtatttttatgtggccccacaaactgtgtgatagtttttctccttgtcgcctcatgttttccccagtgattctgctgtttcttttctgtttccctccaaaatcttctaaggacctaggcttttgagaaacagaagccaaaacagtgcacaggcaaattctgcttcctctctgcctcttgtctcccacaagacaagagaatataggtcagcttcctcccgaatggacagaaaaggaaaagggaaaaacagagggaattaaacaaagttaacatctgatgatgtttcccagcctctcttcctctttccttccacacacaaattgaaaaccatctgagtgttctctggagcctggcagtgtccccactgagtgaagacccctgggccaagataccaggttagcatttaccctagaggcagggcagaaggcctctttgcctggtcacactgtgcagggaatgtctcgggcgtcctcaggtgcaccaggggtttgtcttggcaatgtggccctgatgtgcccctccactctgctcccacggctggctttcctaagagagaggatgcctggtgtgagtgggggaagggggcggtgagcctcccctccagcttctccctccaggcaggagttagcagcagcctgaggcttgaaggtgccacccagtagcccagagtatgagctggactcacatgtgagatcagctagtccaactaccaagcttttgtctttttaatccatatttctttttctttttctttttcttttttttaagacagggtctcgctctgtcacccaggctggagtgcagtggtgtgatctcagctcactacaacctctgcctctctggttgaagagattctcgtgcttcagcttcctgagtagctgggattacaacagcatgccactatgcctggctaatttttgtatttttagtagagatggagttttgccatgttgtccagggtggtctcgaactcttgacctcaagtgatccacccgcctcgacctcccacctccaaaagtgctgggattagaggcatgagccaccatgcctggcctatattcacttttgataatgatactaaaagcctcacagacactggacattctggctcagagatggagtgtcgttgtccttccgctgaaaaagctatagctacctaagacgatgagtcaagatttattttctgtgatttaaattatgagtattattttgaaagctttcaaatgtaaaatgataatagcgcatagattgtaactacacaggcctctctgccccacccctcttaggggacctgctttcctgtccctctcactctcattggcccaaccgaggtgaagaatcattgatctgatcctttattttaccagctggggaggaggggtgcagaggagcttatgaaggacccgacagaggtcacgaagctgattagtggccagagttgggccgtcaccctgctgtggagagctgccctccgtgtctctgtctctgtttttcagggccccaattgtaaacacaataggcaggacgaatggtttgtatgacttgctgtctcctggcagatgttcggttaagctatgaaaagcatggatgattggcagtttccatggtgatagatttgctaaggattagctccgagtgagtcatggctggggctccctccaacaccatcctcttctggaacaagagaacctccagactgtggcgaggagagagttttgatgaacaaacccttctgtccccagccccccatcctcctgacagagatatgatggttaagttacttcagatattttatcccaagggcaggcagcttcctgggaagagcggctggagattcggtctggtgctcctctggatttaggaagctgtccccctgccccctcactgcactcttctccattacaccctgtgctggtggctgcaggggtggagtggggggagcttggagtggatgctgtacttgctttgcttcttaaagtgcattccttctcaaagtgcattccttctccaagctccactaccaaactttccctgagaagcagacatctcctctccagggtttcacacataccatgtggatgcagccactccagggatccaggaacacgattcacagaggaactaggaaatggaaattcactgaaaagaatatcagtcatgtgaagtcctgtaacccttgttcccagattctaaactcttactggaagggataagggcctctttggccacagccaacacatgggcctgtggttgaccacacccagcacgaaaaaatgtggtaggaaacctacagcctttactgaaatgtccacagtcaccttccttttcaagaacccagctatttctgtgatgccctttgacctccctgggcctgactcctctctcctgctcatgtacacaccctgggaagctctgggaatttgctgggccctccaattggctggctgtctccaggcccctcagcccggctgttagtgctcacccctcctctggcctacttcccccattcccccctcctaggcgtcccctgggtctcctcacaagttatgtgtcttgtgagtgagaggacaagaacctgctggatcagaatggggttcccatgtttaaggactagagagccccaagtagggacagtctgaagatgggggctcactccactcccttcattctgatggacttatgggcagaaacaggagacaagaaggaagctttggctgggtgcagtggctcaagcctgtagtcccagctactcgggaggctgaggcaggaaaattgcttgaacctgggaggcagaggttgcggcgagccaagattgcatcactgcactccagcctgggtgtcagagtgagaccctgtcttaaaaaaaaaaaaaaaaagccgggcgcggtggctcacgcctgtaatcccagcactttgggaggccgaggcgggcggatcacgaggtcaggagatcgagaccatcccggctaaaacggtgaaaccccgtctctactaaaaatacaaaaaattagccgggcgtagtggcgggcgcctgtagtcccagctacttgggaggctgaggcaggagaatggcgtgaacccgggaggcggagcttgcagtgagccgagatcccgccactgcactccagcctgggcgacagagcgagactccgtctcaaaaaaaaaaaaaaaaaaaaaaataagcttaggccgggcacggtggctcatgcctgtaatcccagcactttgggaggttggcgggcagatcacgaggtcaagagatcaagaccatcctggccaacatggtgaaaccctgtctctactaaaaatacaaaaattagccaagcatggtgcatgcctgtagtcccagctactctggaggctgaggcaggagaatcacttgagcccgggaggtggaggttgcagtgagccaagatcacaccactgcactccaatctggcgacaaagtgatattccgtctcaaaaaaaaaagttttataattattatacatgtctattttttgtaattttatttatggaattaatttataattgttttatcaaaataattatacatatcaacagtttttatcaaaacaattataaatatcgacaatacttattatcattacaataacctattatgtcagccactaagcactttatgtatagttttctgtttaaacttctccacagcctgactggttccatcagacacagggctgccatgaagtggttgaagcctgggcttcaaggtccctcacttgcgtgagctccttccaaagccttgttcctaattttatattcataattgtgtactttcaaaaaaatttcaggccgcatggaacctagatcctcccacaggttctattatttacccattttacagatgaggaaacaaagatttagagaggttatttccccaacatctcccagccagtaagcggtaaaccccgttgcttcccataaagagagaacacataatgttggtgccgcccctcatccagaagccaataaatcttgcctgggtcctggagttggaaagttgcattatttgacactgtctgtcccagcagcatctctaaaacattgagagggagggaaactcacaagttttgctccaagaacagagcaagacaggtttagagatttctgcaggaacagctgaacaaaccaaccaacaagccaggtatgggaaaggaatggggtttggaaatcagaaggaaggtaaagagaggcagaccagtctttaggaatctgagggatttctgagtaagaagcagagcccatctctcctgggtgagcatttatttagcacctacaaggtgccagccactgtgctaggtgcttatgaatatctgttccaacttcaccacagtcctgcaaagcaaacagtataatccccatttacaggtgaggaaagcagggctcagagccacattgccaccaaacagtaatagatcccttttttcagttaaaaaaaaaaaaggcagcagatgagacttgggcacgttagtgcatgtgtagtctaccttcataagaaagaaaaataaagttatgaacttagaaaacaggcagcagagaaacgattaagctataaatggaaagaaaaagttgaagagtttctgaggacacagatttggattgaaaagtccccaggaggaatcttggaagttccttgagaaagagtaagtagtcctttatgaactaacaggaacctgaaaagcctagaaaaactgttggggttttcttttcctactaatcttcattttcaggaacagaaaagggaattggggtgggaaacgggcttgtggtaattggtgataagtaaggactttgatcaatgtgtgccactgggtgattcagggggcagggaagaaaagagatgacctacccacttgcaaatgttggtaagtggtcattgacatttacactggttattttacccaaggatatatttttgagagctataaggggttgattcattttctggccctctatgtcttctgtgagaccagacactggaagtaggcgctgaccccaagtcccctgttcacctggtgccatccatcgaaactgtaggcgtgatgtcaatgtctaggtggctacggatgccactcgaggtgtagcctcataaacctaagctggtcaagtgatggctgacaccttcagacttgcatatcaaaactgagaccataaatatgtgcctgaaggccccaggactggggtggaagaccaagccagaaggctttccccatattaaggaagctgtttacctaagtcacatggtaacagtgtgccgaccagacagatcatcgttgtgatgcagggagaaaaaatgtttttgggtaaagcaattaactgcttcctggaattggcgtttaaaacccagaaatgccatcaatccagcactgtctagagattaggagctggtgatgcaagtgcctgtggcgaaaccaatgcatagcgccgattataactgataagctcagccttcttgtgggtatgtaaccccacattaatcatgcaattactatttcagaaggggaaatctacaaagagcaggggtgttaggaagaaatggagaggctatgtgatgtagtggaaacaacactgacttggaatcaggaaacttgagggttagtgctggttctgttagcaattagcttggaacacttgaatcaaatggcttcccttctttgggcctccgttgcctcatctgtgaaataaaaggttggagtagatgatcgctagggtatcacctagatttaagaatcatgattctaaataactgttttattttttatttttattgtttttgagacggagtcttgctctgtcacccaggctgaagtgcagtggcgtgatcttggctcattgcaacctacgcctcccagattcaagcgattttcctgcctcagcctcccaagtagctgggactacaggtgcgtgccaccatgcctggctaattttttgtatttttagtagacgcggggtttcacaatgttggtcaggctggtctccaactcctgacctcagatgatccacccaccttagcctcccaaagtgctgggattacaggcatgagccactccatccagtcctaaatagccaaatttaaacaatttttggaagcccgccaagaaaagtgtcaagaccaaatagtaattataaaatgggcactgagtgtttcccaaactgtgctctgtggaactttaataatgaagaaaggtttcatttctttaaaaaaaaaaaaaagggttcaatgccaaataagttttgcgaaactgtgtgctgtatttctcttcttagagatggacaatgaatattagcatattataggcactacaatagcccagcactgaaaacctctctaattaaggttttcccaaccttattttcaattgtggaactttttaaaaaatgtaatatttgtaaaacacctgggcactaatgctctgggaaatagtatttgttctattacgccaaccctaaatgtaactctaaccttaatgatagtgttttaaaattgcactggatgcaaaaagaaagcaaactagagaatttctgtgacatttaacacagacaggaaaaaaatactaagtcaaaataatttttctagctctaactagtgaatgagacatttataattcaccgaagctagggaacattgcccaagaattgtgtggtaacacagaggtagaattttggaaatgacagccacagtgtgtgaacccctataacaaatgtgcaggccaggcacggtggctcatgcctgtaatcccagcactttggaggccgaggcagtcagatcacctgatgttaggaggtcgagaccagcctggccaacatggtgaaaccccatctctactaaaaatacaaaaattagccagacatggtggaaggtgcctataatcccaactacttgggaggctgaggcaggagaatcacttgaacccaggaggcggaggttgcagtgagccaagatcacactattgcactccagcttgggcgacagagggaaactccatctcaaaaaaaaaatccaaacaaacaaacaaacacaaacaaatgtacactttgctgtgggaaccacccacattgccccagcaggaatcacccgtgagacttcttgtctgcagtccgagttgcctgcatctccttgtttctggctctttgtgtctgtgatataatctactttctggcttctctgttttgtctcaaaagccaactttctggccatatctgggcctggctcattcctgtgtcacggtcagtcctttctcctcccactgagcagcatcctaatgtactgcacaacaggcagcctacacagaacctgggggaggagtaaagggggtttgttatggagacagtaagtgtttggaagcaggaagcaattaggatgaatcagtcattttcctccacagaagcatatattgctgtggtgttctcaggggtcttcatgggttaacttctgtataaatgatctgaaggaaggtgtacaaaatgacctgacaaactgtaggaggtacaacaatggcgaggaataaagagcactatgtcatgatatggtttggctctgtgtccccactcaaatctcaccttgaattgtaacaattcctacgtgttgtgggaggaacctggtgggagggaattgaatcatgagggtgagtctctttcccgtgctgttcccatggcagtgaataagtctcacgagatctgatggttttataaataggagttcccctacacaagctctctcttgcctgctgccatgcaagacgtgactttgcttctccttccccttctgccatgatttatgatgcctcctcagccatgtggaactgtgagtcaattaaagctgccttagcctcctgagtagctgggatgtgtgtaccaccatgcccggataacttttttattttatgaagagatgctgtgtggtccaagctggtctcaaacttgtggcctgaagggatccttcttttttttttttttttttttcctgagatggatctctgtcacccaggctggagtgagtggcatgatatccgctcactgcaacttctacctcctgggctcaagtgatcctcccaccacagcctcccaagtagctgggattataggtgtgcaccaccacacctggctactttttgcatttttagtagagatggagtttcaccatgttagtcaggctggtctcgaactcctgacctcagatgatctgcctgcctcggcctcccaaaatgctgggattaaaggcgtgagccattacacccagcctcaagtgatccttctgccttggcctcccaaagcgctgggattacaggcatgaaccaccacacctggcccttaaatctgttgcatttttaattttaatgatcatatttttaatttccaaaagttctttgttgttcttggattttttttcatagcaccttgttttatagatagaatattcttcttggatgtacctggagctactaattagtgttttcttccaaattctctctgtatcctgatttatgtttcttccagcctgggttgttctgtttctatttatgcgtgtatttgtttatttgttgctggttttcatcacacattgggtgatcttggttgtgggcatggatttccccagctgttgcatggttaggtctgtctccctgctggggccctaccttgatgagaagtttgtgagtgctgttgattcttgagcagggctttatttggggtgcaaacgtccagccctggttttcctcagtgtattgagatcttgtagagaagcattccgaggctttctttccttctcttttcctcggtattatattctccattttctatgttctatgttccagacattcatgggaacgtttcatctacttagggtcctcctcccaacttctctttgcttatgggaatttatctacttttcccctttactatgctcttaataggatcttggagaggagggaatgagaggaaagaaaatgtgcctaacaggccgttaaaaacaaaaacaaaaacaacaacaacaaaaccttaaaagttttcacgtttcaaaatgatcattgtagaaaattgagaaaatataaacagtcaaataaaaatgacctgttcttttatcacccagaaataacattgttaatgttttaaaacatgttccagttcctttttctatatatttttataataatgggatcataccacgtgttctgttttctaatatgcgtcttaaaactaagcaaaagcttctaaacatctttccatgtcacaacatatcccttacaatattctgagacctagtatttattgaaagctatatcatcacttatttaaccaaccctctatttttagacattaggttgtttctaatttccactattctaaacaagcgtttataaacacgctgggctaaatcttccctcatagccttgactacctacgatgggtaaagtcctcatagtggagttgctgggtgacagtatatgcaccccatccgcgggccagcattcagggttctctctgaaatacacccccctactttcactttctggttccaaactgtcacttcactgcacttcgcttggattctgtgaagcattgtagcagaggcattaagagcataattttcagagtcagacagaccagggttgaatcttagctttgctgcttattaaatgtgtgaccttaggctgttttaattaacctctttgaacacttttccataagatgaggaaataattctacctttctgatgaggttgttatgagaattaaacaggataaaaaaatgcatgtaaagcacttgacacaggcccaggcagtttgaaagtgttcacaaatcatggagttagattcattcccatccctaagcccattcaaatccctctttcaaggccacattcaagatacaaccccctccacgggtctttcctgaccagggcagcccatcacactgagttgttatggcacttgtgggctggatcctcatccgatgttcagaacaccctgtcttgttgctttcatatatttgtttgtatgggaagaggcaacatccccacttcaccatgcagcactgtgctgtaggtccctcatggattaattcgttttcattagtgttcttgcagaagagaggtgatgatgaaaaggagcttgtgactccatgtcagtggcatcaggattggtttttttggagtttatttcaagccctttggtagctcaggggcttggaggatggtacctgaccccgaggacacaggaagctcccatggaatcagcaggcagcagaggcagggaaagctgctgagcaggaggctgccagacctttgtaatgctgagcctctccagggcattgtcccagctcagcaggcagcgcaggacctctgtgtgccttgcaagccgctttcctcccccctggttgctttgcgctgagcggtaggatgcttttggagctgggagggctttcctcctgagcctcctccaacccacaaaggtgcctttcacgccacagggatgcctccctagttgccaggggagattgaaaagcagcctatgcgcagagctgcagctggagggcttgcggtgggacagcttccaggagagggtcccgcaggagaggaaggggcagccctggggaaggcgatgcgtggaggaggctgctcaccccattccccatctgggtgtctttcaggagtcatggccggcttcaacatggggggcgacctcagggagcctgccgccagcattcccctgggctccctggcagctgttggcatctcgtaagttcccctcatggcaatcagtctgagctagagagtgggagagaaaaccccaggcagaagagggattgccccttttgttctgagagtgccccgactgtgaccaatctatttcatattccgatccttcttttaacactcggtgggctggaaaattcacgtctggtgggttcagacactgccctttcatgcgccctgcctgggaatgctgccgaggaggagtgtcgggacccagatcacagatcgaatcctttctttcctttcctcggcctcccgcccccgtccctcccccacccccattttgaacttggggatttttttaaccaccgagtttccaggatcactggagggagcataaagatgaagagttttgcaatcagacgaattggggctgcatctcagctctgccgctgattggctgcatgactctggacaatttactgagttctctgagcctccatttcctttcttgtgaaatggggataatgacactgtatgtgcttcatagattgcggcggggagagaaggcacacagtggaagctcagcacccagctcttcttcttcccccagtgagcctcccctccagctcccccaggccgtcaggcctctggggttttagttcacactgtgccacccacacaagcaggctgggtaaccttgggtctatttctgaccttttagaatattgtttctctctgtaccacaggaagaagcttctctgcccttcattgggtaggtgtgaagaggcaaagagatcagagaccagaaacaatgacttgagaagttaaaagggcctgtgttattctaaccacagtatttagaaaatattaatgtatctgtttcacaaacactgaatttgttcttagcttactgcagtgaaaccattgctatcagcctggcgtacagcatcagggtattttgtgcaataacattgggaagaaaatgaagacaacagagatagagttgagtgttgggaaggaaataaaagaaagaggcttctgaatgaggaccctgtcttgtttctggccccagctgggaggttccaggaggaacccttggcccatcctctgattacccagatgggaatgaggagaccacaggaacctgggtcttgttcaaggttacagggcatcttggggacagagccaggcctctgctctctgccttttgactttagtttccctctttattatctgatccaaagataacagaccagcaggacttagaggcccgaaggatcatcagcttgttcttttgctggaggaggctggggtgtgaggctgcggggcaaccctggcctgaatcctggcaacctagaggcaactgggcctcccacttccctacttggaatgccctttgtatgtttttcttttttaatataagaaagagaaaaaaaactgctcacttcagcagtacatacactaaaattaaaacaatacagagattagcatggcccatgtgcaaggatgacatgcaaattcgtgaagtgttccatatttttatatatatttaaaagtaaaaaaagaaacaaaacaatggtaccccttttttggtaagaaatatgccagaagagaaatagtacaaaaagtgtcctcccaagccagctggggaagcttcatgactggcctttctctcattctgatacaagttccctttggaaacagaaggttgagtgagggaattggatggggctgggtgaggtgagtcgggggcagctctgttctgctcttgggttttgcaggtggtttctgtacatcgtcttcgtcttcctcctgggcgccatctgcactcgagaggcccttcgctatgacttcctgatagcggaaaaggtgagtgaggcctgcgctactccaagggctcagtctgccggagtcatttatttgttctcaccaacaaatggccaccttccccttgcagtactgtctgggaatccatatagtctttttaaaatttaattaatttattttttgagacagggtctcactctgttgcctaggctggagtgcagtgttgcaatctcagcccactgtagcctcaaccttccaggctcaagcaattctcctgtctcagaccgccaggtagctgggactacaggggcatgccctcatgctgggctaattttttttttaattttttggtagagatgaggtctcaccatgttgcccaggctggtcttaaactcctggcctcaagtgatcctcccaccttgacctcccaaagtgctgagattacaggcgtgagccaccacgcccagccttcatatagtctctagcccaggactgaagtgttgggttgtggtggggaagagacatgatggaaaaggtacaggccctgcttagggatttctagaaacagataatgatgcccagagggattcacaaatatgaggggctagataatggggacatctcttcctgtcaaaaatcaggacagaaacagaagaatctgctcaccccaaattcccagttaagcaagtgcctcacttttgctaatagcttcaccttccacaatgaatcaaatgtgctgctcagaagtggcaagtggagaaggaggctggacaggcagacgtggagggagcgggcggaagcccagtgccagggtgagggccgaggccctccttgtccctcaggtccttgacccctttggctttcctgagagtctcagacattctgggttgatttggctgcaacatctttgtttctagagtctgcaccctgccaggagaagattaatgaattcctggcattggctggaggtcatctgacatcaaggacatttatttggcatcctagaagccacatgaataagatttccagatatttttctggaaatccccaaaaactcccaccctcctttaagttcttggagaaaaagtagaccctgagattcccatcatttttcagagaaatgtagttggttagggagtttttctgtgaactcctgagtatcactgcttatattttatgtattttaaattttaatattttaattttaactttttaaagacagggtctcactctgtcacccaggctagagtacagtgacgtgaacatggctcattacagcctcaacttccagggctcaggtgattctcccacctcagcctcccaagtagccaggactacagacatgcaccaccacacccagctattttttttttttttttcaattttttgtagagacggggtttcgccatgttgctcaggctggtctcaaactcctggctttgagtgatcctcccacctcagccttccaaagtgctgggattacaggcatgagcccctatattttaggatagactaccattttctcttggtgtgaggctttgcaaagcagccctgctggtcttaatggagggccagtgcctggggcaacctggggcaggaaactctgaattttcttttgagagatatgtttgagcttggttttcacattagcacaggtttctttttaaggcttgtaggcacccatgcaaaggtgattatttgttttcaagggtcttgcccttagtataaaagcagattttttggaaggcagtacagttcagttagtgagagaactgatacccactttccagtacccaaggtcacagacccccaggtggcaaggtttgctctcagggcaggaatctatagccctcatttgtatctacatgcatgcttccgtctgaagtttcactcccaagggcctgttctctagttgtggaatgaaaagcttggctgcattacaggaattgaaggcctcagggagcagactgggtgaggctggtttgaccgagggaaatgcttcctgctcatctgcagcttgccagtggctgaccagctctgcctgcttctaaagttcctttctcatgctttccttcacagaggtccttccaccctttagggactctgatctgattatcccctgggccgcagctctcctccctcctctccttcccctgtttttcaagggaatgatcagagtaggtatatgggagggcaggcagctttgtatctaaggaaggccacaaacagcagtagggtaaaaacagcccagagacagcacatgagagcctttgtgggtggaaatcccacacctaatgataggcacacaaaccgggggagcctcctgtggaatgccacctgtcccgacaatgagcaggtaggcaagcacttagccagctgggggcacctgcttcatcaggcccagcaatgacacttgggaatgtaattatgcacacactgggatgaaatgtggagatttagttttcggagaggacaagagaccattccctggaagagaccattgtaaagcctataaaggaacaaagctactgctcttggttctcagtagaaatgggcaggtgcagcaagtcagtaagcagtgatggaaccgaccctgatgacttcaaaatagcagcacctgggtcttctggttcccactacccaccccctaaaggggaccacacaggagtttcctcccacaccttttctgctttcctgctcactggtgtcgctccttgggactgactccgctgcagtagcaggtaccgtgctcaggcagtagattgggccacagatgtttttactggcagtacctggagaatgggagggtgcaacctacactggttgggaggtgcaagggcggagtttctttactttggtcacttgacacaaccggccaccctgataacctgttcacctcagcttcctgtcttacttgtggcttcagttctgagccggcgcatctctgagctttcctgggcctgaaaaaaggcctcttctgtatgtgtgccccgcgcatcacctctggacactgagacagggtgggtctctgacatactctccttggcgctcgttcacacgcagctcccaaatgcactcctctctctcgggggctttctgccagaacaattatcttcaatggctgcaggctgccctggattcctttctactgatctgcagctggtcagttaatctgtttctttctgggtttcctgcagcttctctgatctatttctaattatttggcttctcaactcacagtttctctaagaagcgtctttttactttttttttttgtttgtttttcttgagatggagttttgctcttgttgcccaagctggagtgcaatggcatgatctcagctcactgcaacctccacctcccaggttcaagtgattctcctgcttcagccccccaagtagctgggattacaggcacatgccaccatgcctggctaattttttgtatttttagtagaaacggggtttcaccatgttagccaggctggtctcgaactcctgacctcaggtgatccacccgcctcagtctcccaaagtgctgggattacagggatgagctactgcgcccggcgacgtctttttactttttatccccaccgcagaggaactttctcccagctctcaggtgtatgtgtgttcttaaacgtcttgtatacagtggtggctctgagataacccatgaaagcacgtagtaggtgctaattataatacattttacctggcacatagcagatgctaactaaattttaactcccttccacactccttatgggcatacccttacagatcaagacatttattttaggaacacattttctccccacaaatccaccatatttaatagaaaagccagaacagtcaatctcagtattatttagttagaaaaggaattgtataaacagtgttagttggggtgaaattaaatagattaaatgtttcagaataaactcgtatacagtccaggaaacagatgtttattacaaataaaaaaggccaaataccttaggagccctggggcttgctaactagcaaaataagagcaatctaagaaggaaaaatatcccaaaagtattattgttaagactagggaatctgggtggttcatgcctgtaatcccagcactttgggagggcgtggcgggcagatcacttgaggtcaggagttcaagaccagcctggccaacacagtgaaacccccatctccaccaaaaaatacaaaaatatgccaggcgtggtggtgcatgcctgtagttccagctactcgagaggctgaggcaagagaatcgctagaacccaggaggcggaggttgcagtgagccaagatcgtgccactgcactccagcctgggcaacagtgcgaaactctgtctcaaaaatacaaaacccccctaaaactgggtaatcccacagagcaaactctgattcctggatttaatagtcatggtttcacatattcaagagggaccttggaagctcatgacacaagctgtacagggaagatggggatgggacagcgctggtaactggggagtgagcctagtgggccactcagcacctgggagtgggccagcctgagtgtcctctgccctccatcgtggacacagtcctgcctctcaggaagggaagcagactaggtctcattatggaaaatggctctcaagtgagaggtaaaacttgactgaaagttgagatgttgatcaattcatggagcgtggagatgttaggaaactcatgactctagaaatgagatgtgggaggaaaaaaagcgttgttgagactcggccttattaatacacttgggattgtaaaggtttttagggtgcactccccagttatgtcaggggtcaccgcaattagatgagacagaatgagccccttgcaaatgactttaaatccagtcctttgagagaagagagcagccaatgaatgagcggagtccctcaatgaccgaagctcaagtgggagctgggagaaaatactaagagcagagagatggaagtaattattttcatcagtagttactgaagaaagaaatcagggtagctcacaccccatgtaatattttggaaagagctctgggggtggggggatggctcaaacaggtgtatgccagaaaagaatcactgtttatttaaaaagagctgttgacacacctctgctcaaataaattctcacttccacctccactggcacatttagcaaattttcagtctgatatgaatagagaaaacaattaagttctgtgagggctgggagcagagctacgtgtctataagccttgctctgcctagcaccatgccaggaacataatctgtcgtcaggaaatgcttcctgaatggatggatggatggatggatgacaaatgacagaaagagataggatttaggcaggagagagatggaatgaagtttttataatttatctagatgtggagaccaacatttcatatattactcagaaaatagactgaataatagttttatatttttttaaagtggtaagtgaacagatcattctacacaattgacaaactggacataggttgctatacttggccctgtctgaccccagctcctagggctctggaggaatcccagggtgtgtctgtgggaaggctggccaaagatggaagccaccatatcgtgtactcatggtgccagaggctcaacccagttcctgaggtcagtccaacactaggaggatgccaggctggggcattcccactcattcctgctgtgagtaaataggctttaaatgaaaaagagttgtaaaaattcaaatatacataaccttttaggtaagaagcagtgaaatttctgcaaggagatgccatgcctgactctcccaaagaattttttgaggggagaatgcagtggctacaatgtgttgtgcccaggggttctccacatcggctgcacattagaatcacctggagggctttcttaaactcaaccacgtctgtgtctcactctacactaattaaatcagaatctctgggtgattcttccttttaggcagagtggagaactattgacttaaattttcaaaaggctctttcttgataaaatttcatcatagaatctggtttttaaaaaccagtcaacataggctgcatttggtagagaagacggaaataaaggttatcgatgaatgatcacatctcagaatggattgaggattgataatggatccagcttatctaacagttttgtaaggcacctagggcacgattacagcaaagtcgtgaagctgcatgaattcagctgttgagctctgcttgccagattctgcatgaggtgctgggggaagggggccaggaagcatgatacagttctacctgtgaggtgctcagggtgctggcaggataagccatgagcataactaactatcccacaggatggaaagtaacaaaatgccatcagatcacataaagtgatggaaacactagatgacattgatttcctgtagtaataaaatggtgagtggggtgggcaggacaaacccaagaaatctgcgatattgaaaaaagagacaggtgagattctttggggataagcatgagatgataaagaaaggaatcaacagtgaattaaagacaaggtgggctccgtagtggaccttagtcttgttcatcaagcatctgaccttcctgaccatttgggggttattccaccaatggtcttgaagggagagagtacccccattgtgtgtaatagaaacccaatggaccagacctcttttgcctgtccctttgcagccctggtagggcacatgacctacactaggccattgcgtgctcccattgtaaccaatgaagtaaagataaagagctggtgagaatccatccacagggcagcaggggtgttggcagcatcctggccaagctgttcctggggaagaggctgggtgtgcctccaggcttggtcctgcccttttctgagcctcatcctttagcctcctgatgattctacaaaccaccagtgtcctacaaatatattcttttttaaagaaattttttttttccaatcaactgtcctgactgattcatccatcagtcaaattattccagtgataatttatgagccaggaaagaagtctagccagtggcttgtgttcaatgtagcttggtgacacgaatccggtgctttgctgatgcaaggaagtaaaaaatggggtgaggagagccttcatcaagaagggtgtaagtgacaaagctgaatattaactctaacctatctgtaagcattggacgcatgagtacttggaatgtacagttctggccattgtgcctaaaggaaagtagaatggaaagggcacctcaaataagaaaacaaagatgcttccctgtgggtacagatgagatctggcccaggagggtgaattcatgagtgacagcttgggatctggctgtgcatggcaagcagtcatgcagccacccagccccttagcacttttagccctgagttagctagtaacatcttggaccctgatcttttgcaagttgacaccaagaagaacagctgtgccctcttattctatctgttggtgccttgtgggtcatggatctcattcattcattcgtcatttatatttctgtgttgggcaccaagaattctagggtaaacaagacagaaggcctgcttaaatgaagcctccagattagtggagggggcaccacgataggtgctatcctaacatcatgttggggatgctatggagcactgagaagcaactactgtagtcagggaagaggggatggcctcacagtggaggtgaggttggtgctgagttttgtagcacaattaggagtttaacagacaatgagtagattagggcgtgtgaacagaggcttcctacagacagaaaaatcatgctgatcagactttcagtgtgcagggtgtggagctaaagaggtcacagaccatgaagagccttatatgtcaggacagggggagattttgatatatctgcaacggagacattgtggtcagatttgagtttagagaacagaggcttaggggatgattcagagtgaatcatctgaagatttaaactcatctttaagggtgagcttaaaggcaagaggccaatgagcattgtggttggccagtttgttctcaaagtgtggtctctgggaacgcatgcggaatccagatttctaggccccaccccaagcctactgaaccaggaactctgaggaggggcccagaagtttgtgtttagcaagccctgcagctgagtctggcagacgcttcatttgaggaccactgtgcaatccatatgaaatgtggtggtggattcagctgaaaccatggaatgaatgggggcgaggctggggatgtggaaactgtatcccagggatcagatctagacgactcagtggatgattgcatggggtgcaggtgggtgggtgctgggggggtagaaaggcacaggagcaggttctggcactggcgaatgaaaccgcttctcacacaggtatccctcatgggcttcctgttccttttgggcttatacatctcgtccctggcttcctgcatgggaggactttatggagctccccgcatcctgcagtgcattgcccaggagaaagtgatccctgcacttgcctgtctgggacaaggggtgagtaatcctctttttttggtttgttttttgaaacatgttttgctgctaacctcactgttggcccatcaattggttaagcttttctgatcagagcctctggtcaatttctttggggtgacacagaaaataatgcagaggtcatttctttcagccctgtcctctggctggcttaggttagggctaagtagatgaagcatcttaaatgtcccagccacccagccccttagcacttttaggactgggttagctaaccagtcctagtaccatcttggaccctgagcagcatgaaaatgcagtgccccatcctttaatgaaaatgaattcaggatcctccaggtttagcatagaagaaagcgtgttttggtcaggaggcgagctggtccttgcagctctaactctgcccttgagtttcaaccgccccttgggggttgctgtttgatgatttcctacacctctggcgtctacacttcctgttaaccatcatgaaccaaaccttaactgatacataaagggcagctcagttgagacatggctggaatgattaaaatagacattcctaaagtccaggggaggaccaaagagacataaacagagaatcccatttcccactaatatggtttgcaagctagagttcatttttgtcttgttggggtaccccagagggcctccccagccgcttccaattttcagcctctctctggtttagggaacacatcgttgcaacttatccttgatttcttcctttatcttcctccaaaaatgcagtttggttttggacatagtccgtttgagatcctattagacgttcactggaaatgttgagtaggcagttggatatgtaaacctgggtttcaggggaatgttttaggctggagattcaaatttggaagttgtcagtataatgccggtattcaaagccgtgagcctagttgagctcaccaagggagggagtacagatagagatctgaggatggagcctggggctgctttaaatgtggagttcagagacgtgaaaagccagccacagaaaccaagaaggagcagccagtgaagagggaggccaatcaggagaagtaaggtgaagaaagtgtttcgaagaggactgagtagccagctgggttaaagaagacagggactgagaagtgactgttgcttttggcccaagaactatgtcagtgactgtgatgaagagctcccaggagaggcagctagcaccttttttccactcctgtccacctgaaggtcaccatacccacctccattaataacaggtgtgtgtaatgtgtgtgtgtgagtatttgcggatactcagtgtcagaattagtgtcagaattcccctcctccagccaccagtgattctgctgtgtcttccgcaatctgcctctccctgggaagaatcaactttgcatttctttgattttctatgctggtattaaaacccaatgaaagacaaaaggaggaaatatttgggaagtcaaagttctataataatgccccatgttcatagttattcctatggctgggcacagtggctcatgcctgtaatcctaacactctggtaggccaaggtgggcagattgcttgaggccaggagtttgtgactggcctgggcaacatagcaaaaccacatctctacaagaaatacaaaaattagccatgcatggtggtgtgcacctgtagtcccagctattcaggatgctgaggtgggaggatggcttaagcccaagaggcggaggttgcaatgagctgagatcacatcactgcagtccagcctgggcaacagagccagacccggtctcaaaaaaagaaaaaaaaaaaaaagttgctaatgcaactaatatctgtggagcttactgcatgtcagtctgtgtgaagcatttcgcatgcatgaactaatcccatgagtaggatattattatctcaagtttatagatgaataatcacatggggagaagtggctgagtcattatgagttgtgtttctagcctgtaacttctgaaatctctgaagcgttctatctgaaattttatggtcctgcatgttatttttgttcctgcagaaggggccaaacaaaacacccgtggctgccatctgcctgaccagcttggtgaccatggcctttgtttttgtgggtcaagtgaacgttctggcccccatcgtcaccatcaacttcatgctgacatacgttgcagtggactactcttacttctccctgtccatgtgttcctgcagcctgaccccggtgcctgagccggtgctcagggagggcgcagaaggcctccactgctctgagcacctgctcttagagaaagctcccagttacggctctgagggacctgcccaaagagtcttggagggcacgctactggaattcaccaaggacatggatcagctcctccagctaaccaggagcttgagagtagccagcccaggcaaggagagggtaacaggaccccagaaagtcagaagaggaaaagcaagaaggccaccaagcagaccctacaagatagcttcctcttggacctcaaatcccctccttctttccctgtcgagatctctgacaggttgcccgctgcctcctgggaggggcaggagtcctgctggaacaagcagacttccaagagcgaagggactcagcctgagggaacatatggagagcaacttgttcctgagctgtgcaaccaatcagagtccagtggagaaggtgagtgctctggtatcacactggggcctcttatttggggatgaccactgattatcctacctacccagttattgtgaaccagttataactgggtttaaaatccttgttaattttgtgcaatatttgttttaaaacattatattcaggtatcagctgaattatttgtaattatactctgttatagatagttaattttaaacagaaatttctatctactcctgtatgttagacctgagagccacagctagtaattgggtatcaatctcttttcactcaaaaatgaacagaagtataaagcctcaatgtgagtaaaatcaatctctccttacaagagaagtggaaatgtgttgtgataaactacctgttaaggatgcaatatgttttctttgtggaagatgaacctcccaaaccaggcaagaggggatggacagaaggtggctcaagctttgttttctcaaatctataaacacagagatacacagagacactcacagagaggcttatagagcatgagaaattctgaaaatgagaactcgtattttcaaggacctaccatattctaggtgctttacatctattacttcgtgtaatataacatatattagcattttcccttttacaagtaagaccttgtgtccacatgaggtcacagagaagactctgacctgattctttgcacagctggacatcaccctgcattgtattgtctgtatttgaggcccatgtactttcctctacattatgctctccctggagctatatacagacaggtgtgggcaaagaggaggagatgagggacatagaaggaggtgtctgaaaaatagtgttttggccgggcgcggtggctcacgtctataatcccagcctgaccaacatggtgaaaccttgtctctactaaaaatacaaataattagccaggcatggtggctgctgcctgtaatcccagctactcatgaggctgaggcaggagaattgcttgaacccaggaggcggaggttgcagtggcaggagagttgcttgagcctgggaggcagaggttgcagtgagccaagatcatgacactgcactccagcctgggtgacagagtgagactccatctcaaaacaaaacaacaacaacaacaaaaaaccccaaaaacctagtgttttaagttctcccagaaacctgtttttccttctttgcctctaaatttctgggaaacttttaattaaaaataaaaattattttattttaatcaatgtaataagtgtacaatttaataagccaaataatattaaaagtcacataaccagaaacagtagttcctactcttttataccaccccttttacccttctctatttccagtcccattcccagaaaatcccactttgaaccaaaaatatgcttcttctgttaatctgtcactaaataatgtatttgcattgctacttcttgatatgtcagtttctgacatcatcttttgagttgctgttatggtaaatgaggatttggtgcgatctcagctcactgcaacctccacctcccgggttcaagcggttctcctgcctcagcctcccaagtagctgagattacagggacccaccaccacacccagctaatttttgtatttttagtagagatggggtttcaccatgttggccaggctggtcttgaactcctgacctcaagtgatctacccacctcagcctcccaaagtgctgaaattacaggcgtgagccaccacaccctgcctggatttaactcttatatgccactctgacttctccttatttaatgcccccagagtagttatctcacagttttttattaaattaaaagctagtattcttgttatcatgactaagtaaatattgctcagttctgagccatatgttacactatgattacatttccttttttgctcaacttttgctgtttcctggaattaataattgccttggttttttctttgcttggttttctgtcatcatttttctttaaatgctctggcagatctgtcaaatgcctttttgtgttattttcaaaatgctccaattcttcagaaatgtattcttttcttttttcccctctgtcctatggctccatccttctgttccactctagattgtttgtttgctaggtctgctacaaagctgttgtcttagaattcctcttgttaccacacttctgtgtcagatccaggaaacaagagatttcttaccaaagtcatgcttttacatagtttttctttgataattccccacccccatccctccatcccccctctattatctcgattttgtatcttcttaaatggttctctaatcttctttcttttctctttcctattgttcatttatttgttgtttttttctgggatatttcatggattttctctcccaaggcttctaatgattttttttttaaagtgttggttgttgtatcagtcacgattagttttgactgaggataacaaaattgcaaaataatagtgacttcatctagctcatacacaaggatccagaggtgggcagtccatggctgccatggcagctccatggtcctgagtgacccatgctcctttatcacttagtatattgttctgtgatccaacatgtggttgctggggtcacgccattacatttatattccaggcactagaaaaaggggagggaaaaagggcaaaagggtgagcctctaaactgagtcatttggaggaggcttcctcaaaagtcccattccaacttctcatatttcattggttggaatttagtcatgtgattacaacaaactgcaaagaaggctgataaaattgttttttaactggtcatattactactttacataaaattatgtgttttttctttttttcctaagaaagaaggagagataaggtagcaactatcagtctatgccacaattatccagtttttaatttccaagacctcttggttgtgatctaatttgtccttgtcttttttttttttttttctaatttgaacatcatctatttttgttctatgagtacaagggcttatcttctctctctgatactattattgatcttcctcctttaaaatttttttctgaggctggacatggtggctcatacctgtaatcccagcactttgggaggctggggcaggaggatcacctgaggccaggagttcaagatcagcctgggcaacacagtgagaccccatatctacaaaaattaaaaaggaagttagctgggcatagtggcatatgcctgtagccccggctactccagaggctgaggtggggggatctcttaagcccagaaattcaaagttacaatgagctatgatcactccaccgcactccagcttgggggacagagcaagaccctgtctctaaaaataaaagtaaaaataattttaaaaagtttttttgatactttcactgttcctgttttctttaattattttctctttggtttgggctctctctttataaaactatttttttttttttaaatcttggaggcttttactaaaatgtccattgatcttttgttttctttttgtacttaaaagtgaagcactcgctgggctcggtggctcacacctgtaatgcagcactttgggaggctgagacatgaggaatgtttgagcccaggagttcaagaccagcctggacatcatagcgagatccggctgctacaaaaaactaaaaaattagtgggggtatagtggcacatgcctgtagtctcagctacttgggaggctgaggtgggaagacaacttgagcctgggaagttgaagctgcagtgagtggtgatcacatcactgcactccagcctaggtaacatattgagaccctgtgtctacaaaaattttttttcaatgagccaagtgtgatgacacatgcctgtagttccagctactcaggaggctgaggtgggaggattgcttgagcctgggaggttgaggctacaatgagccatcatcacgccactgtactccagccttggtgacagggtgagcctctgtctctctttttttttttttttttttttaagtgaagtactaaaaaactgtttagaagagctttgtacattagcagggcttgttaattggggcaccttactgtagaataaggaggagtgggctagactttttactggaggacccccaaatgtgaatatctagaggtttttctcttgggctcttcacgttttcctctggaggagagttctttaatcccttgcccgagggacacacagataggtacgggcattctgggaacaggatgaggtgagtgagttggagaggggtcccactgtttagggtatagatgttcatttaattccctgccttcaaattccatttccacactctttgctgtgcctgctgtgccaagtttaggcactctctggcttgattgtttcaaaggaaagcccccttgaggagggaattgggcaacagaagggttgttacttggcttcataggcagagaaaaggatcttggtatacaacaaatatagacctcccacagccccctataccttaccactgcatgggatgtggtgcttcctggtcctgaagctggtctgccagaatgaactgggctgctccctgccagcaccctctctgggggccctagggttcactctcctctgctctgctcagtctgtcactacggtcacctttccatcttccaggacttgtttttatttttcctctctcattctcttcgtgtttgtgggtttatgtctgtttcattccttttctgtcttctcattggattttcaggagagacgtggacagtctgcaatgtttaatcaaggaagtggtcgctgtccagctgcctagtcttagaaatgtcataggtgttgctgaccattccctctctcccactccctgctgcctttactttggtgcagacgctcatcatcttgtacctggactcttgctaagtctccaagactctcccgcatcccatttctccttcatgctgcccactgaatgatctttctaaaataaaactctcatcatgtctctcttacttaaaaatgcttgctggaatttaaccccttccgtgtaaagtcccagatagggtgtacgatgcaaggttcttcgcaatgcagccctaacctacgttcctggccacacttctcatgacaacccatgcactgtacgttccgctttcacccaaactgatgtcctaaacacaccatgttctttattccttcctgccttcatacaccctgttctgcctcctccgattgcttcacctcccccttctccatctggaaaactctgacatcatttaaaatccatctgacttttaagacccactttcaccccttttggagaaggattctctgatgtcttccactgtgcaaccataacatttgattcatattagtaatataaactattatctcatatttatatcacatcatatttatatcacatttgttcacacatttgtctttaggtttatttgtctatcttaaggaaataaatattaaactcatttctttgccactagattatcagattcctttgttttcaaactatgtctttttacctctgtactcgtcacaatattcccatacagtacacataatgtagcaaacactcagtaaagcctacttgaattgatgagcaattgagcaaattttggctaaaacattgaagcattgatcaaatagaaagagttaaactattataagaacctaatcgttgacaaaccagatgctataaaataataataatcaaatcacaatggaataaatattcctgaaagcatggattttaaaaattaacttgaggctgtattttataccttatatacacaagaattatttatttacaacagctgtgcaagagagattttttaactacgtagacatcatcaaagacaagatatctgattaaatagaaataaaaaacatttgtacaacacagtgtcacagaaggaaacaattattctgacaaaacacaactgatgaaagcataccttccaaagcgtattatttttaaaaacaggaaggtcaaaatccagattttactgaaaagatgtcaggtgagataaatacaaagttttacatttgaaaaattaatgctcactcattcatgtccattcaacaaatgaattcttattgttaagtattattagtagctaaaaatagccagcacttactgagcacatcctatgtgcctggcactgagattagcatttaatatgagctatttcgctgaagcccagatttaggcattgttctgtctttctacagatgataaaactgaggctcagagaagttaaacacttgctcatgataggagacagtcagaatttgaacccaggtcaatctgactgtcaaacctgtgctcttaaccactacacagtgtgtatgccaacacttgcaatgggtatttgttttgaactaggccatgatattgattaaatgaacacaaattaaatcatcttttttttttttttttttttttgagacggagtctcgctctgtcgcccaggccggactgcggactgcagtggcgcaatctcggctcactgcaagctccgcttcccgggttcacgccattctcctgcctcagcctcccgagtagctgggactacaggcgcccgccaccgcgcccggctaattttttgtatttttagtagagacggggtttcaccttgttagccaggatggtctcgatctcctgacctcatgatccacccacctcggcctcccaaagtgctgggattacaggcgtgagccaccgcgcccggcctaaatcatctttaagatagcattaagctgggcatggtggctcgtgcctctctactaaaaatacaaaaattagccgggcatggtggcacatgcctgtaatcccagctacttaggaggctgaggcaggagaatcacttgaacctgggaggtggaggttgcggtgagtcgagatcatgccattgcactccagcctgggctaataagagtaagactccatttttaaaaaataataataataaatatatataattgcatatctattaagctataaaaatttaaataaaaatagcagatttgtgataattaggtgtatgtacacattgctagaggcaacatcaattgattcattctttctttcctgttgattaaagtttttcatcaaatttgggaagtttttggctaatatttcttcaaatattttttctgccctttctttttctcctgtccctgtgggacttccattacatatttgttgatatacttgacattatcccattaggcctctgagactctctttcctttgcttccacctttccccctctgttcttcactttggatcatttttgtcttgaagttcactgattctttcctctgtcatctgaaatcttctgttgatagcatctagtacatttttcatttctgttactgtgctttctaactgtagagttttcatttggttcttttttatagtttatatttctctctctctcttttttgaaacagagtttcgctcttgttgcccaggctggagtgcaatggtgtgatctcggctcactgcaacctccacctcctgggttcaggcaattctcctgcctcagcctcctgagtagctgggattacagatgcccaccaccatgctcagctaattttttatttttagtagagatggggtttcaccatgttggccaggctggtctcaaactcctgaccttaggggttctgcatgcctcagcctcccaaagtgctgggattacaggcatgagccactgtacctggcctttagtttatatttctctgttggtattctttatttttaaagtcattgtcatccgaatttttttctcattaacattatcgttttctttaattctttaaatatatttttaacagctgctttgaagtttgaagtctttgtctgctaaatacaacacatgaacctactcagttagtttcttttacttgatgtttttctttcctgagcatggatcacagttttctgggttttttgcatgtcttgtaatttttcgttgaaaactagacaatttaaataatgtattatagcaactctttattctgatatatatttctgagtttttggttttttgtttattttagtaaattgcctggatttcaactgtggcatctgcctcccccgtggtgtgtggctgctgatatcgttagtcagctttttattcttatgtgtttagccttgcttcctaggagttgccccctgtgtctgcatagcccttaaggctctgcatagcccttaaggctctgctctctgccagtggatctgtgtgtcacttgggaagcatagtcaaaactggatccaattagttccccattctcctctgggttttatgttttgccaggttctttcaggcctccccaggcgtgggcgtagttttctagtcatccagggaaatgtggggaggttatctagtctttctatggtgctctcatttccaggatctccccattaaatttctgctggtcttctgctcaccctagctgggtctgcactttcaggctagcaaggattttccccattcatttttctactgtgcttatcatatttagcatataaagccacagccttttgccctggcttcaaatcaactttgcccctctgacagcaaactgctggtttctgaccagcttcatgcttaatgggagcagcttaggcaagaaggctacaggctttcatgtttcttaccctcagctttagaaatttttgaaaaataaatacttctcaatttgttttcttcatctggtaaatttctggagctctgaagtaagtgttttggactattttgtctagttttatacgtgtgtgtgtgtgtgtgtgtgtgtgtgtgtgtgtgtgtggagaagattcactgacctcttcatactgccatggctagaagtccctctggttcattgtttgtggagaatgatctttcaagatgtaacaagaaacacaaaactgtttaattgccctgacttagtaagtctatttgagggaactgtttatcaaggaaacaaccccaaatcagccaaacagcaaaccaaaaaatgtgtacaagattgtcatagctgcattgtttgtgctaatgacaaattagaaataagtgctcagcatttggaaagtggttaagcaaattataacatcaacatgataaaataccacgtggactttaaacatgattctgtgtggactaaggcaatatacgttatcagtttatacatgctaattagaactatgtgtttatttattctgataaagatatgaagtgaattttcacagagggtttaatatttaagtaatttctataaaattacttaaatttattatttaaaaattaacataattggggtttcctcctttatgcttaaagtgtttatatctgctgtgaacatagaacttagacatatcactagattttaaaggtcaatttaatattttgccttatatttgttatgtgtagcatttttaacatgcacgatgcatgcttgtttgttttatgagtagaggcttgataaagtaaagttacctgcctagttgtaacttcctagtatttctagcatgagaagctgtcccctgcccctctgacaagtttgtacaacttgctttctccagcaaaatctgagacaagaaaaaaaattcctgaattccagcacactaagtttcgttactagtgctattcagaatttatgaataattgtctattttacagtacttattcaaagagtcattgagcatctttgcataaattttcccttacattgctgatatataaaacagcattgtggctgcctagaggacaaacctttcctactacttctgcccaagttcctcagaacacacacacacacacacacacacacacacaattccctttaggttcagtaaaattgaggttgtgtaagatcaagtgttgtaaaagggtgagctttaacaggtgacagatctcaaagagatgcaaaaatataagttcttaaccaatagtgtttcttcttcttttttttttttgagacagagtcttgctctgttgcccatgctacaatgcagtggtgtgatcttggctcactgcaacctcagcctcctgggtttaagcaattctcttgcctcagcctcccaagtagctgggattacaggtgcgttccaccatgcccagctaattttttgtattttttttagtagagacggggtttcaccatgttggccaggatggtcttgatctcttgaccttgtgatgcacctgccccttggcctcgcaaagtgctgggattacaggtgtgagccactgtgcccggcctagtgttccttcttaataaccaagagggcaactgtattttactaagcctacgtttgccattaattaaattgttaaaattaaacaattttttaaataattatgattgccattaattaaattgttaaaactatacaatttaacatgctgaatagacatagaaggtttttgctgttgtagagcttacattctagtaggggaagacatatgataaataagcaaatacacactgtgatgtcaataagtgataagtacaaaactaaacaaataaccaatttaattaaattgttaaaactatacaatttaattaatggcaatcataacagaattatttattttttgaaaagtaatagagccatccattcagatcaatcttgcagactttattttaatccataattattaaggagacttttactgagcgcttcctatacacaaacttctaaatgcctagagttggcatttagaatataaaagagggtccttatccctgaaggtacagatgtaaaaaaagataagcataatacttggaggcacatgatgaatgcaaatagatgttgagaggatgaagtcttctcaaggtgtagaatgatttattcattcacccacatgtatggaatacctcgtacattccagacactgtcccaagtgctgggggaacatgctgaatagacatagaaggtttttgctgttgtagagcttacattctagtaggggaagacatatgataaacaagcaaataccatactgtgatgtcagtaagtgataagtataatgaataataatagagtaatgggataaagagagaccagggtggggaggaagatgcactgtttcaggtaggtttattagaaaagatctcactgggaagatgatattttaatggagaactgaattgcatgaagcagtgagccatgcagagaagtagaagaagagttccaggtagaggacctggcatgtaaaaaagtccaggtgggaactggactggcaactcatcaagaatggcagaggcccagtagtgactggagagcagtgagccagggaagagagatgagaggggtccagtgaggaaagcgggggcagtgctgtatagggccatgtgggccattgtgagtgtgatggaaggcgctgaaagttctagctacagctacaatgtgaccagagtcagtctttaagaagatcactggcttttagaggtaagagagagagccaaggccaatttggaggtatattaattagggtaggctaaacaaataaccaaaaaatgttatttacttgctttacagtgcaagaagggtgttccaactccatgggaggctctcttccatgcatccactcagggatccaggctcctgccatttgtatgacttcactatgccctcggacctagtcatgtgaagaatcaagactgagttaccacattcagatttcaggcagaggaaggggaaagtgcacagagaagaggcacacattctcttaaagaccttgggccaggagtggcactcactgcttctgttcacattctgttgctgagaacttagtcacatggttacacctaacagtgagaaatcctgtggactgtactctagctggggtctgtaccacaggagcccgctgcagtaaatggatgaaagatgaaagtgggttggactaggatgggagcaatggaggcagtgaggagtcattgtatccagaatatattctgatagtagaataaacaaggtttatggatggaataagtataggtgtgagagaaagaagggagtcaggatgaatcttacatgtttgtgtaaatggtggtgttatttattcaaatgaagatttgaggtgaatagatttctgtgttagtcatgttaagtttaaggtgcttattagccaactaatgggtgatactgagaagacaatgagctattcaaaacttaagttcaagggagaggtcgaggatgatgtaaacttggagtcatcaatatatcagtagcatttaaagccatgagactagaagaaatctcttaggagtgggtatacatggaaaaaaggagtgctgaagactgaatgttggaatactccaatattttcaggttggaaggaggaggcgagccagcaaagaagactgagagagtgggcagtgacatagaaaaatcaagagagtgaggcatcttagaggataatttttccaagaaggagaaagtgatcacatgtatcagatgctgcctgaaagatcaaatgggatgagggctaggagttgaccacagaatttgaaaagattcaaatcattggcaactttggtaagagtagttttagtggaaaagtagatacaatcataagagtgggttgaggaaataatgggatatagagactgcataggcaattcttttgaggaggtttgctataagggagagacagcaataggacaataactaggggtgagctgtagacatttgtttaggtgggagagaagacagtatatttgtatttgttgggaatgattcagtaggggacagaaaaattgatgatgtgagaacaaagtccttgaacaggccaaaagggatgggatcctggcacaagtggagggatgggccttagttaggatcagaggctgttcatccaccgtgaaaggaaggaaggcagaatagagggtatagatgcaagtgaattggctaattgggtgatgagagaacatgaaaagttctctttggagaagagagcttgtaaatttgttctatcagagagtaggaggatgagttgcctaggtatgaggctgctgagtaattctgaagcatgggagcagatgtgtatgtaggtaagaggttagggaaagcgggaggtaggtgatggaaatcaaaaacatactaaggcaaactatctaaaggtccctctgtagactatgaatggttggaatgaggaacagcagagcaaatgagcttaacgttgcttttaaaggaggttatgggctgagagtagattgctgaaagtcatgatttaggaagtgtaaggttactggtaatgacacaccgcaagtgcagctaagggagttgacagttgggatgagtgaaagaaaagattattagtatgaggatttcaaggaatcgagaaagtagggctttggatgagttgtttttgtagaagtcaccaatgatgacaatggatgctgatagagaaaaagatggtgaaccaggggctgaaatatttaacaagcaagagaagaatgacaagttggtaaaagactgtaatgatgaagggtagggtgtgaaatagtctgatggcatgtgcttcaaaggggctaggtcataaagcaacagtgaccagagaggatggagacttgggctaggaatacttagtgagttttgctacatgccaagccctaagctcaagatggatgtggaccctgcccccatgaagcatataatccaatgggcatagaaacatgtaaataagtatccacctacaaatgatggtaagtcctgtgaaggaaatgggccataaggaaatattaatggtatgtgggaatatatttagattttcctgtggggctgatttccctgaggaagtgataactgagctaagggatgcataggagttagataagcagagggctaggggatccatgagacgtggatcccagatagattccaggaaccaacacatcaggagtggttgacatgtggaagaacactggtatatgagacaggatttggaccgtagtgaagaaggaagggctgggcagaggagatgacacagtcaagagagtttggctgaagtggaaatttgatattggagaacagagaagggctatgtagggagctttctactatatttcctgagcaacaaactatgaaggttgagaacacctgaagttttagtgttgaaatgaagtataaacatactgcgaagttaattcaacatatcatttatttgaaacattattgtggtgttcatggtgattagaccatattgttaaacaatctagatgcattttcatagttaaattgagcatttctgcagaaacagaaagtcaaatgcctcatgtcttcacttataagtgggagctaaataatgtgtacacattgacatagattgtggagtaatagactttggagactcggaaaggtaggagggtgggattgagagatgagaaattgcctaatggctacagtgtacactatttgggtgaggcttacactaaaagcccaaacttcactactctgacattaaaaaattattattatttttaaattgagcgcttctggagccagctgtaaactgagaatgcagagctgaatagaacatgacatagctctgaaagccctgttgtgcctgaaaggatgaggcaggatcatgcatttgtttattgccaggcccctttcccctcagccatttcaattgccagaggaaggaatcagaggagctattctccctccatctttctccttcatcagtttctggttgatacctgagacaggtctaacatgagctaactttcagagtcagaaggtagcaaagaccatctctcattagacaaaagccaacctgccctagcagtcccggtggtcacacctggaagccaagaataccagatgtctagttctcccactctaacaccttacatctgaaaaagaggggagagctgagcttctagttgccccagatgacatatctggacagttgtgccttgagcatcagaggaccttcctctccactctgtctctctcttctctttctttctcagatccttggctggtgggaggccataaacacttctttcttccttctgcaagagcaagccctgggagatgtcttttaggctaagttacaaaattggggaagaggagctcataggtatattttcctaaaaaacagtagagagttgatagcaatttggcagccaaatctttggctattttttagatttcttcctgaagtccaggctccaagaacaagatgtctggagaagatccacttctttctatacccacatgtgcaacccctgggtctccctgttgggggtgagtaacttcatcttgatctcagttgttcttgggacagagttcaggtggacacatgtgtgatcttgggctgtgggggaggaaagatggagggcctaattagaagcaatgtgatttgcctgttgtattagaatttagatgagactacatatggtaagattacatttaatgactgcttattttaatcaataatttcctttttaaataattgtctatgataacttctgggttactaaattttaaggtacgctaagttatcatactttcatcctaatttgtttcttatagggaggaatgggacaaggagataagatagaatatctagttgatagttttaattaaagagttattttcagaaggtgtctgcccaaatatctgcttaagtgaggttttttgaattcttcataaacttcaattattcagacttttacagtgatcagaagttgatgagagggaatgttgttgctgaagacattagccttgtggcttgcttaccatgtagaaagccattaggtgatttgctcttcctactctgttttcacaggctgttgggtcccttctcatcatgtttgtgatacagtgggtgtataccctggttaacatgggtgttgctgccatcgtgtatttctacattggccgggccagtccagggcttcaccttggtaagcagcagagccattttgccactggttccctcattctctctaccattcattgggaaaaaaaagattttgaatatcaattgaatgccaacactgattcagatgtgaatcccattttcaaataatttatagtctaggaggagaactgtgacaagcacatgaatgattaccaataaaaataataacttaaaaatgaggtttataagatatgtagaagtaaaaatgaataacaatagtccaagagctagcagtgaagtgaaagtatactgttgtaagtttcttatactttgttaaatactataacatcacttgatggcagattgtggtaagtttaaaatgtatactataaaccctaaagcaacctaagataacacaacagttatagttaagccagtaaaggagataaaaagtactcaatcaaaataaggcagaaaaagataataaaggacaaatgagacaaacaaaaaacaaataacaagatggtttatgtatatgtaatcccagccatatcaataatcacactagatatgggtggtctaagcaccctaattgaatgccaaagattgtcagattgaatgaaaaagcatgacccaactatatgctgcctacaagaatccttctttatatgtaaagacacaaacatgttaaaagtaaaaggaaggaaaaagatacatcaggctaacactaatgaaaaacaaagcagggtagctatattaacattaggcaaagtagagtttggagaaaagaatattacagtgataaagagggtgatttcatgaagctgaagggaaaaatacatcaggaagacataacaaagcttaacatttatgcacttaaaaacacagctttgaaatacacaaaccaaaacctgatagaactacaggaagaaatagaaaagttcacaaccatagtcagagatttcaatacctccttcctaataattgataaataagtatacaatcagtaagtctacagaagacttgaataacactatcaacaaacctggcttaattgacagttagagaacattctaccccaaaacagcagaatatatgttcttttcaattatacatgaaacatttaccaggagagactatattctagtacatagaaaatatttcaataaatttaaaagtattcaagtcaattcaagaacagagtatgctctctgaccagagggggaataattagaaataaataacagaaagatatcagaaaatccttgaataagccaggcacagttcgcacacacctgttgtcttagctacttggagggctaaggcaggagaattgcttgaggccaggagtttgaggccagcctgggcaaaataacaagactctgtctcctaaattaaaaattaaaaaaagaaaagaaaatccccaaatatttagaaactaaagaatattacataaccctaattaaaatacagaaaataaataatccatgattcaaagaagaaagcagagtgaaattacaaagtattttgaactgaataaaggtgaaaatggaacagcaaaattgtgggatgtagctaaggaaaatttatagcatcaaatgcttacgttagaaaagaagatcatttgcaaatcagtgatcccaacatccaacttaagaaactagaaaaagaagagcaaattaaacccaaagtaagaagaaaaaaggaaataataaatcagaatagatcagagtagaaattaataaaatgtaaaacagaaaaaaatagagaatgcaaatgaagcaaaaaactgattatgtgagaagatcagtaaaattgataaacctctagccagactgatcagaataaaagaagaagcacaaattaccaataccaggaatgagtgagatgacatcattagaaatcctatagatattaaaagtgaaataaagaaataatataaacaactttctcttgataaattgacagcttagatgaattggacaaattccttgaaagatacaaactttcaaagctcactcaagaagaaatagatatggggctattcaggtcatctattaaagaaattaaactggtcattaaaaaccttaccagagagaaaagcctatgcccagacagctttactaataaattcaaccaaacatttaaagaagaaaaaatactaattctatacaaactctttggaaaactatagactaacatatctcatgaatatagatgcaaaaattcttaacaaaattttaacaaattgaatgcaataatatgtgaaaagaataatacaccatgatcaagtgggtttcttccaggaatgcaaggttcatttagcatttgaagttaatcaatgtaattcaccatatttacagatgagaaaaggaaaactacaaagcattcctgaaaaaaaattaaagagtaaattaaagaaataaatgaagagatatactatgttcatgaattggaagacttaatattcttaaaagtttaattatccctcaatttttatatacatttaacataatcccagtcaaaaatctccgctgcctttttatagaaattgtcaatcagattctaaaatatttatatggaaatgcaaaggacctaatagcccaaccaattttgtaaaagaagaacaaggttgtaagacttgcactttctgatttcaagactgattttaaagctaaagtcatcaagacagtgtgatgtggaagagctagacaagtgaatcaatggacagagtagaggatttggaaactgacccacacatatatggtcaactgatttttgaaaaagattcaaaggtaattcagtgggaggaaagaatagtctttcaacaaatggcactgaaacaaccagaaagccatatgcagaaagtagacttccacctatatatcataccatataaaaatataactcaaaatggatattagaactaaatgtgaaacttaaacctataaaatttctagaaggaaatgtaagagaaaaatctttgcgactgtgagttagcaaagatttcttagataaaacaaaagcatgaaaatatttataaattggactttatcaaaattaaggacttctgaccttcaaaaaatacttttaaggctgggtttaatttatagtgacagcagatcagtggatactttcgaatgggaatggagtaaggatacatgggagagagatcttatgaagtggcttgaggaaacttttggaggtgcgagacatgttcattatcttgcttgtgatgctagacgtgttcattatcttgcttgtgtgtatatatatatatatacacacacacatctaaccatgtgtacactgtgaaatatatatatatatatatatatatacacatatatacacacacacacacacagaccaaattgtatactttaaatacagacactccttgatttaatgatgggattatgtcctgataaaccaatggtaaagaataattgtaagtcatggactgactatacatgcagtttgttctgcagatgtacccaggatttgttttaatcaggtgtggtaaaacacacagacctggaaatgactgtcatgaaggaggaagatcgttagaaacaggaggcttggtatgccatgcagggccatgtggggatggaccagggttagtcatggggcaaaagaggaagaggggagatcatggcctaaagactcttatgggtttttgtggaaaggaatgagcaaggcagggtaagtacactgcgtaaggctaggattgaataattcgagtaattttagcagactctgggctacagggatgaactatagttgtctcgtgctcgtgtgatttagggcaggggtaatattggcttggtgtgggagagtttgataaagaactacattaaggggaagaacctggattggttggttttatatcaaaagcccagggactggagaattgtttgctattcagtatgtaggaattagctagaccctccaggatcaagatccaaaatgccagggcatccagaatatagaaaacaagaaaatacagtcaatacacagtttattgcatatcaattattccttaataataaagctgtttaaaaatacattagagagcccttttcagcaaaatcctatgatgctccaatttaaaataaagcaacttgttacaactactaactaaatcaaatagcccataactatttaggcaaactaaaaaaaaaaaaaaaaaaaaaagtttgccgggggggggggctcaaacctgtaatcccagcactttggggggccaaggcaggcagatcacgaggccaggggttaaagaccagcctgaccaatttggggaaaccccatttttcctaaaaatacaaaaattagccaggcttgttggcaggggcctgtaatcccagctactcgggaggctgaggcaggaaaattgcttgagcccaataggcagaggttgcagtgagccgatatcaacctctagcactccagcctgggcaacagagggggactccgactcaaaaaaaaaaaaaaaaagagaaaaaggttcttcagaattagaatagtctgatgcacttcaaacactttgaaagaaatgcacttcaaacattttaagtcgtgtgtattaaaaataatgatttagaaaaacagtaatgttaagaagaggtccttatgttagctgacttcatggatagaatatattttaattaacagtgattacttcagtgattgcttctttatttcttaaaaagtagtttgatcttaagaaatttcaattatttcctagaaatctattcataggaaaacatgaaatcaaatttcaggccaatgtccatctaaaattcaaataatttagaatctaaattatcacacttaagtagggtgagttaataaaatatgtttattttcttccttctgacaatctcaaaatgtattagaaatcttctctttgcaattgcaaatgcagatctaaaatttatcttccctttagccataagggcctaaatgatattgaggaaacaggttatcagctgcatactgttgatatttgtggagattttaacataagcctcttaaaataatgctattttcctgatcatatattgaacattatctaatcaatcaattttcaatcatatgtatgtataatttaggaaagcattttctaaaatcacatttgatttgtttctctaaagttatatataatttactatgtgaatttttttaaacctacaccaaaggaggaatggatttttttcaattgataaaccctattcaaatctgtgtgtttgatgtcaggattatttggctagaatcaacaacaatgtcacttcaaacttcagctctaacatttctacatgtggaactatttgattcacttaacacctgttaaaaaaattcttaagtgccagatcctgtgaggtactgtgatgattataaggatgaaaaagacatgttcccaattctcagtgtatggtctagtagaaaattttatggcatgtattcaacacttgtcagtatgaatcttaaaaaatttatcaaagttttttaattcttaagactaaagttagcaagtctctgcatttgtctttatagcactttatccagttttttgggagtgattttggagtttggaaataaacttttgaaggattcacatgagtaaaagtccttagtaggctgctgtcatggaagattacaatgaaaattatttgtttagactgaaaaaggaaaacatttgtgttaattctgtgcgtgtgtgtgtattggggtttgcattcaccctattaaaactgagcttctagatgccttatgtagaaccttcaaaaatggttatgtatatgtcttccctgcaggatcagcctccaacttcagctttttccggtggatgaggtctctcttgctcccctcctgcaggtctgtgccaatttggagccagtaccagaatggatgagtgtccagagtcctgggaggtgccaagggtgtcccattcctggctgggcttgggcctggattgtggcatgggaacctaacaactgggcacctccgggagactcagatgttgctcctgcgtgcactccaccacactcggcccccagattcggctcatcagaagcttcctctaggctcatgtcctcttcccttcttatcctcagtcatcaagaacagaggctttatttagaatctggttgctggggtgataagtcactactctcagtgagtttacagtctaagacacattcacatcaatgcataatcacacacaagattaaagcccaagggaaatgtaacgccaggaagcacattcttccatctgagtcagaggtagttgacatgactgggttggggacagtgcagaggccaagtatagaaataaagtggagatcctggaggatttctgtgggacctctatggtcagatatacaggaaaggagaaaaaaaactttcctgagaaatagaagcctcatagagagggtatatttcacatgtgccctaatctcactccttttcctcactcttgcagtatcactgcttcttaccttttaaggccctgggattctggggaattacacccaccctctgtcccctttcaatatcagtgaggagctagagctgcaggctaggaaaatccaggcagaacccaaccgagtgttcatttggttgcattttgttggtttgtttttgagactctagatgtccgggttgtacttgctaatatttccaccctgcatgttcagacattgctagtggatcatgggatcctttcccattgatcccagatgtaacttcataatccttttttctcctcattttaaaaattatggtaaaatagggctgggcgtggtggcttacgcctgtaatctcagcactttgggaggccgaggtgggcagatcacctgaggtcaggagttcaagaccagcctggctaacatagtgaaaccccatctctactaaaactacaaaaattagttgggcatggtggcgtgcctgtaattccaacttctagggaggctgaggcaggagaatcgcttgaacccgagaggcagaggttactgtgagccgggatcgtgccactgaactccagtctagttgacaaagtgagactccatctcaaaaaaaaaaaaaaaaaaagtgaaatacatgtaacgtgagatgtaccatcttagccatgtttacgtgcagtgtgcagttcagtggcattaaggacattcacgttgctgtgctatcatcaccatgcccattaaacactctgcattcccaagaatcctatttaagacaactcttcacaaataattgccaatctattcaagatggcacaagaaatacagccttcgtgctggagcttgggatgacaagaagcagcagcaagggctacagacaccagcagggacagggcccagggatggaggctggggtgcatggggagcaccctgtcatctgcttacttgggccagctgggctcaatgtctcatgtggagctgcagagagggtgagtgatctttctgcctcttgtcctgtccgatgcacaaggttgggtgagccaggtcacaacatttcttcactgatctcttctcccctacaacccagtcctgagaaagagtagagtttaaatggaaatagattctgtgtaaaagctgcctacagattctggagctgcaagtggtgtgtgggtgagactatttttttgccttgcctgatttacaggaatatttttagtcatttctggttttaaagcctaaaaatgccatgggaggtcaccagtccttatgttgtactctgaattcctaggatttcaccttggaggtcacagcagtgctatgtagaaagaagaatgtactagggggagattattcttagaaaaggacagtactttggttggagtagaatcagtccacaccattcataacacaaacaccaggctctgtgggctgtgaggtggggagcagaggcctcagctaagtcaacatcaaacttattggccttaccatggctgctgggcgatattttgggatggttattcaggaggttgaaagaaccaagaaaggctgggcgcagtggctcacacatgtaaccccaggactttgagaggctgaggcgggtagatcacctgaggtcaggatttcaagaccagcctggtcaacatggcaaaaccctgtcaccaggcatgtggcaggtgcctatagtcccaggtactgaggaggctgaggcaggagaatcacttgaacccgggaggcggaggtttcagtaagctgagatcgcaccattgcgctccagtctgagcaatagagtgagaccttgtctcaaaaaaaaaaagaaaaaaaaatggtgatttattttaaaatagagattggtcagatgcactggctcatacctgtaatcccagcactttgggaggctgaggcaggccgatcacttaggccaggagtttgagaccagcctcggcaacatggcaaaacaccatctctactaaaaatacaaaagttagccgggtgtggtggtgcacacctgtaatcccagctacttgggaggctgaggcatgagaattgcttgaacctgggaggcagaggttgcagtaagctgagatcaaccactgcactccagcctgggcaatagaatgagactctgtctcaaataattaaaataagataaaaaataaaaatagagattggtagctgtgtttctgctttgtagttttgagttcccctcccagtccccaactataacccccaaaatgctcttcaaaacctaagaagaagaagaatgtagggtgtgttttggcagaagaatttggctaggttacttcctctgttatgcctacaattcccatgatctatgtgaagttgagcctgtcattgagaaggcttgctttcttgaagcactagcaactgtccaaatgaggatttgaaagtcattctagactagagagtgaagtattttacttctccagactcagaagaatgtaatggtttcacctaaaaaatcaaaacaaaagcattagcaaaaacacttacatgttgactggtgtgacatttttgtcacctcctaaactttttggagattcagcctttatagaagttaattcagttctcaagaaccctcagagacctatatgatttatacatgttctcaacaactggctgtaatgccatagtcatgtgatctgaacttctatagcaggacatttggccagagtccgttgaaactttctgtttaagttccacagatcaataacattagatttctaccttttcgcaactctcaaatgtattccatattcaaacaattgaaacttattactcataaagtagatgattcttttagagtaaaaattttaagaggaaatccatgtctaaggtatgacttacagacctaacacagactataggaactggaagagacccgggaagatgagaaaatagagacacaagaaggtaaagaggcttctggaggccatctagctgattagggacggagctgtgactgggtctgccttccgtagcagctgcctgggcagccagcctgagctttcctcactcctttcttcctcttagcactttccctatgcatccctaacatttttctttcccagtttattccaaccgaaactgtatgcagagactccagtgacagtgggatccatatgggacttgctcttcacttgaggccaccttggtgtcaaaagcctttgcagtccctcttagctgcttgctgtgtgagccttagctcttgaaatcactccttattcaactttcttttcaatagacctacgagaattttctctttctgctcttctcaattttccagcctctccattccattatttttgacaaaaaaaaaagcaaagaaaagctacagagccccaacatgataccatatggagggcaaaacctctctttgttggttatttcctatcaggtaggtacagctttatacttttctacttagggagggtaaatatcactctctctctctctctttttattttatttgatactttgtatttctcatgctttgagttcatatatacttgtacatatacctttcaagaattatgttttaaacatttaaatacatgtgtgtttacagataatttctttatgcccagtagactcacctctactgttcagtctctgttctgtccttctcaccatcctctgtgtctctctcactgcaggagcttgcagtccccccaggagcagatcatcttggcgccgtccctggctaaggttgacatggagatgactcagctcacccaggagaatgcagacttcgccactcgggatcgctaccaccactcctccctcgtgaaccgggagcagctgatgcctcactactagatgcagtgctgggaccttcctcttttggagctgtcccatgtacagtggacccaagcccaggaccttcgtggagctgcttctccaacctgagaaactcaagacccatcctcccgctgtcactttggacaatggaaatctacattttcttttccccttttttttttttttgagacagagtctcgccttgtcacccaggctggagtccagtggcacaatcttggctcactgcaacctctgcttcccgagttcaagcaattctcctgcctcagcctcctgagtagctgggattataggcatgcaccaccacacccagctattttttgtatttttactggagacagggtttcaccatgttggccaggctggtctcgaactcctgacctcgtgatccacccgtctcagcctcccaaagtactgggattacaggcgtgagccaccatgcctggccagaaatctatgttttcttagaacatgtggaagaaggaaaaagacaaaaaaggaagtctggattctgaggaccacgtctcacccagggtgacatcaggaatggtgctagcctctgcaacacgacacccagtctgaagagctctatacaggtactaagactagcaggggacaccaagactctgcacaaccagattgcttgtgcagagggccacaataagtgtatgttttatattttattgtattatttattcaaaaataaataatacactcacatgtttccacacccaagagatatatagagtgaaaagtctccctccaatccttattctccacctgctcagttcctgtctaccctggcctagaggtaaccactattctcatccatacatccagcatttctttatggatatacaagcaaatgggaatgtagagtctcacattctctctttatacacaaaagttagcacgttatacacatgttctgcactttgcttttttcccttaacaatctatcttggagacatttcatatcaattcatatgccatttgttcatttttttcattgtataaatgtgttataatttatttcgccagttccacaatgatgagcatttggattctttccaatcttttgcaatgacaatcagctctgcagtgaataatcttgtacaaatgtgcaagcataaagtgtatctctaggataaattcccaaaagtggaattgcaggatcaaaaggtacatgcatttgtaaactattattgtttagtgagggtctttttaattaaagaattaacatgaattgcctaatggtgactcatattctcaaaagaatttgtggtcctcaactcctggaatgccttcgcagctgttttgcaacatgaaaggcatgaggggacaggactcttttggtttccttatgagctctgcctgacattcatcacaagcacccagtaccgggggccgtggcagtagctttccccagaaaagtttagcacttggcccagggtcagaggcttcgccatcaagccatggaggaaagtactgttggatcacttctggctccttcttctatagtggaggttctcatgaatcagtgggctaacaatcacctgggatgcttgtcaaaagtgcagatttcaggctgggcttggtggttcacgccggtaatcccagcactttgggaggctgagacgggtggatcacttgaggtcaggagttcgagacctgcctggccaacatgatgaaaccccgtctctactaaaaatacaaaaaattagctggatgtgatggcgggcacctgtaatcccagctacttgggaggttgaggcaggagaatcgcttgaatctgggaggcagaggttgcagtgagccgaggtcacaccactgcactccagcctgggcaacaagagtgaaactccgtctcaaaaaaaaaaaaagtgcagatttctgcatctcacccctaaactttttatttggcaagtctgagatggagtcctagactttacatctttaacaagtgcctcaggtgattcaatgcaggcagtccttggaccgcattttgagaaatgctgagctgttgaatggaaggggcttagtgtgggtgagggctgggaaggtcaggatgaagggtcagctagatcctaatgttctctcctggaagatgaggtttcatttattattactgttctcacaatctggctttagttaaataccagatttctgagcatcattagaaagcagagtctgagttggcagtaggcatgtaggaaggagaaatgctgaaaaaggttgtagctatgaagggctaagttgggtgaccttggaggacctttttatttatttttgagacagggtctcactctgtcatccaaaccggagtgcagtggcatgatcatagctcactgcagcctccacctcctaggttcaagtgatcctctcacttcagcttcctaagtagctgagactacaggtacacaccaccacgcctggctaatttttttggtatattacccaggcgctttttaagaagaagctgttctagtttcctgtggctactataccaaattacataaatcggatggcttaaaaacaacagaaatgtattctttcacagttctggaggccagacatctgaaatcagtaacacttaggttaattcaaggtgtcagcagggccgagctcccttcagaggctccacgagggattcattccctgcctcttccagcttctggtggcttgtgatcacatcacccaaatctttaaagccaacattttcaaatctctctgttccatctttacatcaccctctcctctgtgtatatgaagtctacctctgtctcctttctgtaaggatacatgtgattgcattcagggaccacccagataatccaggatcctctccacatctcaagagctgtactttaatcacatctgcaaacgctttgccaaaagaggaaacattcacaggttccagggaataggacgtgggtcttttggggggccctttttcagcctatcacagaacctttactgaatctgcttttttgaattctacataacaagctaaaaaagtaaccactctgtttaagccctttgggagccctcattgcctccccattgatggattaggtaaggacatgatctaaccttggccaagagcacctgagatggggtctcagggcttccagagatggttgccctttctcatggatattgttggccccacacatgatgcctgtatgagactcatcgagtttccaactcttctagcccaggagttgcctgccttacactgccctggattgtgtgacaaagagtttaagccacttcaatcctggggttcctgctcattgcatgggatggattgagaacagtatcaggcactgctcgccttaagcaccaagtgcaggagccacctgtgctcccaaggcatgtgcttcagttggtgctttgtcacagtcatttactggtgatagtttaatagagaagggaaggcttttgtggggagtcctgactttgcttcagaaaggacagcagaatggtaaggaataggtcaaaattcaggtatggtctcatttgcattgttgcccaagagcttcctggaaagagtacagagctctgtgggccaagtcttgtggcctagatatcatgactacatgttgggcctagagctcagcctgagggaccatagttgtcgtgacagcctccagtagttcctggagcagcaagaataaggtctcttgtttacagaggttgtcccacactcctcagcagtgttgagaagaggttgtctccagcacctccctaggagactggtctcaaaagtctagaaaccagtaatcagatgtcactcactgtaggatacaagtggaatgatattctactaggaaacaagcatttctaaaaaaattacaaaaatgtaaactggtaactctgataaatgcttaaaggtgacatctctgatggtgtccatcaagactaagcttgattctctccatttgaagacctctgggtcagtcctcaaatctgtgtcctgagggcttaaggtaatcacagcaatcggccctgacttttgagtggacagatccttatcttgtctgctcctttccttttgtgctgttatgactaatctttttttttttttcctttgaaacatgatcttactctgtcacccaggctggagtacagtggtgcaatcacagctcactgcagcctcaacctcctgggctccagccatcctcccacctcagcctcccaagtagctgggagtgcaccagcgtacccagctaatctttgtaatttttgtaaagatgggattttgccatgttgtcatgctggtctcgaatttctaggctcaagtagtcctcctgcctcagcctcacaaagtgctgggattacaggtatgagccaccccacccggccatgactaatcttaatatgtctatttttgctcattgtcactgagtggacctggaggctgagggctggaagagcaactggaattgctgtagtgccaaatatatcccctttcatgttgatgccaccctggccaaggtatcatttttgtgtggcagccagagaaatcttttcaaaaagaaggtggagctctagtcctgtggctgccagttgtcttcaggtcccggcctttcctgcccccaggctcatctctatccaggactgcctgggagtccagctccagtcaagttcagaggtaacaagcaacgttattgtagctttatgtaaaataaccagaaagtagaaatgacccaactctctattgacaagaatggatcaacatcctgttgcatccacgcaatggaatcctagtgagtattaaagtaatgacacaggaaaccatgtagctgaattttaaagcactgggtaagtaaaggaagccaggcacaaaagatgaaatacttgaagttttatttgtttgacctccaggaaaggcagtagcacaatgacagaaggctgggtctgggtctgggagggggtcgattgccaagggcatgacacaactttttgtggtgaggaaattcttcttcttcttctttttttttttttttgagatggagtctcgctctgtcacccaggctggagtgtagtggtgcgatctcggctcactgcgacctccgcctcacgggttcaagtgattctcctgcctcagcctcccaagtagctggcattacaggtatgtgccaccaaacccagctaatttttgtgtttttagtggagacagggtttcgccatgttggccaggctggtcttgaactcatgacctcaagtgatcctcccgcctcagccttccaaagtgctgggattacaagcatgagccattgcgcctggctggggaaattattctgtaacttgatttcggtggtggttttatgattatatccacttattaaactcattgaatcatacacttaagaaagtaaccactctgaaaaggatagtactgagtttgaaaaccagcagtttgaaaaagatggtaccaaggttaaaaaccaaatgcagtagaatatccaagtatccaggaagagcaccttcctaatgtgattgattttatggaaaagaataagagaagaatggagcatgataaagaattcaaacattattttccacattggggtcgccaaaatgaatggctcggtctagtgtaggaggcaggtgctacacaggctgactttctaatgaggtccaaaaatcttgtatttcactccagctagattgtgaaaatagtaatagtaacaccaggtcttagcctgggtttctcagaaagcggaagcttatgagctaccccttgattggagagtgcagccacagaagcaggatgagaggaaagaggggtaaagcaggggaggagggctagcaacaacttagtatcatatgcaaatgatgcttcacctcaaaggactctgctgagaaaccacaggaaccctaggggtaggaagggatcagaattcatctactggcttctgcttcccataaccaaaagttagctctgggtgggcaccagcaaccctgccattgtgacctgcacgacgtgagtgcttagcaggctgcagcaagaagacactggctgcagcccaccagaactggttgttccagtggcggctgagatggaacaagtggacttgccccagagacaggtggagcagagaggatctgaggtggcacattaagagggattataaataacgtgcatattgacagaggtcagtggtaagtacaggttgtcagacaaaacatgcatgtcactggatcattcttatctaaaggatgcccccaaaatgtcagtacagccggtatatgtgacagtgagaccagcaacattttctaagatagggagaggggcaggttcctggcctgaattttaccaagaagtccacagttgtaggtgataatgtctgaatgagtgaaggttgtatcagaccttctgggcccatgaaggtctcccttcagaccagtctatagattgatccatccaatgatccatctacctgcccacacacctacccattgacctacccagccatccatccatcaatccatccacccatccatccatggctggagcaactgttctcataactttgtagatgggtgtctgaaaccacctcatcagagtcaggtacacctcaccagtctcagagctctatcatgtaaaaatatgatcacaggccatgcaggtataagcagactccccagccaccaacctcagaccttaaggatgagtacagcccaatgccagagcattcttaaactcaggtgaggaaccagaacagcagtgattttctcagctgtctccaggagtcatgctaacaagtcctctcacctatataatagggggtatcctgcacaattataaattagtgtgggagtttgaggtccaggattccatcatccttccttctctccaggtttctgactgaggagatgggaaacaatgtgtctgttaatgtattaataccaggacgagggtgcaaagcttttgttaagagctgtagtggagaatgcagtcaaggtcagaggattgacacaagtcctctagtgtctacctttattcctcttaagtctaagaatccagagaccccatgaggatggatgagaagctggcaccaagagaaagaatgcccatctgggtggcaagggcagctggtcttgtcacccagtaacagatggacagagaccatgtggtggctacacattacctttcaactcagggccctgcctaccaatgcagggtggtccaggcactggccaatcagattgccccccaccatggggaggagcaaatacaggacgacagaggtggagcagggggcagagtgttccctcttctttgtcatggaggaagggagttggatgggagttccatcctttccatgagtagagggaagtgaggactgaagaaaggagcccagtggtggtgacagcagagacagtggcagagccagggtccatggatgggcaaaggagcccctagcccactctgacaatggtcagggagggctccctggggaggaggtaaatgacccgcactcaagcagttagctgcagagaggacggctgggcatctacacagaagggacagcgtgatcaaaggcaaggagatgagacacagtgtatggggactggccataatttaggctttcaggagcctatggcctgcagcagcctgaggcaggagaggtaggctaagtcggatcctgaaggggcttgcaggccaccctgtgtgcctagagaatgaggagggaaggccggagagtgatagcaaaaatcaatcctctaaatgttacggggttttattttttaaatgaatttgcatgatcctggatcaggaaaaatccagcctctgatctcctctttacctgacacattcgttggttcctgtttctgccctccttgatacactggagaattgggggagggccagcagggggctttccacccctgatattaggccagtgggaggagaggccgaggagccagcccagacccctggaggggcagggggcagtcacttgcagttctcagagcctccactgtatgctgagctccagtgcactgtatgcactgagggcctgtggaagtggtcttgggggagagtagagacaggaacaaattgaacagtacacccagccctgaagtgttactttcctgtggctgccacaataaatttgcacacgtttagtggcttaaagcaacatagatttgttatcttacagttctagaggtcagaaggctgaaatgggtctcactggctagaatcaaggcggcagagctgggctcctgctgcaggctctgtggggtagtctgctcctttctttttccagcttctagaagtgtctgctttccttgatcgaggctgttgcatcttcagctccagcaggcagcaagcacatctcctctggcctctgcttctgccatctcacctccttctctggctctcctgccttcctcttctgctttgaaggacccttgtgattagatcgggcctgcctggataatccagcacagtctcccctctcaagatccttaatttaatcatagctgcacagtcccttttgtcctgtaagagacatcttcacaggttttggggattaggaccagaccgtctttggaggggcatccttctgcctgccatatgtgacttgggggcatgcgggaaatggctggagcgtaaccacaaagcatacagcatgcagccaagcaacatgtgacaagatgaatccacaagcgctggggagacaaccagtgaggaagaagcccaggagacttcttggaggaagcgagtttcaaaccaggttggtgagaggacatggcaaggcttctgaaccaagagaatgagatggacaaagacacatggggcagaaggccccaggcaggagagggcaggcctacctgtaacccaggcctcttcttcctgccttttacttttaagtgaggtcacctgagaaggaggttggtgtggctgcaaattcatgggaattgggaaagaaaatctctgtttccaccttggctctgtcacttactagctctgtggcctcgggcagccttcttcatctctgagctttggtttccttctctgtaacatgggaattataatcctaccttcctccacgtggagttgtgagtactaaaaaagtgagacacatttttttggaggagataaagatggggtgttgctgggggatgtggaggagcatctcaagaatgttctcctcccacccctgctcattccatgccacttagtgtgggcaacaccacaggaaaaaaacaaaaagccatgaaaactgcagtgtgtcttggcacctgctcacctggaatttcggagcacagtggggttctgcttcaggaggtcatgctgtatcatgtaagacacagacacagcggcgcaccctcactagccagcaccaggaaacctgcaagcccaaatcagagagaggagaggctgcagagctgccactcaactgccatttcagctctgcccactgccccacccagccacccccttagcctatcaaatttatttagccacttccctatatcaatcctttgcccagcctcctccctcccttcccagagctttggaaattttttattttattttattttatttatttagagacaggagctcaccctgtcacctagactggagtgcagtggcacagtcataattcactgcagcctcaatcttccaagctcaagtgatcctcctgcctcagcctcctgagtagctgggaccacagacactcactaccatactcaggtaactttaaaaaaaaatttattcttgtagagacagggtctcactctgttgcccaggctggtctcgaactcctgggctcgagcaatccacctacctcatcctcccaaagtgttgggattacaggcgtgagtcattgcacctggctggaaatgttacttaaaacctaccttgctctccagttcttttgaaccgtggcttacctgagagtaaacaactcacgccttgctctgtcttatcccctcgaggtcctcatagacatctaagaggggaggatccgctgtggaagtgcatgggctggagatttttctacattgcttgcacttctccatcggcagggggactgtggaaatctgtgctcaccaaatactgctcagcagtcctgcatcttggagatgtacctgggctcctttggggaggctcacagcagcaacagatgccagttagtcagcttgaggcaggaaggagaggcttaagcccctgactcttgataaggcactcttcttgggaagaaggccacattcaagtagaaggcaaagcagatggtgagaaaggcccaccagcatcaggggtctccagctggctgtgcttccgggaatgcagcccgttctgcagcatcacggctggcaccagctccctgctcccaacctccaacctgccaagggtgagtgggggatgcagactcaccacctttcgttggcgtgaagggggacacagccaccttctaaaaggtgcagagtgattctctaaatgagagtctctaaaatattggaaagcctgtgttttttttctgctgtatcttgttttaaataacacacaccagtgcatgtgtacatgtgtgcactttcttgtttctgttagagaaggttggactcaccaaatgtgaagcctggcttaaaatacaggccatgtggtatacatcagattcactttggggagctctgagggcaggtggcatttcaaaggattagcagtcatgccccagcagccagcaggagggcttgacgagtgctgatctgtgcgatgtgacatataccatatgtattaagaggctgacgatggagaaaacaacactggcttcaaatatgcaccccaaactgaaagtcataaggataaatgctccaaatggcagtgtcaatttctattctacttaagctgcttctcacataggcaacttagtgtaattttgtgtgtctgtgtcagtcaggccagacttgctgctataacaaacggcccccacattgctgtgactgaacactataaatttattcctagttcatgttacagtccagtgcaagtcagaagggaatgagtttttctttacactgtcattcagggacctgggctccttcagttgcatggcttgaacaccttctatgaccccagagtcttcccctgaattctcagcaccagctggcaggtgagagaagagggacacatggaggaacccagaaaggttttaggggccaaggctgaaagggctcctgtcactttctccttcattcagttggccagaagtagacatatcatctgtcaaactgaaagcagtctgggagctacagagcagctgtgtgctcaggaagaagaggactgagtttggtgggcatctggccagttcctgccaccatgctgctggatgagaaagctggatgaagttccttattaagggcaaatgagtgagtctcctgacttgactaggtttgtgccttcagagctctgtctcctgtggtgaatcacacactccagccaacaattctgccattcttcaaatcatgcttgggattccatttttggtactctcttcagagcctttgaatattctaatgaatggtaaatttttatcctttgagagttcttttgattcctagaagcaccagaaatcatttggaaccaagcctgggaataaggggactgatcaagctaaatcaccttttttgggtcaaaaatgagatgtgaccataaagtaaaccaactcttgaggcaaattccaaagatgagatacccacacagcacattttgaggattgactgtgtcactggaataattctgtgaggcttcccaaggggctgatttggaaggaacaacattcatttacatgcagtcatgtgccgcatgatgacatttgggtcaatgacagaacacatatatgacaggggtcccataagattatataagaaaattcctatcacctagtgatgttatagccattgtaatgtcataacacaacacattactcgtgcttgtggtgatgctggtgtaaacaaacccacttcactgccagttgtataaaagtatagcacatattaatacaattatatacagtacataatacttgataataaacaaccatgttactggtttatatatttagtatactatactttttattgttatcttattttttgtttttcttttcatttttgagatggagtcttgctctatcacccaggatggagtgcagtggcatgatcttggctcgctacaacctccgcctcctgggttcaagtgatcctcccacctcagcttcccaagtagctgggattacaggcgtgtacaaccacacccagctaattttgttttgtgtttttaatagagacagggtttcaccatgttggccaggctggtctcgaactcctgacctcaagtaatccacctgccttggcttcccaaagtgctgggattacaggtgtgagccaccacactcagcctttttattgttattttagagtgtacacctgctactaattaaaaaagagaagtggtgtagaaaaaagaaaaattaaataaatctgctaaaatctctttttaaaatttaaagtaaacctaatctggtatttccagattaaaaaaaaaagagttaagtgtaaaacagcctcaggcaggtccttcaggaggtattctagaagaaggcattgttattacaggagatggcagctccatgtgtattattgcccctgaagacccgccactggggcaagatgtggagatggaagacagtgatagtgatgatcctgaccctgtgtagatctaatgtgtgtgtttgtatctttgtttttaacaaaaaagcttaaaaagtaaaaacaagtaaaaaaatttaaaagtagaaaaaaattagaaaattagaaaaaaagtagaaaagtagaaaaaagcagaaattatagaataaggaagtaaaggatataaagaaagaacatctttttgtatagctatacaatgtgtttgtgttttagctaaatgttaatacaaaagagacaaaaagttaaaaaaattaaaggtttataaagtaaaaatgttacattaaggttaatttgttattgaagaaagaaaaatatcttttataaatttagcgtagccgaaacacagcgtctacataaagtctacagagtcaggcacaggaatgtcccaggccttcccattcacctacctctcactcactgactcacccagagcaacttccagtcctacaagatccatttacggtaagcgccctgtacaggtgtacctttttaaatcttttatacattatttttactgcagcttttccatgtttagataaacaaataccattgtgttacagtagtctacattattcagtgcagtaacatgctgtacaggtttgtcacataggaactgtagcctatgtcatacagccttggtgcgtagtaggcagtaccttctgagtttgtgtgagtatactctatgatgttcaaaccacaacacaattgcctaaggatacatttctcagaaagtatccttgtcattgaatgacacatgactgtatatacattttgataaattgtgtgtgtgtgtgtgtgtgtgtgtgtgtgtgtagtggattactttgtagtttaggttcatacgctgtcatttattcatgatctatgttggtctttttgcccaatcaactgaatctacaggagtagaggtgtatcttctgtaagcaatcatctcaatttatggttttaagtattcttgacatgccgtcagcctgtataacccatcatggatttgttccgtcactcactaagtatgtattgaatgtctatgtgtgcaaagctattttgcttgattcagacaaactgtgatactagatgacagcaactgcttccctagcagcctgaagctcagtttgtaggtgctagcaacagagtgttctaggatgaagaagcaagaatcgggcacagacctcttggatggccagtatgagaggaaactggtcttggaataggctgcacttgatggttcaactgaagtgtcctgagaagagtgattacccataaaattttctcattggctgaagaacactggatcagcttttccctggactggtgctttgcttttctgaataaacccagtgtcttggaacatcctcacatgtgtttcagaattacttatgtcaccccaagaaatacaacctcagattatctttttctcatgagcaatgaggaggaagcataagagataagggtggaccctgccgtatagtcacagtccaggaaggaagttggggacctccttgtaccatcatatgactgcattcaaagatgaggaagtaaagccttatgtctgaaagtgtagtcctcagctcactgataaaataaaaaatcatctgggatgcttgctaatatgcagatttggggcccttccatttaagcaatccctctccaggtgatttgttaaggcttgagaagcacaggtggaagggctttgggctgccctgagtctgtgactagctgtctccatcagctccaggctctgcagcgagcagcaggagtcccagaccagagcttcagttgctagtgccggtgagacacactggtccacactggggtccaataaaccacactgcaacgaggcctgtccctgtgggtcacgttgatgagctggagacaaagcacttcagaaccttgttttaccaagcatggtggagacgggctgcatcatcttggtgtgcatgtgtgcatgaagtttgtgtttgcacctgtggggtctatttctctgtagatctggggatatacattttgttctctctgccactgactggtagggcctcttcctttacctcccaccccagtgcccaactcctcccttctttccagtctcacctctctgcctgctagggctccaagccctgcctagacaacagtccagagaagagctgatccatgatcagggaccccaggcagggcttggagccctaggaacagctagggtcttgcaattcatagtcaatccttaaaattaagtaagaaaatctttattgaccttatgctagccacctacattcattatctcatttgattctcagaacaatgcaatgatgtaggtactctttttccccattttatagaagaggaaaactgaggctcaggataagtaaataagtaatttactgaaagtcccatagctaggaagtgacagagtcagatttgaactcagatcattcactggtcactgttcatgggacccatggaagccagcacagtccttgtcttctctaagtccccaagtgctcctccccatcctgcccttcacccctcttgccccactgtctagaacaggtgtttgcaaactacagccccatgggccaaatcaaacccatggcctgcttttgttttaattgaggtgaaactcacataacataaaattaacgattgtaatcactgcctgtttttgaaacgaaagctttattggaacacagcacacccactcacgcattgtcggtggctgcttttacactgcagcagcagagttctacagctgttgtgacaggcaccatagggcccacaaagcctaaactatttactatctggccctttacagaaaatgtttcctgagccctgctttagatgattttgatctattctctttagacaggacctgggccctggggaacattttctcagacatctctacctctattaagaaatgcctgccctagtcaggcgtggtggctcacacctgtaatcacagcactttgggaggccgaagcaggcggatcacttgaggccaggagttcgagaccagcctggccaacatgtcaaaaccccatctctattaaaaatccaaaaattagccagacttggtggtgcgttggtaatcccagctacttgggtggctgaggcacgagaattgctggagcccagaaggcggaggttgcagtgagccagatcacactgctgcactccagcctgggcaacagagtgaggccccgtctccaaaaaaaaaaaaaaaaaaaaaggccttgcctgtcctttttaaaggcaaacttttccccttttgtggggaccccaggctcttgggccttacggaccatttcctaagggattcctgtttccccttcttttttcgggtttttacccacacaggggccagacctggaaaaacccctgggacctgatttgccaggggcacccccttttttttttttttcctggggggggccgggggcatatgg

SEQ ID NO: 23688 - DNA, 3833 bp, Homo Sapiens
ttcggcgccctgctcttcctcatgttggcatccccggccacggagaccaccgtcctcatgtcccagactgaggccgacctggccctgcggcccccgcctcctcttggcaccgcggggcagccccgcctcgggccccctcctcgccgagcgcgccgcttctccgggaaggctgagccccggccgcgctcttctcgtctcagccgccgtagctcagtcgacttggggctgctgagctcttggtccctgccagcctcacccgctccggacccccccgatcctccggactccgctggtcctggccccgcgaggagcccaccgcctagctccaaagaaccccccgagggcacgtggaccgagggagcccctgtgaaggctgcggaagactccgcgcgtcccgagctcccggactctgcagtgggcccggggtccagggagccgctaagggtccctgaagctgtggccctagagcggcggcgggagcaggaagaaaaggaggacatggagacccaggctgtggcaacgtcccccgatggccgatacctcaagtttgacatcgagattggacgtggctccttcaagacggtgtatcgagggctagacaccgacaccacagtggaggtggcctggtgtgagctgcagactcggaaactgtctagagctgagcggcagcgcttctcagaggaggtggagatgctcaaggggctgcagcaccccaacatcgtccgcttctatgattcgtggaagtcggtgctgaggggccaggtttgcatcgtgctggtcaccgaactcatgacctcgggcacgctcaagacgtacctgaggcggttccgggagatgaagccgcgggtccttcagcgctggagccgccaaatcctgcggggacttcatttcctacactcccgggttcctcccatcctgcaccgggatctcaagtgcgacaatgtctttatcacgggacctactggctctgtcaaaatcggggacctgggcctggccacgctcaagcgcgcctcctttgccaagagtgtcatcgggaccccggaattcatggcccccgagatgtacgaggaaaagtacgatgaggccgtggacgtgtacgcgttcggcatgtgcatgctggagatggccacctctgagtacccgtactccgagtgccagaatgccgcgcaaatctaccgcaaggtcacttcgggcagaaagccgaacagcttccacaaggtgaagatacccgaggtgaaggagatcattgaaggctgcatccgcacggataagaacgagaggttcaccatccaggacctcctggcccacgccttcttccgcgaggagcgcggtgtgcacgtggaactagcggaggaggacgacggcgagaagccgggcctcaagctctggctgcgcatggaggacgcgcggcgcggggggcgcccacgggacaaccaggccatcgagttcctgttccagctgggccgggacgcggccgaggaggtggcacaggagatggtggctctgggcttggtctgtgaagccgattaccagccagtggcccgtgcagtacgtgaacgggttgctgccatccagcgaaagcgtgagaagctgcgtaaagcaagggaattggaggcactcccaccagagccaggacctccaccagcaactgtgcccatggcccccggtccccccagtgtcttcccccctgagcctgaggagccagaggcagaccagcaccagcccttccttttccgccacgccagctactcatctaccacttcggattgcgagactgatggctacctcagctcctccggcttcctggatgcctcagaccctgcccttcagccccctgggggggtgccatccagcctggctgagtcccatctctgcctgccctcggcttttgccctatccattccacgttctggccctggaagtgacttttcccccggggacagctatgcctcagatgcagcttcaggccttagcgatgtgggagaagggatgggacaaatgaggagacccccagggaggaatctccggcgcagaccccgatcccggctgcgggtcactagtgtctcagaccagaatgacagagtggttgagtgccagctacagacccataacagcaagatggtgaccttccgatttgatctggatggggacagcccggaagagattgcagctgccatggtatataacgagttcattctgccttcggagcgagatggatttctcagacggattcgggagattatccagcgagtggagaccctgttgaagagagacactggccccatggaggctgctgaagacaccctaagcccccaggaggagccagcaccattacctgccctgcccgtccccctcccagacccatccaatgaagagctccagagcagcacctccctggagcacaggagctggacagccttctccacctcctcatcttctcctggaactcctttgtctcctggaaacccattttcccctggaacccccatttccccaggtcccatcttccccatcacttctcccccatgtcatcccagcccctccccattctcccccatttcttcccaggtctcctcaaatccctctccacaccccaccagctctccacttccattctcctccagcacacccgagtttccggtcccactctctcagtgtccctggagttctctccccacgacttctccacctacgttctctcccacttgttctcaggtcactcttagttcccctttctttcctccgtgcccctccacttcttccttcccctccaccacagcagcccctctcctttctctggctagtgccttctcactggctgtgatgactgtggcccagtccctgctgtccccctcacctgggctcctttcccagtctcctccagcccctcctagtcccctccctagcctgccccttccccctcccgttgctcctggtggccaggaaagcccttcaccccacacagctgaggtggagagtgaggcctcaccacctcctgctcggcccctcccaggggaagccaggctggcgcccatctctgaagagggaaagccgcagcttgttgggcgtttccaagtgacttcatccaaggaaccggctgagcctcttcccttgcagccaacatcccccactctctctggttctccaaaaccttcaacccctcagctcacttcagagagctcagatacagaggacagtgctggaggcgggccagagaccagggaagctctggctgagagcgaccgtgcagctgagggtctgggggctggagttgaggaggaaggagatgatgggaaggaaccccaagttgggggcagcccccaacccctgagccatcccagcccagtgtggatgaactactcctacagcagcctgtgtttgagcagcgaggagtcagaaagcagtggggaagatgaggagttctgggctgagctgcagagtcttcggcagaagcacttgtcagaggtggaaacactacagacactacagaaaaaagaaattgaagatttgtacagccggctggggaagcagcccccaccgggtattgtggccccagctgctatgctgtccagccgccagcgccgcctctccaagggcagcttccccacctcccgccgcaacagcctacagcgctctgagcccccaggccctggcatcatgcgaaggaactctctgagtggcagcagcaccggctcccaggagcagcgggcaagcaagggggtgacattcgccggggatgttggcaggatgtgaattcagaacagaagccatgtatctcccccacaccagggcccaccatggagcttgtgttctcagaatctgatgctttctga

SEQ ID NO: 23689 - DNA, 2905 bp, Homo Sapiens
agaaattagtaatgtttataaatttgtttatagtagtttgtaaattattatcagaaatagtaatgtctataaaccacttactttaagagacaatcaggaactatgatgagggcaataataaaaggagaaatcttacaaaaaattaacctggatgttgtgcttgctctaaggttaagtcacttagggaaacagattcagtattatccaatggcttaaccatccttccttctttctgtttgctttttggtggtggctgggttacaaagagcagtgtcttctgccctgaaggtagcagtattacggtgggtgcctagaggtcaattattggtttagaagagattcaggcccttaacttttacatgtgctttccaggaaaggagacactttctttctcagccctgtgtgaggactatgttagcccagaaagtgttcttggaccactgggtgcccattctcagtgctaggaacaggaagaccctggtttcctggtagaatttatggatcctacagctttctctccatcaaactttaagtcacagtaagataggactctggagtcacaggcacagccaggagaggtcagcgtccttatgctgactcctggtcctagacatgggtcttaagatccagtagtcagtaggtctgttgcaaagtcagggactggctagatctctccacagcagaagaaagctcatacatgctgacctgaggaacttaatctgacagtttaccgacacactcataacgcatctcttccttcctgtgatgagagtactgctttcatgtgtactgtctgatgacgggtgagggcagagttcttagtgaagcctctctcacagtgagaacacctgtaaggcttttcaccagtgtgggtttttcggtgggcactgaagtgggagctattgttgaagattttcccacacactgcacacttgtatgggctctccccagtgtggatgcgccggtgagcactgaactgggaactgttgttgaatctctttccacagacaatgcactggtaaggcttttccccggtatgggtcctctggtggacaatgaggctggaactctggttgaagcttttcccacattgcccacactgatagggcctctcccctgtgtgagttcgtaggtgggcagtgaggttggagcgctcactaaagcccttcccgcactcactgcacttgtgaggcttctcgcctgtgtggattctttgatgccgaacaagataagaacttcggctaaaggttttcccacattcaggacattgagatactttttccagtttgagcgctggcttgtggggagagtgcacactctgagagcagtttttcccacagaggatatgtgtacaggctttgtccctggcacaaaaactctggtgactcatcttctcctgggatggggttttctcctcactctcccctggagaatttctacattgccttcttgatgttggctcactctccaagcctttttgtagctcagagtgccaataaactcctctggactttctctgtaaagccttgtttatttctacttcctctgaatcatcccattttagattttcttttttaatctcgttcttgaactcaaaaccaagtctgtttgggaacagcactggcaggtctagtttcctgacttcctggccaggattcctgaagtccttttcatccctgtctgcaccatccacagtgccatcttctacctccgtgggttccccattctggtgattcagctctccagcctcaatatcacttccttcttggccaggaacagcatcgcttgccataggaggtgcagaggcccaggagcctgaaagagcattcatttcctcataaaagatacaaggctcaggcacacggcctctcctcactttgcggtaactcaactgtaggcttttgaacttggtgcgacactgttctggggtccgcagaaaaccctgctcccagagtccttccgccatggccctgtagatctggctgttctgctgacaggtctggagttttccataaaattgagaactactaagaatagccaggagcgtcttggtctcttcatagccccagggcacacctgttgccagcgagacgtgactgtccttcctctgggtggcacccctgtagagggccctttgtgcagggcctgggcacatccattcttgctgacagagggatacagctctgttgtcacgcatggctggtccctgtaacaacactggagctgctgctaccgataaaatagcaccactctagcctgggacccagctgtccagaccacagcacctgtctcctggtcgtggagacctgtgttttgaggcaggttcctgggagcctgaggagcaagccaggctgttgtccaggagctctctgtacatcctcaaccagagccacagcttcctcgccgttttctggatgctgctccctcacccaggtctggatctcctctggcaagatagtcagaaactgctccaaaaccagcagctccaggatttcctcttttgagtgggtcttcggcctcagccactgacaacagagttcccagagtttgctaaaagcttcatgtgggccagttacctcctggtagcaaaactgcctgaagcgctgacgggaggcctcggagtcagggctgttaccctggagggctgatttctggccctgtgtgggatccttgtttgaggatgggtgtgcctcggtactcttcactgcagccatcatttgcttcaacgaactggcttactctggttgccacttctaccctggagatcagagtccatctttcccacatcactgggaagccatgttctcctgcaaggaatgtctttctgtaatccgtgggacatgagagtgtcagacatgtgtagagactcacagcggaaaaaaagggctcaactttgaaggatgtc

SEQ ID NO: 23690 - DNA, 6394 bp, Homo Sapiens
ggacccactgggttgccaagctcgcgccggatgcggagcgcggtgctgccggtggagcttcaggtcttgatagactttctgtaaagaaggaatgatttggtgatggagtgttcccactgaccgatggactcaaagaagagaagctcaacagaggcagaaggatccaaggaaagaggcctggtccatatctggcaggcaggatcctttcccataacaccagagagattgccaggctggggaggaaagactgttttgcaggcagccctcggagtgaaacatggagttcttctgactgaagatggtgaggtctacagctttgggactcttctctggagaagtggaccagtggagatttgtccaagtagccccattctagaaaatgccctggttgggcaatatgttattactgtggcaacaggaagcttccatagtggagcagtgacagacaatggtgtcgcgtacatgtggggagagaattctgctggccagtgtgcagtagccaaccagcagtatgtgccggaaccaaatcctgtcagcattgctgattctgaggccagccctttgttagcagtcaggattttacagttggcgtgtggcgaggagcacactctggcattgtcaataagcagagagatttgggcatggggtaccggttgtcagttgggtctcattaccactgccttcccagtgacaaagccgcaaaaggtagaacatcttgctgggcgagtggtgcttcaagttgcctgtggtgctttccacagcttagcccttgtacaatgcctcccttcccaggatctgaagccagtcccagaacgatgcaaccagtgcagccagctcttgattactatgactgacaaagaagaccatgtgattatatcagacagtcattgttgcccattaggtgtgacactgacagaatctcaggcagaaaaccatgccagcactgctctcagcccctccactgaaacccttgacaggcaggaagaagtatttgagaacactcttgtagcaaatgatcagtctgttgctactgaactgaatgcagtaagtgctcagatcacaagcagcgatgccatgtcctctcaacaaaatgtcatgggaacaactgaaatttcctctgccagaaacataccatcataccctgacacccaagcagtcaatgaatacctacggaaactgtcagatcattcagtaagagaggactcagagcatggtgaaaagccagtgccatctcagcctcttttagaagaagcaattcctaatctccacagcccgcctaccacaagcacctcagccctaaacagcctggtggtctcttgtgcatctgctgttggtgtgagagtggctgctacttatgaagctggtgccttgtcactgaagaaagttatgaacttttatagtacaaccccttgtgaaactggagctcaggcaggcagtagtgccattggccccgaaggtttgaaagatagcagggaagaacaggttaaacaggaatcaatgcaaggaaagaaaagttcaagtcttgtggatatcagagaagaagaaacagagggaggcagtcgaagactctccctccctggattgttgtcacaagtttcccccaggctcttaagaaaggctgcacgggtgaaaacgaggacagtggttctgacccccacatacagtggagaagcagatgcgctcctgccttctctgagaacagaagtgtggacctgggggaaagggaaggaagggcagctggggcacggcgatgttctgcctaggcttcaaccgttgtgtgtaaaatgtctggatggcaaagaagtaatccatctggaggcaggtggttaccattctcttgcacttactgcgaaatcccaggtttactcatggggtagcaatacctttggtcaacttgggcattccgattttccaacaacagttcctcgtcttgcaaagataagcagtgaaaatggagtctggagcatagctgcaggcagggattattccctgtttttagtggatacagaagacttccagcctgggttatattacagtggccgacaggaccctacagaaggtgacaaccttccagagaatcacagtggttctaagactccagtacttctctcctgtagtaagcttggatatataagcagagtgacagcaggaaaagatagctatttagccttggtggataaaaacattatggggtatattgccagtctccacgagttagctactacagaaagacgattctattcaaaactaagtgatatcaaatctcagattctcaggcctcttctcagtttagaaaatttgggcactacaactacagtccagctgttgcaggaggtggctagccgattcagcaagctgtgttacctcattggtcagcatggagcctcattgagcagcttccttcatggggtaaaggaagccaggagtttggtcatcctgaagcattcaagtctcttcttggatagttatacagagtattgcacatctattacaaatttcctggttatgggaggattccagcttcttgctaagcctgccattgatttcctaaataaaaaccaagagctgttgcaagatttgtcagaagtgaatgacgaaaacactcagttgatggaaatactgaatactttgtttttcttgccaatcagacgacttcataattacgcaaaagttttgctaaagcttgctacttgttttgaagtggcatctccagaatatcagaaactgcaggattccagttcttgttatgagtgtcttgctctccatctcggcaggaaaaggaaggaagcagaatacacactgggcttctggaagaccttccccggaaaaatgacggattccttgaggaagccagagcgtcgactgctgtgtgagagtagtaaccgagccctgtctctgcagcatgctgggaggttttccgtgaattggttcattctctttaatgatgccctggtccatgcccagttctccacgcaccatgttttccctctggccacgctgtgggcagagccactgtctgaagaagctggtggtgtgaatggcttaaagataactacacctgaggagcagttcactctcatttcatctacaccccaggaaaagacaaagtggctacgagctataagccaagccgtagatcaggctttgagagggatgtctgatctccccccttatggaagtggtagcagtgttcagagacaggaaccacccatttcacgcagtgccaaatatactttctacaaggatcctcgcctaaaggatgccacctatgatggacgctggctttcagggaagcctcatggcagaggggttttgaagtggcctgatggaaagatgtattctggcatgttcaggaatggcttggaagatgggtatggagaatacagaatcccaaacaaggcaatgaacaaagaagaccattatgtgggccattggaaagaaggaaaaatgtgcggtcaaggagtctacagctatgcttctggtgaagtatttgagggctgttttcaagataatatgcgtcatggtcatggtcttctacgaagtgggaaattgacgtcctcttctcctagtatgttcattggccagtgggtaatggataagaaagcaggatatggtgtctttgatgatatcactaggggggaaaagtatatgggaatgtggcaagatgatgtgtgtcaagggaatggtgtggtggttacccagtttggattatactacgagggcaactttcaccttaataaaatgatgggaaatggggttttgctttccgaagatgatactatctatgaaggagaattttcagatgactggactcttagtggaaagggaacactgactatgccaaatggagactacattgaaggttattttagtggagaatggggatctgggataaaaatcactggaacctacttcaaacctagtctatatgagagtgataaagacagacctaaagttttcaggaagctaggaaacctggcagtgccagctgatgagaagtggaaagcggtgtttgacgaatgttggcgccaactgggctgtgagggcccaggccaaggggaagtttggaaagcatgggacaatattgctgtggccttgaccaccagtcggcgccagcacagagacagtccagaaatactgagtcgttcacagactcagacactagagagtttggaattcattccacagcatgttggtgccttctctgtggagaaatatgatgacatcaggaaatatttaataaaggcctgtgacactcctctgcaccccctgggcaggcttgtggagacactggttgcagtgtatagaatgacatacgtgggcgtaggagccaaccgcaggttattgcaggaggctgtaaaggagattaagtcctatcttaagcgaattttccagctggtgaggttcttatttcctgagctgcctgaagaaggcagcacaattcctctctctgctcctctgccaaccgaaaggaagtctttttgcactgggaagtcagattcccgatctgaatcaccagagccaggttatgtagtaacgagttctggattattgcttcctgtgctgctacctcggctctacccaccgctgtttatgctttatgctttggataatgatcgcgaggaagacatttactgggaatgtgtccttcgactaaataagcagccagatattgctctcctgggctttcttggggtgcagaggaaattttggccagcaaccttgtcaatccttggagagagtaaaaaggttttgccaaccacgaaagatgcttgttttgcctcagcagtagaatgtctgcagcagatcagcacaacatttaccccatcagacaaacttaaggtcatccagcagacttttgaggagatctctcagagtgtcctggcgtcactccacgaagacttcttgtggtccatggatgacttgtttcctgttttcttatatgtggtgctacgggccaggattaggaatttaggctctgaggtacacctcattgaggatctaatggacccctatcttcagcatggggaacagggtataatgttcaccaccttgaaggcatgttactaccagattcagcgtgagaagcttaactaggctgcataacagcttgaaaactggattatctactacagagtgttataacaccatctggagtcttcctgtagtggcaaaaaagaacagtgttgaaattggaaaggactttgtgttatttaggttgttagaatgagccttaccaataataagagccctgagcccagaaaaaaggactgtatagtttaaagggaggattgaaagggaggtaaaaaatcagattagaccagttcttggcctatgataagttccaaaaataccatttatctactatttgaaaaaagaagaggatatcccttcctacagtaaagggtatgtcagctacatgaagttgtaagaaaagcttccagtagagcttcttatattaaagaagttgatggatatttttgaatttctggtttgcctgaatccacctgcagttaccccgatccgtttgcaagaaccagatcgtacttgaaactatagtggccacactctgccttcctgagtcccttccagtcatgtgtgcatcatgtctctttgccaagggaggggagaaaggaacttttaaactgcagttttaactttttctaagctgtttcttgatgggagaggttctgtgcaaaactaccacattctgtccccaaaatgtggaatgcatccaaataggagtcttctgcctcttaacttaaaagaacataggaattttgtttttggtttctttatcatgctacagagagtgaatacactggaattcagacaccgactctgagctgctaggaacctcatttgtccatgtgcaaacgctgtattccaaggcctgtgaatggcagcctgaggaagttttgcatgcaggctgtgttttcgagcaggactaacaactgggaaataagcaaaaaactgcatcgatccccagcctggtgttgttcttccctatacttcacactgaactcaggatgggaagaaaaaggaaacaagctttggctttttccatctcaaaagtattgtggcacctcaacatttcagtgttttgctttttaaaaaatgccctattgtaagttgttggtttatactgtataagtaacactagtagctgttttgaataacataggtgctcttcctcatctcatctcctacaccgtggtgagcatacagagtgtcctgatttgtgttaagtgactgagaagatgttaattacttttgaaaaaggatcatggtttttgctctactttataatcaagacaagtgtttattaaaatactgttttggaatgttggctgtaatgtaacagcaattttcataataaaaggcattcatcttt

SEQ ID NO: 23691 - DNA, 1358 bp, Homo Sapiens
caagccctggctccagctctagcgggtatctgcccaccatggccctggtgctgatcctccagctgctgaccctcttccccccagcttcataccaccctaagccatggctgggagctcagccggctacagttgtgacccctggggtcaacgtgaccttgagatgccgggcaccccaacccgcttggagatttggacttttcaagcctggagagatcgctccccttctcttccgggatgtgtcctccgagctggcagaattctttctggaggaggtgactccagcccaagggggaatttaccgctgctgctaccgaaggccagactgggggccgggtgtctggtcccagcccagcgatgtcctggagctgctggtgacagaggagctgccgcggccgtcgctggtggcgctgcccgggccggtggtgggtcctggcgccaacgtgagcctgcgctgcgcgggccgcctgcggaacatgagcttcgtgctgtaccgcgagggcgtggcggccccgctgcagtaccgccactccgcgcagccctgggccgacttcacgctgctgggcgcccgcgcccccggcacctacagctgctactatcacacgccctccgcgccctacgtgctgtcgcagcgcagcgaggtgctggtcatcagctgggaagactctggctcctccgactacacccgggggaacctagtccgcctggggctggccgggctggtcctcatctccctgggcgcgctggtcacttttgactggcgcagtcagaaccgcgctcctgctggtatccgcccctgagccccaggagcactgcagcccgagacttccaacctgagtggcggagaagctgggaccctgggctggactgtcctttcctgcagccccacagtcctgctggctgagctccgcggaacggtccttagaccccgctgtgccctgtgctgtagcttctttccaggcctttcccaaggagtagctgaaaggaagacgcgattagtggttaagacttccaagccagaagacagagggttcgaatcccagcactgccgtctactcactgtagtagtagcagctacagaaaggtagtagtgagacgtgaagccagctggacttcctgggttgaatggggacctggagaacttttctgtcttacaagaggattgtaaaatggaccaatcagcactctgtaagatggaccaatcagcgctctgtaaaatggaccaatcagcaggacatgggcggggacaataagggaataaaagctggcgagcgcggcaccccaccagagtctgcttccacgctgtgggagctttgttctcttgctctacacaataaatcttgctgctgctaaaaaaaaaa

SEQ ID NO: 23692 - DNA, 5479 bp, Homo Sapiens
ctagatcgaaagtcctttggtaatgatgtgtcatacattctagtcatcaaagacaccattttctgggcctgaagtgttctgctggtttttggaggaatgagaatccaatctctcataagccggattcagaaaataggtcatcgatgaaacatctgtatggattatttcactataatcctatgatgcttggacttgaatcacttccagatcccacagacacctgggaaattatagagaccattggtaaaggcacctatggcaaagtctacaaggtaactaacaagagagatgggagcctggctgcagtgaaaattctggatccagtcagtgatatggatgaagaaattgaggcagaatacaacattttgcagttccttcctaatcatcccaatgttgtaaagttttatgggatgttttacaaagcggatcactgtgtagggggacagctgtggctggtcctggagctgtgtaatgggggctcagtcactgagcttgtcaaaggtctactcagatgtggccagcggttggatgaagcaatgatctcatacatcttgtacggggccctcttgggccttcagcatttgcacaacaaccgaatcatccaccgtgatgtgaaggggaataacattcttctgacaacagaaggaggagttaagctcgttgactttggtgtttcagctcaactcaccagtacacgtctgcggagaaacacatctgttggcaccccattctggatggcccctgaggtcattgcctgtgagcagcagtatgactcttcctatgacgctcgctgtgacgtctggtccttggggatcacagctattgaactgggggatggagaccctcccctctttgacatgcatcctgtgaaaacactctttaagattccaagaaatcctccacctactttacttcatccagaaaaatggtgtgaagaattcaaccactttatttcacagtgtcttattaaggattttgaaaggcgaccttccgtcacacatctccttgaccacccatttattaaaggagtacatggaaaagttctgtttctgcaaaaacagctggccaaggttctccaagaccagaagcatcaaaatcctgttgctaaaaccaggcatgagaggatgcataccagaagaccttatcatgtggaagatgctgaaaaatactgccttgaggatgatttggtcaacctagaggttctggatgaggatacaattatccatcagttgcagaaacgttatgcagacttgctaatttacacatatgttggagacatcttaattgccttaaaccccttccagaatctaagcatatactctccacagttttccagactttatcatggggtgaaacgcgcctccaatcccccccacatatttgcatcagcagatgctgcttaccagtgcatggttactctcagcaaagaccagtgcattgtcatcagcggagagagtggctctgggaagacagaaagcgcccacctgattgttcaacatttgactttcttgggaaaggccaataatcagaccttgagagagaaaattctacaagtcaactccctggtggaagcctttgggaactcatgcactgccatcaatgacaactcgagccgttttggaaaatatctggaaatgatgtttacaccaactggagttgtgatgggggcaagaatctctgaatatctcctggaaaaatccagagttataaaacaggcagcgagagagaaaaattttcatatattttactatatttatgctggtcttcatcaccaaaagaagctttctgatttcagacttcctgaggaaaaacctcctaggtacatagctgatgaaactggaagggtgatgcacgacataacttccaaggagtcttacagaagacaattcgaagcaattcagcattgcttcaggattatagggttcacggacaaagaggtgcactcagtgtacagaattttggctgggattttgaatattgggaacattgagttcgcagctatttcctctcaacatcagactgataaaagtgaggtgcccaatgctgaagctttgcaaaatgctgcctctgttctgtgcattagccctgaagagctccaggaggccctcacctcccactgtgtggtcacccggggcgagaccatcatccgtgccaacactgtagacagggctgcggacgttcgagacgccatgtccaaagccctgtatgggaggctcttcagctggattgtgaatcgcattaatacactcctgcagccagacgaaaacatatgtagtgcaggaggtggaatgaatgtggggatcttggatatctttggattcgagaattttcagagaaattcatttgagcagctctgcataaacatcgccaatgagcaaatccagtactatttcaatcagcatgtttttgctcttgagcagatggaatatcagaatgaaggcattgatgctgtacccgtggaatatgaggacaaccgcccgctcttggacatgttcctccagaaacccctgggactgcttgcacttttggatgaggaaagtcggtttccccaagcaactgaccagaccctggttgataaatttgaagataatctacgatgcaaatacttctggaggcccaaaggagtggaactgtgctttggcattcagcattatgctggaaaggtattatatgatgcttctggggttcttgagaaaaatagagacactctccctgccgatgtggttgtggtcctgagaacgtcagaaaacatgcttcttcagcagctcttctcaatccctctgaccaaaacaggtaatttggcccagacaagagctaggataacagtggcctcaagttctttgcctccacatttcagtgctgggaaagccaaggtggacactctggaggtgatacggcatccggaagaaaccaccaacatgaagaggcaaactgtggcttcttacttccggtattctctgatggacctgctctccaaaatggtggttggacagccccactttgtgcgctgcattaaacccaatgatgaccgagaggccctgcagttctctcgagagagggtgctggcccagctccgctccacagggattctggagacagtcagcatccgccgccagggctattcccaccgcatcctttttgaagaatttgtgaaaaggtattattacttggcattcacagcacatcaaacacctcttgctagcaaagagagctgtgtggctatcttggaaaagtccagattagatcactgggtgctgggaaaaacaaaggtttttctcaaatattaccatgttgagcaattaaatttgctgcttcgagaagtcataggcagagtggttgtgctgcaggcatataccaaggggtggcttggagccaggagatacaaaaaggtcagagagaagagagagaagggagccattgccatccagtcaggggacacttcaaaccaaagcagtgggccacattcccccgtcgcagcaggtacgaggggaagtgccgaggttcaagactgcagcgagcctggtgaccataaagttctcaggggctctgtacatcgtaggagccattcacaagcagaatccaacaatggccgtacacagacttcaagcaactctcctgctgtcacagagaaaaatgggcattcacaagcccagagttctccaaaagggtgcgatatcttcgcaggacatgcaaacaagcactcggtttctgggactgatttgctgtcttctcggatatgccatcctgctccagatcagcaaggattgagtctctggggagcccctcaaaagcctgcctttccacattacggatgtaacttttatgggttcagaaaatggtcttgcacagaagcatcgaacacctcgccgacgatgtcagcagcccaaaatgctgagtagccctgaggacaccatgtactataaccagttaaatggaactctagaatatcaagggagcaagaggaagccaagaaaacttggccaaatcaaagtacttgatggggaagatgaatattacaaatctctgtcaccagtggactgtatccctgaggagaacaactcagcccacccttcctttttttcttcatcctcaaaaggagactcttttgctcaacattaaattgtgcttcctaaccctaaatctgtccagagtaggaacattcatggtaatcgactgtctgtcattgcgtaagaaagcactgatatggggtcagcttctttggacatatggtccatgcctgaaccttactgaaccacttgcagattccaaaacatcttatcctatcctctaccactctcccacatgtgttgtgcagcctgagctgggcgctgccttcctttctcatcccatggggccctgtgggacactgagaacacctttacaatagtttaaacagtcattcatgcccccagtgtctaggaagataacagccagtctcaccccagtctaatcatggaccctgataatattgcttgatttttcctatcaagttacttttcaatccattcagaatctgccccagtggagacccaggagttcctttcctgcactcttctccatcctcccacctttgctgggcttttctatcactcccacctcccccagagtcagggctccattgctgagtgccccatcctggaggattggccccaagatctcctagaacaggataattgcctgtgtttaggcagataggcctaaatctttcagattctttctacaaggcaaataacccctctcttgttaattatgatgctgagaaagcctctgtctctttatttcaccttgccaagacacccacactactttggtgatgaaaagaaaggaatgagagggaaagtttggacctgtcactttggtgacagggaaagtccaggtcactttattctgtaactctccattcactggtcaaataactccatgaggctatcagtggctacagtggaaggacctgatcttgtccatctttgtgtgcacagagcctagcacagggcttggtagagggtatatctagtgaatggagaatacatggagaaacttaactaagttacacaagcatatctgacaggaatgttaccttcaattgtatgttacatatgattagtcacttttcatacactataacctctgatttttcactcaagtttgggctgattatattgtaatgatgttagataatactcaacatgattcagtatgacaaacttttttgagcacctactttatataaaacatgacaaattgcagtgtgatgtaatcaaaaacaaagaagccctataagaccatttctctagaacagatgttcttaatatttttcttactctaaaatatgtggtagatagtatgcaagaaaagccgggtgcggtggctcaggcctgtaatcccagcactttgggaggccaagatgggcggatcatgaagtcaggagttcgagaccagcctgaccaacatggtgaaaccccgtctctactaaaaaaaa

SEQ ID NO: 23693 - DNA, 6689 bp, Homo Sapiens
ggcccgggagaggggacttgagcgcttcgcggccggtgcgcagcgcggctccggccccgcagtctgtctgcaagtggccatccccgcccccgactcctgcggccggtgcgggagctgtcagctgcacgttgcgggggtaccggagaagccggggttgccttctcccggttctgtgcgctaaccccggagcccggccccggggaactagggagcgtctccggctgcacagcgctcaggttttagggtttcctttgggccacccaaaatgttttttaaatactttggataagagctaaaccacctgccactggggacttccatactctcggctcccttgtcatctgatggcattttgattgtctcgaggccaagtgacttgctgtccatgatgagtgatgagaagaaccttggtgtgtcccaaaaattggtatcaccttcaaggagcacaagtagctgctcttccaagcaaggaagtcgacaggacagctgggaagtggtggaaggactgaggggggagatgaattacacccaggagccaccagttcagaaaggatttttgctgaaaaagaggaagtggcccttaaaaggctggcataagagattcttctatctggacaaaggaatcttgaaatatgccaagagccaaaccgatatagagagagagaagctgcatggctgcattgatgtcgggctctcagtgatgtctgtaaagaagtcatcaaaatgcatagaccttgacaccgaggagcacatctaccatctgaaggtcaagtcagaagaagtctttgatgagtgggtatcgaaacttcgccaccacagaatgtatcgtcagaatgaaattgccatgtttccacatgaagttaaccactttttctcagggtccaccatcacagactcttcatctggggtgtttgactccatttcaagtaggaagcgtagcagtatatcaaagcagaatttatttcaaactggaagcaatgtatcattttcttgtggtggtgagacacgagttccattatggttacagtcttcagaggacatggaaaaatgctccaaagacctggcgcactgtcatgcctacctggtagaaatgagccagctcctgcaaagcatggacgtcctgcatcggacatactcggcaccagctatcaacgccatccagggtggatcttttgaaagtcccaaaaaggaaaaaagatcgcacaggaggtggcggtccagagctattggcaaagatgctaaaggaacactgcaggtcccgaaacctttttctggcccagtaagactacactcctccaatcctaatttgtcaacactagattttggagaagagaaaaattattctgatggctctgaaacctcatcagagttttctaaaatgcaagaagatctgtgtcatattgcccataaagtttacttcactttaaggtcagcttttaatatcatgtcagcggagagagagaaactgaagcagctgatggagcaggatgcctcctcctccccgtctgctcaggtcattggtctgaagaacgccctgtcatccgccctagcacaaaacacagatcttaaagaacgcttacgcagaatccatgccgagtctctgctcctcgactcccccgctgtcgccaagtcgggtgacaatctggcagaggaaaactccagagatgaaaaccgagctctagttcatcagctttctaatgaaagtagactctccatcactgactccctttctgagttttttgatgctcaggaagttctgttatctccaagctcttcagaaaacgagatttctgatgatgactcatatgtcagtgacataagtgataatctttccttagataatctcagtaatgatttagataatgagagacagaccttggggcctgtccttgatagtggtcgggaagcgaagtcccggagaagaacgtgcctgccggcgccctgcccgagcagcagtaacatcagcctgtggaacatcctgaggaacaacatcgggaaggacctgtccaaggtggccatgccggtggagctgaacgagcccctgaacacgctgcagaggctctgcgaggagctggagtacagcgagctcctggacaaggccgcgcagattcccagccccctggaaaggatggtatatgtggcagcctttgccatatcagcgtatgcatctagctactaccgagctggaagcaagccatttaatccggttcttggagaaacatatgaatgtattcgggaggacaagggcttccagtttttttcagaacaggtcagccaccatccgcctatctctgcgtgtcatgctgagtctagaaattttgttttctggcaagatgtgagatggaaaaacaaattctggggcaaatccatggaaattgttccaattggcacaacccatgtgactctgccagtttttggggatcattttgagtggaacaaagtgacctcttgcatccataacatcttaagcgggcagaggtggattgagcactatggagagattgtcatcaagaacctgcatgatgattcctgctactgcaaagtgaattttataaaggcaaaatactggagcactaatgcccatgagattgaaggcacagtgtttgacaggagtggaaaagcggttcatcggctgtttgggaaatggcatgaaagcatctactgtggcggcggctcctcttctgcctgtgtatggagagcaaatcctatgccgaaaggctacgagcaatactatagcttcacacagtttgcgctggaattaaatgaaatggatccatcatcaaagtctttattgccacctactgacactcgatttaggccagaccagaggtttctagaggaagggaacttagaagaagctgaaatacaaaagcagaggattgaacaactgcagagagaaaggcggcgggtcttagaagaaaatcatgtggagcaccagcctcggtttttcaggaaatccgacgatgactcttgggtgagcaacggcacctatttggaacttagaaaagatcttggtttttccaaactggaccatcctgtcttatggtgaaaaagtaaagaagaaagataacattagtgtatttctcctgtgcttgccttctgaagtggcacaaacctgtgtttatatatttaaaagatactctaggatgatcacttgtgcttagcttagcattgtaactctttaagtctatattttcctcagtgcgtttctttacaatttcaaatgttaccctgattgtttatatgaatgtagaacaccttgacatttctttttatatataaactatttaataaaaatgaaagattgaatgttcatgtgtgggttaaaaaaagaagctttaacactaattttccaaaggttagggaagattccaattaaatttatgccttataaaattatgttgtagaaaaaaaatcaacctctcccaggtgcattaagaaataagaattcccagggttactcacccatgcgtaagctacccaagtttaatttggtagctgaaatatctttttgcctcagacagctcttgaattgctcatacagaacaattctgctggtgctggagtctgaagaatattttcatttgcattttagtggttagggagaggatataagattaatggaatgtatatttttatataagacgtatacggcaccttcttgaaaaggaagcatttgaacttgttcctccctatagttctattgccttatatgcaaaattgtaccctgttgctcagagaaattattcataagagaaaagaattccaattaattaaatatcacaatagcatcccagagagacagtaggaaatttctccttagtgagagctgagtccttgagaagttaagagactgtttcctgcttcccaccccaccccgttttttgtccctccgtttgatcacctccctgttgagtatggaatgtcccagtttaatataaaacatacagtttattccacacagcagtttgactttgtaaaagtttagcaaaataactgattgttttggataactcaacatgtttttcttaaatgctgttttagtattttctacctcttaataagcaccatattttagatcttgtataaaaagttgccatctgccttatagacaaatgtagagaattgatgttcttgctttgtgttgtgttctggtaaagctttaagtgagtgtcttacccctttcctatactttcttgttatccatatcattcttttgtgagttttgcagcagtcttgaataatacagattataactactgaaaggggaaccttcgtctttttaaatgtgtcatttcacattacaataatatgtgtagtagttgaattgtgttatcaaagcatgtccaacttctgtccagatgacattaaaaccaaagcctaattgttaagcctcttattctaaagtccatagcaatgctatggaatatcaagtataatgatgtagtaaaaagatttctccagaaaacactttgagatacttaaagaaattcagagcatatcgaatgttatgaatgaagagtaaaataattacaggaaaagaatgcatgatttttcattgtcacaccaaataaccagttggacaatattgcattttcaaaatggagagttatttaaagtggatgtgtagccttctggaatctgcacgtgactggcattttaaaacaactcattaaatattggattcattttatcgagatgccaagatgaacacaatgtgaatatcatttccatttctaagcagttgaatgacacagtcagattctttggtgtatgctttgttctttccatctcaagcatttatccaaattctgctcacagacatgaggaagcaggctgtagatttaagggcactcaaggggaaaacaaatgtagtttccacagtgtgaggataaatgtagaatcgtggtaatattggctgttaaattggcctgctccagagactggctcaaaaaagaaagaagcaacgaaaacaaaatgcacagcctgaatggacgtagcactgtcatgtggcatttggaaaatctttaattatcctaatgttatttcacttgcccttatgctttattttagagtcccagggacaactggatgaaacattacgtctgtagtcatcttatttgagatgggggtgggaacgaattaaaatatgatagagaactatatgcagattttaaaatctagtcagtactagcatctataaagggcttttctgaaatttaaacagcttggtgatgcatcctgatattataagcttaaaactatcttgagggggaaatgacttcttttctccttctgtcccttttctcaaaagcatctttcccccaaatgtatgtctctaggacattttatagttttaagaggaagaaaacagaaacgtggcatcatttgggaagaaccaaggtagaatttaattttctggactttaaatctcctggttaaataatgctaatcactgtaccatttgagttacatgttttaacctcttttttttttctaattattccatccaaaatttctggtgaattacacagaaatttttggaaatgggactttgtgcaggtaaccaccctgcacttcaggtaatgttcctgtcacagctgtcgactaccccacgctgcaggaaatccattcagaaatgagctaacagtctccagtgtagcaggagagccagtcacttccctccccaggccccaaagcaccccaaggctggtattccttgagtcataggtattaataataaaagcctcaatgcagcttctccatgtagttcctctcctacaagccaggtggattctggtcctaactaaagagatgggagttcacctgagggcaagaagtacccaggatgcccaaacagccgcacaggtgtcctgtgcttcctgtgagacttcctgggggaaatatacaaactaatatattttttaatgtttacgtcatttacactgctgcttttctcatattctgcttttaattacttgtagtaaatcatttgtttgggcttcaagcactgtcttccatctgcatcttccagatttatcatgagtgatcttgttctactgttaaagatgtcaagcctaaaaagtaataaagtttttatttggctgttgaaccttgatgtagcccctactacatacactacaagttatgccttctggctactacagaatctccgcagaccttttagttatgagtagaagcaataagaaggtgtccttatggtcttaggaataatagttccaatgtattggcataatttgtttgaatgtctttattttgatattaacaccggcataaatctatttttgctaccagatgatagctattttcatttgctctattttcctctgcattgtactaatctgttactcagtgttagtcttcatttttctgtgttggaaacctgcgtcatgtaaatatctgcaaatcatgacagtctaaagtgcaaaccattttcagagactttggggaatgcagtgatcagaagtggctaatttattttatttctgattattttatccagagggtacttttttaatggatatttgtaaatcttccacttaaccactgaaaattattttgttttaatcccacccttccatccatacctctgcctccccaaaaagctcctattaatttgcttatccccctcatgtagctagttgaatgtgaataaataacatggaaaa

SEQ ID NO: 23694 - DNA, 2930 bp, Homo Sapiens
tgcccgacctcgctggggaaggctggcgctgctgcccggccggagccaggggcaggctgcgcaaaggtgacttagggagaccttgcgggccgccctgggtcgcgcctcccggatcggctcgcctcggctcgactggaggggaggaggaggagcaggccgagcgcattcgcgctggagcttgcgaggagcgcagggtggagcgcgccagccggggtcctcggatctggcccaggtgaggaattttaaattggaacaagagcaagaaaaaaacaaaatcttgtcagaagcactggagacgctggccactgaacatcatgaattagagcagtctctggtgaaaggctctccacccgccagcatccttagcgaggacgagttctatgatgcgctgtcagattccgagtccgaaaggtccctgagtagattggaagcagtgacagcacgctcctttgaagaggaaggagagcatttgggcagtagaaaacacagaatgtccgaagaaaaagactgtggtggcggagatgctctctccaatggcatcaagaaacacagaacaagtttgccttctcctatgttttccagaaatgacttcagtatctggagcatcctcagaaaatgtattggaatggaactatccaagatcacgatgccagttatatttaatgagcctctgagcttcctacagcgcctaactgaatacatggagcatacttacctcatccacaaggccagttcactctctgatcctgtggaaaggatgcagtgtgtagctgcgtttgctgtatctgctgttgcttctcagtgggaacggactggaaaacctttcaacccactgctgggagagacttatgaattagtgcgagatgaccttggatttagactcatctccgaacaggtcagccatcacccaccaatcagtgcatttcatgctgaaggattaaacaatgacttcatctttcatggctctatctatcccaaactgaaattctgggggaagagtgtagaagcagaacccaaaggaaccatcaccttggagctccttgaacacaatgaggcatatacatggacaaatcccacctgctgtgtgcataatatcattgtgggtaaactgtggatcgaacagtatggcaatgtggaaattataaaccacaagactggggacaaatgtgtgttgaattttaagccatgtggcctttttggtaaggaattacacaaagttgaaggctacattcaagataaaagcaaaaagaagctctgtgccctctatgggaagtggactgaatgtttatacagtgttgaccctgccacgtttgacgcttacaaaaaaaatgataagaaaaatacagaagagaagaagaacagcaaacagatgagcacctctgaggagttggatgaaatgccagtgccggattctgaaagtgtattcattatccctggaagcgttcttctatggcgaatagccccacggccttcaaattctggccagatgtataattttactagttttgcaatggttttgaatgaagtagacaaagacatggagagtgtgattcccaagacagactgcaggttacggcctgacatcagagccatggaaaatggagagatagatcaagctagtgaagaaaaaaaacgacttgaggaaaaacaaagagcagcccgcaaaaacaggtccaagtcagaagaggactggaagacgaggtggttccatcaaggtcctaatccctacaatggagcacaggactggatttactctggcagctactgggacagaaattacttcaatttgcctgacatttattaaaatgcatacaagtcagggtgtttggctaatctacaaataagtcttaaacctatgtttttaaatttttttcccttggtttctacttatcttttaaaaaaaaaaatgaaaaaacactcatgagataactgcatttcacccaacaaaagcagggtataaggcgatattggtgatgaaagtcttaggaaaaatgcataattttgctataaaatgtacttatttggaatactattttatatagaggtaagagaacactgctggggaatatgctttttatggttgctgttgccatatttactgaaggtttatacctaaatgtaactttagctttatggaactatatagtaatcccaaatcaagttattttgaatatttttatgctgtcatgcttgaatgttttagatgtaacctttgacatatttagaactctcctcctatacaatgtttattctcagatatagaggttatgtcattttataaagacttcattgataagatggcttttattcatactaatcctcccaatgttaccccttccatcttccaagaagaaaaaaaatgcctgaatattcagaatagatatttctgatttgaaaattctaaagaattaaactggaaaagtatttcatttacttagtgctctgaatttacttttacagttttctgcagtcagtatcattaaaatggttaagtttacatttgaactgaaaatatgtataaaatctagcaattcacaaaaatgccctagaaatatagattttaatcaccattacataatgacaaaccttgttaaatgcttccacttccagtggcaaatgccactagggaaagtaagttgcactcatgtaagtatcaaactatataaaaggaggccttgtgcatttcaagtttgcaaagtacctgtgtacttaaaatatgtgtggagacctactgtacagtagttttgcccctttaattggggcacattcatcttaaatcttatagtatttatccacccaaaccccagactgagatactgctcccaggggcctaggtagctgccagtccgtgattttaattgctgtcttgaagttaacaagtgttataatgaaataatctacctgatgctaaataaaggctttagaatgtt

SEQ ID NO: 23695 - DNA, 3933 bp, Homo Sapiens
tgagcctgtcaggctgggcgggtccatatccgggtggaccgggtgggtgaggctgcccctccctccaggtcccgaggtggataaggggtggggagtgacgtgcagagattccctttcgccccttcggatccaagagagggtggcagaaggaatgcgtgggtgacttggcgtggatttagggcgtgcccaccctgcagatcggcctcctagagtgtcccgagggcctgagaggccgcagggacacgaaggaagagaaggcatttcccggggatttggagcaggcacgcgcggcccgggcgtccggagctgtagcagcagcagcagccgccgtgccggggccgccaccgcggcgggcacccgcgtcccgggcgcccacggaccatggagagggcagtccagggcacagacggcggcgggggtagcaacagcagcagccgcagcagcagccgtgctacctcggcgggctcctcgccctcctgctctctggcgggccggggggtctccagccggtcggcggcggccgggctcggcggcgggggaagccgcagcagcccgggctctgtggccgctagcccgtccgggggaggcggccgcaggagggagccggcgctcgagggcgtgctcagcaaatacaccaacctcctccagggctggcagaacaggtacttcgtactggatttcgaggctggcatcctgcagtattttgtgaatgagcaaagcaaacaccagaagcctcgaggagtcctgtctttatctggagccatagtgtccctgagcgatgaagctccccacatgctggtggtgtactctgctaatggagagatgtttaaactgagagctgctgatgcaaaagagaaacaattctgggtgactcagcttcgagcttgtgccaaataccacatggaaatgaattctaagagtgctccaagctcccgaagccgaagtctcactttgctcccacatggaacacccaattctgcgtctccctgtagccagagacacctcagtgtgggggcccccggtgttgtcacaatcacgcatcacaagtcgcctgcagccgcccgaagagccaagagtcagtattccggccagcttcacgaagtcagagagatgatgaaccaggtggaagggcagcagaagaaccttgtgcacgccattgagtccctgccagggtccggccccctcactgccttggaccaggacctgctgctcctgaaagctacctctgctgccaccctcagctgccttggggagtgcctcaacttgttacagcagagtgtgcaccaggcgggccagcccagccagaagccaggagcctcggaaaacatcctgggatggcacgggtccaagtcacattccacagagcagctgaaaaatgggacacttggctctttgccatcagccagtgccaacataacctgggcaattttaccaaactctgctgaagacgaacaaacctcacagccagagccagagccaaactcaggctctgaattggttttgtctgaagatgaaaaaagtgacaatgaagataaggaagagacggaattgggcgtcatggaggatcagcgtagtataattcttcatctcatttcacaactcaaacttggaatggatttgaccaaggtggtgcttcccacctttatcctggagaagcgatctttgctggagatgtatgcagatttcatggcgcacccagacctactgctggccatcaccgctggggccacaccagaggagagagtcatttgcttcgttgagtattatctcacagcctttcacgagggccgcaagggcgctttagccaagaagccctacaaccccatcataggcgagacatttcactgctcctgggaagttcccaaggacagggtcaagcctaagaggactgcttcccgctctcctgccagctgtcacgaacacccaatggccgatgacccttccaaaagctacaaactaaggtttgtggctgagcaagtgtcccatcacccacccatctcctgcttctactgtgagtgcgaggagaagagactgtgcgtcaacactcatgtatggaccaaaagcaagttcatgggcatgtccgtgggggtctctatgataggggaaggtgtgttgaggctcctggaacacggggaggagtacgtattcaccctgcctagtgcctacgcccggtccattctcaccatcccgtgggtggagctcggaggaaaagtcagcatcaactgtgccaagactgggtactcagcgacagtgatattccacacgaagcctttctatggagggaaagtccacagggttaccgcagaagtgaagcacaacccaaccaacaccattgtttgtaaagcccatggggaatggaatggtactttagagttcacctacaacaatggagaaaccaaagtcatcgacacaaccacactgccagtgtatcccaagaagatcagacctcttgagaagcagggacccatggagtccaggaacctctggcgggaggtgacccgatacctgcggctgggggacattgacgcagccaccgagcagaagcggcacctggaggagaagcaacgggtggaggaacggaagcgcgagaacctccgcacaccatggaagcccaaatattttatccaggagggcgatggctgggtatacttcaatcccctctggaaagcacactgatggggtggaggtgcagagctttccagtatagccctgtttttgtaggaatattaaagtagtagagtatcagggttttgttggcattcactgagaccttgtattagcatccaagaaatgatgagagagagagaaattatatactatgaaaagtgcacccccacactctgctagaggaatgaatttattcaagagccattcggggcacgtgtgtgtacacaccgtatacgttcacacacatgcactatgtaaacatctgagtatgattacacatttaaatactgcactcaccaaggttaaagtgggtaatcataagctcctttttatcaatgaagtttgaagtttttctatttttcactttgccaaaaatgttttacactcacaaagatattctcacttagtcaactcctgtcaaaatgaaggtgaactggcatggcccgatcactgtccataagggagaaagtggctcattcctggtagaagtatgggtggttatcatttcaaaattattgtgattctcacctccctccccacctcagtgttttgtctgtccgcgcccaagaaagataagcaagtatttcctgctggatgggggttggcaggaagctgttaaagatttatgccagagccttgcaggatggagcacctctgggacaactaagagccaaggcccaccaaggagttttccacccgtctctcatggtcacagcgctagtcattcatttttgagaagttgcttcttttacatcagaaaaccagtcaatcatatggagacttcttttgtgatgaaaaagggctttagaagttaaatacatgcatgcacatgaaaacatgcacaaccacagcctcaatcttgtatttagtttggggaaagagaagagaatttcctgtggattattttttcctcaagtgcacctctctggctaacccaactctgcaagaaagcactgtgactaaaacatacataacgcctgcataaatattccatggtttcagttaaatttcagtttttagcctttacacatgaggtcaaggagtgacgaaaatacaagcaggaaaaaatgaaatatctggtttttgctgaatgcttaatttattttttactgtgccactccaatatttatcaaatccaatagcatgaatgcttctctgtagtaatactaattttgtgccttttgtctgctttcttaagaccagttgttcacactttgtagatattagacaaatatatttcgattgaatacaaaaaaaaaaaaaaaa

SEQ ID NO: 23696 - DNA, 7240 bp, Homo Sapiens
cactagaatgtgaaggatcttcgcggttctgggtgcccagaaaggcggcgacgcggcggatgacaacattagtgccgcgacgcgctcctggccaggcggcggctgtagtgttagctttggacgccgcagtagccgctgccggtagcaagccgactgagggaaggtgggggtccgcccgggctggtggacctcggggccgaaagttcccgccccgctcgggggctgagccggcagtgcctccgcggccgctgggcagcgcccttcgtccaggctcgcgccccagctgccgccgacgacagcggccgagagaagttggggtctgactagacgcttacggggcctcggaccccggcgccgcggcgacctcggaggaaccggctccttgcgtcccgcctccctgggagctccgcacgggatttgcagatttacagaatggctgcacattaatggaaagagaagcataaacctatcttctttcattatggagggaggtttggcagatggagaacctgatcgaacttcgcttcttggtgatagcaaagatgtccttgggccatcaactgttgtagcaaacagtgacgaatctcagcttctgacaccaggaaagatgagtcagcgccaaggaaaagaagcttatccaacgccaaccaaagatttgcatcagccatctcttagtccagcaagtcctcatagccagggttttgaaagagggaaggaagatatttctcaaaataaagatgaatcttcactttctatgtcaaagagcaagtctgaatctaaactttataatggctcagagaaggacagttcaacttcaagcaaactcacaaaaaaagaatctcttaaggtacaaaagaaaaattaccgagaagaaaagaaaagagccacaaaggagctgctcagtacaatcacagatccttctgttattgttatggctgattggttaaagattcgtggtactctaaagagctggaccaagttatggtgtgtgttgaaacctggggtgctactgatctataaaacccaaaaaaatggtcagtgggtaggaacagttcttctgaatgcctgtgaaatcattgaacgtccatcaaaaaaggatggcttttgtttcaaacttttccatcctttggagcaatctatttgggcagtgaagggtccaaaaggtgaagcggttggatccattactcaacccttacctagcagttatttgatcatccgagctacttcagagtcagatggaaggtgctggatggatgctttggagttggctttgaaatgttctagtcttcttaaacgtacaatgatcagagaaggaaaggaacatgacctgagcgtttcatcagatagcacacatgtgactttctatggcttactacgtgctaacaatctccacagtggtgataacttccagttaaatgatagtgaaattgaacgacaacattttaaggaccaagatatgtattctgataaatctgataaagaaaatgatcaagaacatgatgagtctgataatgaggtgatggggaaaagtgaagaaagtgacacagatacatcagaaagacaagatgactcatatatcgaacctgagcctgttgagcctttaaaggagactacctacactgaacagagccatgaagaacttggagaggcaggtgaggcttctcaaacagaaactgtatctgaagaaaacaaaagccttatctggacactattgaaacaagtccgtcctggcatggacctatccaaggtggttctgcctacatttattttggaaccccgttctttcctggataaactttcagattactactatcatgcagatttcctatctgaggcagctcttgaagaaaatccttatttccgtttgaagaaagtagtgaaatggtatttgtcaggattctataaaaagccaaagggactgaagaaaccttataatcctatacttggcgagactttccgttgtttatggattcatcccagaacaaacagcaaaactttttatattgctgaacaggtgtcccatcatccaccaatatctgccttttatgttagtaatcgaaaagatggattttgccttagcggtagtatcctggctaagtctaagttttatggaaactcattatctgcaatattagagggagaagcacggttaactttcttgaatagaggtgaagattatgtaatgacaatgccatacgctcattgtaaaggaattctttatggtacaatgacactggagcttggtggaacagtcaatattacatgtcaaaaaactggatacagtgcaatacttgaatttaaactaaagccattcctagggagtagtgactgtgttaatcaaatatcagggaaacttaaactgggaaaagaagtcctagctactttggaaggtcattgggatagtgaagtttttattactgataaaaagactgataattcagaggttttctggaatccaacacctgacattaagcaatggagattaataaggcacactgtaaaatttgaagaacagggagattttgaatcagagaaactctggcaacgggtaactcgagccataaatgccaaagaccaaactgaagctacccaagagaagtatgttttggaagaagctcaaagacaagctgccagggatcggaaaacaaaaaatgaagagtggtcttgcaaattatttgaacttgatccactcacaggagaatggcattacaagtttgcagatacccgaccatgggacccacttaatgatatgatacagtttgaaaaagatggtgttattcagaccaaagtgaaacatcgtactccaatggttagcgtccccaaaatgaaacataagccaaccaggcaacagaagaaagtagcaaaaggctattcctccccagaacctgacattcaagactcctctggaagtgaagctcaatcagtaaaaccaagtacaagaagaaagaaaggaatagaactgggagacattcagagttccatcgaatctataaaacaaacacaggaagaaattaaaagaaatattatggctcttcgaaatcatttagtttcaagcacaccggccacggattattttctgcaacaaaaagactacttcatcattttcctcctgattttgcttcaagtcataataaacttcatgttcaagtagaagttctctaccattgaatcagtgaactagaaagatctgatttggcctgggaccagtgttcaagttggtttggtctttattaaaaatcacaatattccgaaaacaaaaaaacctaggagataaatgtagaggtattgacttttcgtatcttttatcttcacactgaaacaagagctatcctatttgattattaaagtgagctatgtgttaagtgccaggacatttctagcttttgtgagaatgtgtctacatatgagtataataaacccacatgtatacacaattgtctcttatgtactcctacctgacagtagtctttgtattctatagtatgttctgagatataatgttaacattgttcataacaaaaaatgctatcaatcttataaatatatgtaatctattttcttcataaaacaggcacaaaagttttatcagtaaggaattacagattgagaaatgatggaataatagacataattaattcaatacactactgttaaaatcatttgcaaagcactcagctcaattatcttcttagaaagaaagaaaaagtatgaatggtcaaaatgaatacatcgagagagataaatggcaaattgcttttttaaaagtttacataagttttttttaacccctagaatttaatatttgtagatgcaggtaaatatatatacttacgtgtatatcagtataaaaacactggtgtgcaattaattggattgattataataccaccttaagcacttgctgaaaaaagtgtggtcaaaattgattgctgtccttttgtcttatttttgtttttcttaagtcagctggttcataacataggccaaattctagagatgtttatagagcatttgaagtgctgataatttatgttttttcattatgaaaacttattttagctttagactccagtgtgttcagtgaataagtagaatataaaaaaatataaccagtattttacttcaaaagccaaaaagaggcaataagaaaagacactttgtggtggcctttatgtgtgcattaaaattggtttctgtaaaacgtgtaataagttgagtatctacgaagagtatcaagttctgaagtttaatttttttattatcctcctctcttcttagtaacttctttctgtggcaaaaccacaattctttaagattcctattgttcaggctaaggcaaatttttttgtttgtttcttcagtttaatattttgattttgtgtttttacgtaaatatttatattccttgaaagcaatttttgccaaggtagttcagtttaggaatatgttgttctaaaatatgtcttagaatcctgaaagcatagattttgaaatgtttttttaatgaaaatgaaggtcagagagaataattgccctgaccacatttgcctttcagtaggaggaggctgtgaaatagtaaaattataatcgtttatgccatgataaatacaagattggtaaataaatacattgattggtaaattatgagaatcaaaatgataaaaagagcctgcttttttccctaaccaatatagctatcttaagtatccttaggtttctgtgaagaaccatttcccatgttttcttggcaaaataatgctgtattccatatgtacatgtgaaatgatgttttaaattgataaaagcttaaataagatctacctatacccagtattttcatgatattagaacaaatgggtttttggttatattttatatttgtcaatataatttttgtattcacattctgttacactctgcctattcattgatatatgatattctgtaaatattgtacaatttgatcttttttatggtttaaattagttaattacatacaaattgattggcttatcacaaaaatcatttcatcagtaaaccttgttaacattttgtactggtgacccacctcttaggactttggtcttatccacgtgtatgttgttttcatttggtccaaataatattttatttgtatgggtatcttctaagactaaataggtagttgtgttctttatttttaaaatttctttttagagcaaatgttatgggttcttacccaaagagtcaaaaactatttcttaagaaagagcagagttattcatgactgttctttatacactaaaagcatgcatctaatctaatagtcctcttattatgcttttagttgtatgagtctctttctatgaactgaacacaaaactcaggaattggtggcttaattttagatcagtgcttgtactaggcttagttatatgaatctttataacacataattactaactttgtagccatatatgtaattgactttgaatgttatttacctgaaattaatcttccttcacacatggaccgtaaacggttcccagttgtctgagagcctcatgagggtttctaggatttatgaccttatgaccagtttttttcatttaccaagattttattttcctacatgaaaatttaattgagtaataattattcacatgtgcattttctttttagctgttaaatgtactatgccatcatccaccatttagtaaaatgtagctggcccaggacatgtaaaaaaaaaaaaaaaacaacaacaataaatagggcatgtgaaatgttaagttacagcaatagatattttatttgtatttcatgttagtacttttttgttttatatcacttataaaggtacagtgtactctttgtcacagctcagttggtaaccgcattccattgaaaagttggccttgtaaaatacaactctcatttaatattcatgcttttgtgcctttaagaaaatattttttgtcattttttgtgttacagaactataatgtgattcaaggtgtttataggcttgtcataaaagggtcatttctgtgtgttactttctttttatatagctatagtatatttaaacaataatactatcttttataggggtttgtctatttacctattctttactcagacattgatgtagacttgtcagattattctgagtattgttaacagtgccttttcgatggaatcacactttttggctgtcaccttgtgccatatacacacaaaattttgtggaaggcagttttaactttctgaagaatatctgtcaaaatttaagaaaacaaatgtataaaattccattttttccagtgtttagcatttctagtaagcagtgaggttgtttgacatacagtgatgatggcattattgataagccatacatgagactgcagattatattgaatcatattaaatgtacagaaataaaatattagatttatatcaaattttccaatttgaaccagtggggaaaatcccacagaaatcagtaagtttacatttcaatttctatcttatttgactaagtggaaagagattctttaaaatgtataacctgccattatgtaatttggtttcattttattctacctgttgtgtgagtttagtatatttaatttactttttgttactctttacatactgtttatttttgttagtttttaattgaagatggactgttgaaattgtataggaccagtgtcttattaatatgattaatatatttagaagagccacgtgaaacccatgacaaaatgaatgtgaatattctttctaaaaatttagaaaatgttatctttttgcatttattatgtaaaactgttttacagtatcaaaatttttcacttaaagaaaaaaaatgccatgaaacatttgaactgatgagccacagaacttcagttgaaatttttttcactttttagcatgctaaatatacatctgagtttaaatgttctgtttaatggccattcataaattcaagcactaccactggtcagttttgtgtgatagaataaaaatatgttacctgcagtgtaagtacagcacactgtcaaattcttttccttaaggtgcacagtaaatgtacagatagttataggccactgttttgtaatgtagtacatttctaatctattattcctaacctattataactgtttgcagaaagaaaagaatttttctaataatctgtaaaattatgctaacttctacaagtaggcttctaaataaaatttttaaaaagagc

SEQ ID NO: 23697 - DNA, 2062 bp, Homo Sapiens
agggataatatagctttaaggaaacttttggcagatgtggacgtcgtaacatctgggcagtgttaacagaatcccggaggccgggacagaccaggagccactcgttctaggaatgttaaagtagaaggttttttccaattgatgagaggagcagagaggaaggagaaagaggaggagagagaaaaagggcacaaaataccataaaacagatcccatatttctgcttcccctcacttttagaagttaattgatggctgacttctgaaagtcactttcctttgccctggtacttcaggccatatacatcttttcttgtctccataatcctccctttcaaggatggccagtcagctaactcaaagaggagctctctttctgctgttcttcctaactccggcagtgacaccaacatggtatgcaggttctggctactatccggatgaaagctacaatgaagtatatgcagaggaggtcccacaggctcctgccctggactaccgagtcccccgatggtgttatacattaaatatccaggatggagaagccacatgctactcaccgaagggaggaaattatcacagcagcctgggcacgcgttgtgagctctcctgtgaccggggctttcgattgattggaaggaggtcggtgcaatgcctgccaagccgtcgttggtctggaactgcctactgcaggcagatgagatgccacgcactaccattcatcactagtggcacttacacctgcacaaatggagtgcttcttgactctcgctgtgactacagctgttccagtggctaccacctggaaggtgatcgcagccgaatctgcatggaagatgggagatggagtggaggcgagcctgtatgtgtagacatagatccccccaagatccgctgtccccactcacgtgagaagatggcagagccagagaaattgactgctcgagtatactgggacccaccgttggtgaaagattctgctgatggtaccatcaccagggtgacacttcggggccctgagcctggctctcactttcccgaaggagagcatgtgattcgttacactgcctatgaccgagcctacaaccgggccagctgcaagttcattgtgaaagtacaagtgagacgctgcccaactctgaaacctccgcagcacggctacctcacctgcacctcagcgggggacaactatggtgccacctgtgaataccactgtgatggcggttatgatcgccaggggacaccctcccgggtctgtcagtccagccgccagtggtcaggttcaccaccaatctgtgctcctatgaagattaacgtcaacgtcaactcagctgctggtctcttggatcaattctatgagaaacagcgactcctcatcatctcagctcctgatccttccaaccgatattataaaatgcagatctctatgctacagcaatccacctgtggactggatttgcggcatgtgaccatcattgaactggtgggacagccacctcaggaggtggggcgcatccgggagcaacagctgtcagccaacatcatcgaggagctcaggcaatttcagcgcctcactcgctcctacttcaacatggtgttgattgacaagcagggtattgaccgagaccgctacatggaacctgtcacccccgaggaaatcttcacattcattgatgactacctactgagcaatcaggagttgacccagcgtcgggagcaaagggacatatgcgagtgaacttgagccagggcatggttaaagtcaagggaaaagctcctctagttagctgaaactgggacctaataaaaggaggaaatgttttcccccagttttagggacaggactttaaggtgggtgagtttgacaaatcctgcagtgtttccaggcatccttttaggactgtgtaatagtttccctagaagctaggtagggactgaggacaggccttgggcagtgggttgggggtaaaagtttttcctttcctaacccgggcccctgcccagctttccaaagtttttcagaaaagtaaatcctaaattcagtgaaaaaaaaaaaaaaaaaa

SEQ ID NO: 23698 - DNA, 2028 bp, Homo Sapiens
cgcgctcaccgacttcatagggtgccgaattcttttttccccaggcttgccatggctagtcgaggggctcggcagcgcctgaagggcagcggggccagcagtggggatacggccccggctgcggacaagctgcgggagctgctgggcagccgagaggcgggcggcgcggagcaccggactgagttatctgggaacaaagcaggacaagtctgggcacctgaaggatctactgctttcaagtgtctgctttcagcaaggttatgtgctgctctcctgagcaacatctctgactgtgatgaaacattcaactactgggagccaacacactacctcatctatggggaagggtttcagacttgggaatattccccagcatatgccattcgctcctatgcttacctgttgcttcatgcctggccagctgcatttcatgcaagaattctacaaactaataagattcttgtgttttactttttgcgatgtcttctggcttttgtgagctgtatttgtgaactttacttttacaaggctgtgtgcaagaagtttgggttgcacgtgagtcgaatgatgctagccttcttggttctcagcactggcatgttttgctcatcatcagcattccttcctagtagcttctgtatgtacactacgttgatagccatgactggatggtatatggacaagacttccattgctgtgctgggagtagcagctggggctatcttaggctggccattcagtgcagctcttggtttacccattgcctttgatttgctggtcatgaaacacaggtggaagagtttctttcattggtcgctgatggccctcatactatttctggtgcctgtggtggtcattgacagctactattatgggaagttggtgattgcaccactcaacattgttttgtataatgtctttactcctcatggacctgatctttatggtacagaaccctggtatttctatttaattaagggatttctgaatttcaatgtagcctttgctttggctctcctagtcctaccactgacttctcttatggaatacctgctgcagagatttcatgttcagaatttaggccacccgtattggcttaccttggctccaatgtatatttggtttataattttcttcatccagcctcacaaagaggagagatttcttttccctgtgtatccacttatatgtctctgtggcgctgtggctctctctgcacttcagaaatgttaccactttgtgtttcaacgatatcgcctggagcactatactgtgacatcgaattggctggcattaggaactgtcttcctgtttgggctcttgtcattttctcgctctgtggcactgttcagaggatatcacgggccccttgatttgtatccagaattttaccgaattgctacagacccaaccatccacactgtcccagaaggcagacctgtgaatgtctgtgtgggaaaagagtggtatcgatttcccagcagcttccttcttcctgacaattggcagcttcagttcattccatcagagttcagaggtcagttaccaaaaccttttgcagaaggacctctggccacccggattgttcctactgacatgaatgaccagaatctagaagagccatccagatatattgatatcagtaaatgccattatttagtggatttggacaccatgagagaaacaccccgggagccaaaatattcatccaataaagaagaatggatcagcttggcctatagaccattccttgatgcttctagatcttcaaagctgctgcgggcattctatgtccccttcctgtcagatcagtatacagtgtacgtaaactacaccatcctcaaaccccggaaagcaaagcaaatcaggaagaaaagtggaggttagcaacacacctgtggccccaaaggacaaccatcttgttaactattgattccagtgacctgactccctgcaagtcatcgcctgtaacatttgtaataaaggtcttctgacatgaatactggaatctgggtgctctgggctagt

SEQ ID NO: 23699 - DNA, 7211 bp, Homo Sapiens
ggtacccagttctcaggagagcagctgtgaacaactacctttcaatagttgtttttgttgttctcaacagctgggaggctttcctgtcccaatcaagcagggaaacagtggactataggctactccatcatcataacattcacacaaattagtgctgtcacaagcaaaaggcacctctgcacttttccaaagcttcagaattacctcgatctaagggacagatctgcactgtccaatatggtagccatcagtcatatgtagcttactgaacactagagcactagaaacgtgggtagtccaaattgagatgtgctaatacacactcaatttccaactcagcattaataaaaatcatatcaattttttacattgattataggatgaaatgattttatcctatttggatacactagattacataaaatatattattaaaactaaccttttaaaaaatctgtttaatgtgactactagaaaatttaaaatgatagatgtggcttatagttccattgaacagtgctggatagagcagtggttaaaatggcaggctctgaaatcacactactttggttttatcctagctcttacactaacagatatgtaacactgaggaaattaaactctctaaaatgcaatcacctaatctataaaatggatctaataatgatatcatatgattgtggtgagaagtaaataaagtagtatatataaataatgtattacagtgtttggcatataagtgctaaaaacatcccagggtactgggactaaactgagctcctctaaacccctaaatgaacaatccccccacctctaacccctaccccaaaggggctcacacattaggcctgggttcaagaagtcttccacctcagctaggaaatcccaaggatctaagaaaaacactgatcaacaaaactttggggtataaacttagactgactccttctgagcagtcttaatctcatcatctttgtctcgtttcctataatacctcatctcctacaatgccaaatccaagatcttttttttttaaatctctataattgcatcccaatattcctcattcttctagtttactaagatcatggcaattcatagcatgaattctgtcacactttatctaccccatcccattgcgtcctctggtcttaagatgtctgcatctcttttcatactcttcttccatgtcatgtcatctttcttctctcctaattgctacagtctgaatatttgtgtctctaccaaattcataagcatatgatatctgtattgtctccattttatagattagctgattgagttttagaaagtttaatttcctcagtatcatatagctgttagtaagagctaggataaaaccaaagtagcgtgatttcagagcctgccattttaaccagtactctatccagcactgttcaacagaactataatgtacatacatcatttaaaattttctagtactcacattaaaaaagctaaaaaaaaaaataaaaaagtgaagttaatcttaattacgtatttggataatctaatatattcaaaatatcaaatatcgttttgtcctataatcaatgtaagataactgtaaagattaaattaattaaattgtataattaaacctactacatctttgtcctgaactgtaaaactttttttttcctgctgtacaacttttgaatgtaggaaattatgtattatgtatctctggatgccaggcagaacagtcaaatgcttcacccatggcaagcccttcacttcatgaatattaatgaaggaccactaaatataatttatcagcatctttcttatgctaacgcaaacattagaaaaagtatcctccttccctttatatacataatttcaattggcttccacaccatcctccagctcacctgtatctcacactttttttctggactttagggccttacttccatctaccttctaaatatcatcatttagatgacctgaaggcaacctaaacataacatgtcccaaactgatcagagaatctttctctttcttttttttgagacagagtttcaggtttcgctcttgttgcccaggctgaaatgcaatggcacaatctccgctcactgcagcctccacctcccgggttcaagcgattctcctgcctcagcctcccgagtagctgggattacaggtgcccgccaccacacctggctaattttttgtatttttagtagagccaaggtttcaccatgttggccaggctggtctcaaactcctgacctcaggtgatccgcccgcctcggcctcccaaagtgctgggattacaggcgtgagccaccacgactggcctctaatcaactttcttcctatatttcttgtttgataataaaagtaatagccaacacgagaattttatatatattatcctatttaatcctcacaacaactctacgtattctatcatcctttatcaccaaataggatttaaaggcatggtaacttgctcaagatcacaaaactattaagtggcagatgcacaccttggcatgtttgactccaaaggccatgctctcaaacaccttccatccaagcacataaagcaaaattagaaaccttgaagtcatcctagaaattctactcgctctctacatcctgccacccagtcatctctctcctactatctaaatgtttcccaaactagtcctctcctctttgtactgcctccattcggcctttctctcctgaactactgcaataaccacctaattgatattttgactcgaatctcaaccacctatagggttctttctgtatttaaatttcatcatgttgctgccccacttaaaatttttataaaggtttccaattgccaaccaggttaagtacaaacttcttaacaactggatttttgcctactctcccagtcatcccatcgttgcccaaatgtgctctagggcgatcatactgcacagctcgtctttttttattttttattttttgtgacagggtctcactttgttgcccaggccagagtgcagcgattttggctcactgcaacctctgcctcccaggttcaagcaattctcctgtcccagccctgcaagtagctgggattacaggagcgcactaccacgcccggctaattttcgtatttttagtagagacagggtttcaccatgttggccaggctggtctcgaactcctgacctcaggtgatccgcccgccttggcctcccaaagtgctgggattacaggtgtgagccaccgtgcccagccaacttgtctctcttaacatggtgacactcactccttcctcagctcacatggttctctctcagctgacttctaatcatccttccagatttagttcagtatcaactcttcaagaaagcctttcttccctgctgcagcctcctttccttcacctgccaacagattaggtattccttcccctgcagtccccctttacctcatttctaattaacctcatcacaagttactctattaatatgtgtttctgtctgttgctcctgactcagagttctttgaggacaggggttttatatcaatcacacatcgctagcatagcccctggaatatagcactctataccatatgtgtaccaaatggaagggtttatatcgggcttacaaatcacagcaaagaatgtctgggaatatcaggatagtcagtcttccatatttgctgggagggaaaaggaacacttctgaagaagtgctgatgacccggaaagtcagttaaggacaacaggtgtgcctaaaaaagaagtaaagatcagagaactcacagacttccattagagagaacacaaagaaatcatttatttaaagatcagactaaatccaaaacaattaggttcacaaagccaatagaaatgcaagatacagacatacacagccaacattctcttaagtcaatttcaaaatgttgaaagctatttcggcaataaaaatcacaaactttctgcactgccaaggtgagggaaattacatttcaaaggcgattccaaaaaaacctaatcaagactttcctcaggatcaatttttggtattcacatttccttagcatgtaatacaggtgcctgtcttcggcgtacggataaacccagaaggccacgagcaaaaatcgtgattaactttaaagagtttaacttgcaccccttgtatgatgccacaggatacaatactataaaccgccactcacacaagatgagttacagttgccatgggttaaatctgctgcctgaaaaacaaattttaagtcctccacccagaagggtctggggaatgggacgcaacaaagaccaagccagaacaccccggagcccagacctgctcagagaacgcgttccacgtgtgcgcgcccgcaagcccggcttcgcttcccgccccgcggggagcgcccttagctgccctatagcgttcgcgcccggaccaggacgagtagaggggacggggccctcgagccatcgaggatataataaatacccgttagtcacaccacactaccttcctgctagcgcgaggcaggcaattaccatccactagccgcaagcagccagcgtctcacccgatgcgcaggcccaaccccgcacccgcacccgcacccagcacgcacgcgcgcggcagagcgggtgcagagagcgcggcactgagtcccgcctcgcccgggggcaacgtgagattggcgctgctcgcagccaatccgctggcagcgagtctgtccgggaaagcttccgcaagctgcgcagcgccgggcctgagggcgtgtatccgcggccgtagcagccgggctggtcctgctgcgagccggcggcccggagtggggcggcgggtaagtgggcacgaacgcggtggacgctgtacagtcgccttcgtcggtagggaactgctggcggcctaggggtcgtcctgagagggaaaagcgggctccggctgcatctgcggcgccctgcgtggccgtaagagccaagtggcctcagaggctcgccccctacgcaaatcctcgttgtcttgccagggtcctgacgtgacgtgcggccgcgagaaggaaggggcgggttgggggaggcgctgaggtggtagcagcggcggcttttgctgagttttctctggcccagagcgctcgggctgtcggtctagcaggggggactcccctgaggggccgctgcgggtcgccgtcttcggaggcaccggcgagggcagagccaacagcctcttcacggtctgtaaggtcattgtttgccagtcgtgggcagcgcggcaaacctgctgggaaaaggttttctggttggaataggatgagtaccgcaccagctttgccttccagctgagatgtaaatttcaggcctccatcctgtggaacgtgggaaaactatcttgagtgttggcatgttctaagtatgacataatagtttaatgtatgataaatcatgggtgtttagacgaaagatttacacatataaattggaggctttagcggtcttagtgtaactaacttttcgtccccttaacccttgatgcctgttctatgggtctctagagcggaaggagcattatactccggaaacatttgctggaaggggttatgagaaattcctctctgtatgctaactccgtaatacaagcgtttgtgtattttaaaatcacagctgttccaaatataatctagcctcgttttccccctccgtcggatgataggtgttcttcaggacagttttattttaagcaattcttagtctcaagtaaacaccatcattaaaagaactgagaactattatcaattcttcctttggagtccatcttcaatggaaaggagaagggaaaaccttttttaaaaagaagaaagaaaactgaagtttttgatttgactagagaaatattcagaagactccttattttcacctagtctaatcacaaaattgagaaacaaacattatcccttgaccatgtaaattttacaccacattatgtcaacagcatgtaccttccacattgagtattcagaaagaagtgatctgaactctgaccattctttatggatacattaagtcaaatataagagtctgactacttgacacactggctcggtgagttctgctttttctttttaatataaatttattatgttggtaaatttagcttttggcttttcactttgctctcatgatataagaaaatgtaggttttctctttcagtttgaattttcctattcagtaaaacaacatgctagaaaacaaacttttggaaaggcattgtaactattttttcaaatagaaccataataacaagtcttgtcttaccctaaagtcaaatgctgaagattctttactgctgtcatcagcatctacaagtagcatattttggatggtgtttgtgtgctacttcaaagtaactaggaaaaaataatcctcgcaacacaggtaccttgtcatgtcagaattgggggtgttaggttgccagttgtatcagtgttgattcatttcattacttcctacagagcaaacatgaacgttggagttgcccacagtgaagtgaatccaaatacccgtgtcatgaacagccggggtatgtggctgacatatgcattgggagttggcttgcttcatattgtcttactcagcattcccttcttcagtgttcctgttgcttggactttaacaaatattatacataatctggtaagaatttcacattatactaaacacttaaaagttttaggtttagtggttgccggaaattaaggggaggaaggaatggaaagttattgcttaatgggtacagagtttttggttttgcaagatgaagagagttctggatgtggatggtaatggtgatgattgcacaacaatatgaatgtttttaataccactcaactgtacatttaaagtcccagcactttgggaggccaaggcaggcagatcacaaggtcaggagttcaagaccagcctggccaacatggtgaaacctcatctctactaaaaatacaaaaattagccgggcatggtggcgcatgcctgtagtcccagctactcgggaggctgaggcaggagaatcgcttgaacctgggaggcagaggttgcaatgagccgagatcattccactgtactccagcctaggtgacagagtgagatttcgtctcaaaaaaaaaaaaaagtgtctaagatggtaaactttatgacatgtgtgtttaaacatagtttttaaagaagctt

SEQ ID NO: 23700 - DNA, 5201 bp, Homo Sapiens
aagcttaaaacgaactcagttaaatcacacactctcacaaacagcttggaacctcgttaatgctactgacaaagactaattttgtatttaatactgatcatttataaccccttgcttgttttccaggggatgtacgtatttttgcatgcagtgaaaggaacacctttcgaaactcctgaccagggtaaagcaaggctcctaactcattgggaacaactggactatggagtacagtttacatcttcacggaagtttttcacaatttctccaataattctgtaagtggcagaaatttttaggtatgaggaggattggataagaggaagatatcttttcatcagattgaattggaattagaaacatattttgttgcaaacttctatcaataagtagcacctcggatagaacataaaatatagacaaaatttttaacaagttgataataaactaattttcacttcagtcagtacatatacggagacaatattacatgctaatcagtgcacctagacatttaggatatacaggtcaaatgtattccagctcccgtccttaggtttcatataaggacacaaaatacataatcatattctatattgcactgtcagattaatctccttaagcaatgatttagataatgagaagaatttcactggccacctatcctattaagatattcagactccttgggaaagagtatggtttcgaaaaaagtaggtcaggctttcattataggatagacctgggtggagtcctatatatatcactcagccagcttggtttgctcatatataaaattctagctagtgatacctaattcaatcctaatgctgtaagaaataaatgagataataatctacctggatagcatgtaacctgtatctggtatctaatttctttctcctatctgatgttctgggccttccagaaaatagttcttacctccttttcccttgatgtaaatattttatccccacccaactcctacctggccttctaagcagcatttcttgaatatttcatgtgtagtcctatttctgtctttgttcaaatcagttcaaatcatatctcctacctgaaatgcctcctccttttttccccagctttactgaggtataattgacaaataaaaaaatgtatatatgttttattttgtctctccaaagaatttataagtgcatggattgctttgaatcccacagtaagtacagtggcctacacataatagaggtattgctcatatatcttaatactctgtaccatctagcctatacataataatgtccatgatagagtcagtgcagcctggcatagcacaaaagacttcttggaggtgttggaaatccttatgttagaacttaagagagactaggttttagatatttaagtaagggaaggcatttttaaagtgaaaggaataaactgatcataaaataatggggttctttttccttaatttatagccctttgaggaaattttgaattgatttagtcccatataatattaacctcaaagaaaagtgtcagtgtagtctgataaaaataaatgtaagctacatgggaagctgaggcaggaagatggtttgagcctaggagttaagaggctgcagtgagctgtagtcacactgctgtactccagtctgggcaacagagcaagacccgatttattaaataaataagtgaatgaatgcatgcatgcatgtaataacaaaaatattggttattcagatggccctgaatttggattttggctcaacccctttgaagctctgtgacttttggccgttttcttcaaaggctcagttttctcatctgtaaaacattgaggattgcattataatacatgtaaaatgcctgacattcagaagttttaatcacagctatcacacaaaaagccaactgagatgtacctgtatacagtgtccatatttctcaaaatgtatttttgaccaacaggtatgatttcaaatattctgattaaattgcttacttaactgaagaaatagcattaaagccatctatatagcattaggacttttcagtgctttcacattttcttatttgattatttgtcaggtaggtgtgacatggaatgttattccagaatttttttttttttttttttttttttttgagacaagagtcttgctctgctgcccaggccggagtgcagtggcataatcttggctcactgcaacctccgcctcccaggttcaagcgattctcctgcctcagcctccccagtagctgggactacaggcgtgcaccaccgtgcccagctactttttgtatttttagtagagatggggtttcaccatgttgaccaggctggtcttgaacttctcacctcaggtgatccgcctgccttggcctcccaaagtgctgggattacagggtgagccaccatattccagatttttaagtaaagaaacagactcaaatgcattaccttgttgaagatcttgcacctagttggagttcagagctcaggttaaaccctaaactactatcttgtaatacaggtctctttccaatatagctgttggcaaataaatgttgtcacactgagtcccacctgggttttgcataccatcagaggattgcctaagtttttgaaagagtcaagtaattttcatataatctacacacaaaattagttttaattaaaagacaaaaaggggacatatgctaggttatagtcaaaagaacccattataagatttattatttctaacctatcagattatagattcaacctgtaatgatggtgggaaatgaaatgagtttgctaaatgcaagtgatgtcctattttgttcagtaaaggaagtataaatttagtcttcaaatatatgaaaacaggaagaaagaatttcagaattgaggaatatggtttacactagagaaagaattttctgactgtagtttgcaaaataggtggaagattgtagaatttctcaatctagatggttttaaaaatgtataaaattctcttgtgatgttttttgtcatacttggaagtagctcctctcttctaaccatgttacacaagatatttattttcccttatgagaaactaatgtcagtaaaggctattagaatactttccttgcgtactgcaaagacctaaatagaaactaacttcttaattatgaacaaataagatatgatgttttattctttacatcttatctgtattattctgttagtaatcagatgatgtgtctgcaccttgatatgatatacctgtaggtaaaactaaacattctggacttggtgatttatgattttaaaggtgctttttaggcttggggcttgttaaaacaaattctcagttggatatccaaaaacatacatgcatttgattattaaaaagcagctggaatggtacaacagtgtctttcaggttaccggttaaactggttatagagctgctcaactacagtatgaaaatgagaacatcaaaagggcaaccaaatatttatttccttcaaagataggaattgtactaatgcactaaaaccccattttttggagctttacagtagaggttcttaacctgtgagtcacaaaactttttgagaataagatgaatgctttgaatccatatctttttcagaaacatacatggaaatacagaactacacctgtaattacagagggcatatgaaccctagtttgataagccttgctttaaaggatgcagtgtgttctattaaatgtatttaatacaattgcagaaatggaaaatgtggacctccattaaacaaattttttagttcctaatgagataaacttgggaccaaaccgattcctcttgttttagtgctcaaaaatagtttcatttttaggtatttatgctttagtggcctttttttctacctttaaaattgtttaagttccaagtaattttatttttggatgttatatatattcttaacttttatctctacagatattttctggcaagtttctatacgaagtatgatccaactcacttcatcctaaacacagcttctctcctgagtgtactaattcccaaaatgccacaactacatggtgttcggatctttggaattaataagtattgaaatgttttgaaactgaaaaaaaattttacagctactgaatttcttataaggaaggagtggttagtaaactgcactgtttctctgataatgtgaaatgagaagtatttacattggagggccaatggctggtccttcaagtgctgttttgaagtgcagatttccattaaatgatgcctctgtttaatacacctggtacatttctgaagaggggctttataagcaggctgggcaggcccagcttataagttaaagggcatcacagtgagggtgtagtagataaattcaaggaaataagagatttgtaagaaactaggaccagcttaacttataatgaatgggcattgtgttaagaaaagaacatttccagtcattcagctgtggttatttaaagcagacttacatgtaaaccggaatcctctctatacaagtttattaaagattatttttattaccgtacatatttctcttgttttatgtaagcggatgtatatcctcttgttttatacaagccagttcccacttatgagggtacttttttggttttgctggcttaatattgtgtattggtcaatgaggccatttttacatttattacgttacagagttcatggaggttcacctttgtgactgattggtgataaaagatagccaagtgtcttacaagcagcctctgagtcaagtgttctaattttggaacaaagcaggttttactgcttttccagacacaaggctgctaaaccaattaagaaaataattaatttctttcaagcaactaaaaaatatatggtaatttaaaggtgtctgcttatttggttgaacaatttaattgggaaagtttgtcatcatttgaaaaaggaaatataaaaggaacaaccatatagccaacctgtggtctggcagaaacaacgtctctagcaatagtaccaaagtaagtaatggagtcttttttttggcaggtctgcagtaaaagataacattttcttttcttagtcctcctgctctcaacccccatattttgcctttgaatacgtgggttttagtatatatagcccaaaatggtaactgtctccagaacagcaaccacattgaattcttgtgacttaggaaagctt

SEQ ID NO: 23701 - DNA, 2761 bp, Homo Sapiens
gcggttttggggtcccggactctgggatcggcggcgctatgagttctttcgaggggcagatggccgagtatccaactatctccatagaccgcttcgatagggagaacctgagggcccgcgcctacttcctgtcccactgccacaaagatcacatgaaaggattaagagcccctaccttgaaaagaaggttggagtgcagatgaggaaactgaggaaccagagaggttaaattagttgcccagtgtcacacagccagtaagtggcaggaccaggattccagccagcttgaaggtttatctatactgttcacctgtgactaaggagttgttgttaacgagcccgaaatacagattttggaagaaacgaattagcagtcacaacagcagggttgttcctgttgtctctggcattcagcttgaagttactacaggtcagcccggccagcagtcaggaaggaaagctggaagagaagtggaggggaacagagacaaactggaaggcagaatggcccactaggacagaccgaaacccacttctgtctctcacttcctctggcctcaatagtgctggtctcccgctttggctctgaagcacatgcacctgccccaggactcggaggagctgcacacgggcacccagcagaagctgatgttgctgcggccctgccccagactctgagttaagccagaagatatctattgaaatcgagactcctacccagatatctttagtggatgaagcatcaggagagaaggaagagattgttgtgactctcttaccagctggtcactgtccgggatcagttatgtttttatttcagggcaataatggaactgtcctgtacacaggagacttcagattggcgcaaggagaagctgctagaatggagcttctgcactccgggggcagagtcaaagacatccaaagtgtatatttggatactacgttctgtgatccaagattttaccaaattccaagtcgggaggagtgtttaagtggagtcttagagctggtccgaagctggatcactcggagcccgtaccatgttgtgtggctgaactgcaaagcggcttatggctatgaatatttgttcaccaaccttagtgaagaattaggagtccaggttcatgtgaataagctagacatgtttaggaacatgcctgagatccttcatcatctcacaacagaccgcaacactcagatccatgcatgccggcatcccaaggcagaggaatattttcagtggagcaaattaccctgtggaattacttccagaaatagaattccactccacataatcagcattaagccatccaccatgtggtttggagaaaggagcagaaaaacaaatgtaattgtgaggactggagagagttcatacagagcttgtttttcttttcactcctcctacagtgagattaaagatttcttgagctacctctgtcctgtgaacgcatatccaaatgtcattccagttggcacaactatggataaagttgtcgaaatcttaaagcctttatgccggtcttcccaaagtacggagccaaagtataaaccactgggaaaactgaagagagctagaacagttcaccgagactcagaggaggaagatgactatctctttgatgatcctctgccaatacctttaaggcacaaagttccatacccggaaacttttcaccctgaggtattttcaatgactgcagtatcagaaaagcagcctgaaaaactgagacaaaccccaggatgctgcagagcagagtgtatgcagagctctcgtttcacaaactttgtagattgtgaagaatccaacagtgaaagtgaagaagaagtaggaatcccagcttcactgcaaggagatctgggctctgtacttcacctgcaaaaggctgatggggatgtaccccagtgggaagtattctttaaaagaaatgatgaaatcacagatgagagtttggaaaacttcccttcctccacagtggcagggggatctcagtcaccaaagcttttcagtgactctgatggagaatcaactcacatctcctcccagaattcttcccagtcaacacacataacagaacaaggaagtcaaggctgggacagccaatctgatactgttttggtatcttcccaagagagaaacagtggggatattacttccttggacaaagctgactacagaccaacaatcaaagagaatattcctgcctctctcatggaacaaaatgtaatttgcccaaaggatacttactccgatttgaaaagcagagataaagatgtgacaatagttcctagtactggagaaccaactactctaagcagtgagacacatatacccgaggaaaaaagtttgctaaatcttagcacaaatgcagattcccagagctcttctgattttgaagttccctcaactccagaagctgagttacctaaacgagagcatttacaatatttatatgagaagctggcaactggtgagagtatagcagtcaaaaaaagaaaatgctcactcttagatacctaagaattcaaagcgtttcaacctagagcaaccactaaaaaacctgcacagagatgacagtcaatattacaatagagaaaatacagtacttaaaaatgttcaaataacctggttgggtgtggtggctcacacttgtaatcccagcactttgaggtgggcaatggcttgagcccaggagttcgacaccagcctggccaacacagtgaattgtgtctctacttccaaaaaaaaaaaaaaaaa

SEQ ID NO: 23702 - DNA, 2979 bp, Homo Sapiens
ggcggcggagatggcggcgacagcggcggaggctgtggcctctggctctggagagccccgggaggaggctggagccctcggccccgcctgggatgaatcccagttgcgcagttatagcttcccgactaggcccattccgcgtctgagtcagagcgacccccgggcagaggagcttattgagaatgaggagcctgtggtgctgaccgacacaaatcttgtgtatcctgccctgaaatgggaccttgaatacctgcaagagaatattggcaatggagacttctctgtgtacagtgccagcacccacaagttcttgtactatgatgagaagaagatggccaatttccagaactttaagccgaggtccaacagggaagaaatgaaatttcatgagttcgttgagaaactgcaggatatacagcagcgaggaggggaagagaggttgtatctgcagcaaacgctcaatgacactgtgggcaggaagattgtcatggacttcttaggttttaactggaactggattaataagcaacagggaaagcgtggctgggggcagcttacctctaacctgctgctcattggcatggaaggaaatgtgacacctgctcactatgatgagcagcagaacttttttgctcagataaaaggttacaaacgatgcatcttattccctccggatcagttcgagtgcctctacccataccctgttcatcacccatgtgacagacagagccaggtggactttgacaatcccgactacgagaggttccctaatttccaaaatgtggttggttacgaaacagtggttggccctggtgatgttctttacatcccaatgtactggtggcatcacatagagtcattactaaatggggggattaccatcactgtgaacttctggtataagggggctcccacccctaagagaattgaatatcctctcaaagctcatcagaaagtggccataatgagaaacattgagaagatgcttggagaggccttggggaacccacaagaggtggggcccttgttgaacacaatgatcaagggccgatacaactagcctgccaggggtcaaggcctcctgccaggtgactgctatcccgtccacaccgcttcattgatgaggacaggagactccaagcgctagtattgcacgctgcacttaatggactggactcttgccatggcccaggagtcaggtgtttggagcgaggcagggcagttggcactccactcctatttggagggacttcatacccttgcctcttgtgccccagcaccttctctctctgccccccgcctaaagtcctgcattcagtgtgtggagtcccagcttttggttgtcatcatgtctgtgtgtatgttagtctgtcaacttcggaatgtgtgcgtgtgtgtgcatgcacacgcatgtatgtatctgttccctgttccttctgggtcaggctgtcacttccggctctcagccctatctcctgcaacctcagtgcctcagcctgagagagagatgagatgctcttggactccccactgcatctgggctgcagggccagagctagtctgaccattaggtcagtctgcctcctgacagtttttgcgtagtcaagctctaggcggtatgggaatggctaccgggactctaatggggtgaaagagaggggaggcttgcctttgagagcctatatagccttcctgtgagagaggattagatagggttccaactgggcctacaagctcaagccatacataaaaggaccttgggacataagaaccaatgattgtgcataagttctaaattagagacacatatagtttctctctttcagcaccagctcttgcccctatgctgggtaccaagggagttctcctagctgtggcttctctaggttctaggggtgcaagcctctgtgtgtttgtttgtgtgtgtctgtgtgtgcgtatccacactaggggtgcaagcctctgggtgtgtgtgtgtgtgtgcgtgcgtgtgtgtgtgtgtgtccgtgtgtgtgtgtgtgtgtgtccacactggccagcctccctacttaccaaggttctccactgcttaccttttccagtgggacagtacagtgtgagcccccgggaagtactgcctgacctatcctaagcttttacacttggattttagccatcatatgttggccaggtctcactgcagcctgcccgaggctaactggctagagcctccaggccctatgatgctccctgcccaggccatatcctttattcctgctgagcttcctggctgaatagatgaaatggggtcaagcccaggcagctcattcactacctgtgatccacctcagggcacgggcaaacacataggcttgcgtcttaaagccagctcctctgccagaccccgttgtaatgtgccacaacaccctcaatagtcagggcaactggtggagcatggaagtcgaatttccttttctgttaggagctactcctgggaacccctctcagggctgcagcttacaggtgggcagctgtgattgcacaacttgaagggccatcattcacatctattcagtgggagtggggtccctgggattgggcagtgtggtggccctgtgtctcctcacctctgctcctgtcttcatcaccttctctctggaagggaagaggagttggaaggtctctggttttcttttcttttttttttttttgccaaaggtttacttccagcatctgagctctggctctcacccctgaagctcagttatagtgcactgatgaactgagaggatgcgtgtggatgtgtgtgcatgcctgagtgcgttttttggggaggggtgtttatttttagtaccccattctggggttctctgatgcagtgtggatgtgaagatatggtaccttctcaagtgtagctctttcaaatatagtcaatgctgggaaatgtgaaaaaaaaaaaaaaaaaaaaaaaaaaaaaaaaaaaaaaaaaaaaaaaaaaaa

SEQ ID NO: 23703 - DNA, 4439 bp, Homo Sapiens
gacctcgtcgatgccggagtcagagaggaacgtggctacgaaagcctcggagtgaagttcccagaccctacgccccgctgtcaggcagcccgccgatcagatggaggagaacgaggtggagagcagcagcgacgcggcccctgggcctggccggcccgaggagccctctgagagcggcctgggtgtgggcacctcagaagccgtgtccgccgacagcagcgacgccgcggccgccccggggcaggcagaggccgatgactctggcgtggggcaaagctcggaccgcggcagccgttctcaggaggaggtatctgagagcagctcgagcgcagaccccctgcctaatagctacctccctgattcatcgtctgtgtctcatgggccagtggcaggggtgacaggcggtcccccagcacttgtgcactctagtgcactcccagaccccaacatgctggtgtccgactgcacagcttcctcctcggacctgggctcggccatcgacaagatcatcgagtccaccatcgggcccgacctcatccagaactgcatcactgtgaccagtgctgaggatggcggggccgagaccacacggtacctgatcctacagggcccagatgatggagcccccatgacatcaccaatgtccagttccaccttggcccacagcctagcagccattgaggccctggcagatggccccacatccacatccacatgcctggaggcacagggtgggcccagctccccggtgcagctgcccccagcctccggtgccgaagagccggacctgcagagcctggaggccatgatggaggtggtggtggtgcagcagttcaaatgcaagatgtgccagtaccggagcagcaccaaggccacactgctgcgccacatgcgggaacgccacttccgtccagtagcagcagccgcagcagcagctggtaaaaaaggacgtctacggaagtggagcacctccaccaagagccaagaggaagagggaccagaggaggaggacgatgatgacattgtagacgctggagccattgatgacctggaggaggatagcgactataatccagctgaggatgagccccgaggccggcagcttcggctccagcgccccacccccagtaccccaaggccccgaaggagacctggccggccccggaagctgccccgcctggagatctcagacctcccagatggtgtggaaggagagcctctagtgagttcccagagtggacagagccctccagagccacaggatcccgaggctcccagctcctcaggcccaggacacctggtggccatgggcaaggtgagcaggacccctgtggaagctggtgtgagccagtcagatgcagagaacgcagccccctcctgcccggatgagcatgacactctgccccggcgccgaggtcgaccttccaggcgcttcctaggcaagaaataccgcaagtactattacaagtcgcccaaaccacttttgaggcccttcctgtgccgcatctgtggttctcgctttctgtcccacgaggacctgcgcttccacgtcaactcccatgaggctggcgatccccagctcttcaagtgcctgcagtgcagctatcgttcccgccgctggtcctcgctcaaggagcacatgttcaaccacgtgggcagcaagccctacaagtgtgacgagtgcagctacaccagtgtctaccggaaggacgtcattcggcacgccgctgtgcacagccgggaccggaagaagaggccagatccgactccaaagctgagctctttcccctgccctgtgtgtggccgtgtgtaccccatgcagaaaagactcacgcagcacatgaagacgcacagcactgagaagccccacatgtgtgacaagtgtggaaagtcctttaagaagcgctacaccttcaaaatgcacctgctcacgcacatccaggctgttgccaaccgcaggttcaagtgtgagttctgtgagtttgtttgtgaagacaagaaggcactgctgaaccaccagttgtcccacgtcagtgacaagcccttcaaatgcagcttttgtccctaccgcaccttccgagaggacttcttgctgtcccatgtggctgtcaagcacacaggggccaagcccttcgcctgtgagtactgccacttcagcacacggcacaagaagaacctgcgcctgcacgtacggtgccgacacgcaagcagcttcgaggaatgggggaggcgccaccctgaggagcccccctcccgccgtcgccccttcttctctctgcagcagattgaggagctgaagcagcagcacagtgcggcccctggaccacctcccagttccccaggacctcctgagatacccccagaggcgacaactttccagtcatctgaggctccctcattgctctgttctgacaccctgggcggcgccaccatcatctaccagcaaggagctgaggagtcgacagcgatggccacgcagacagccttggatcttctgctgaacatgagtgctcagcgggaactggggggcacagccctgcaggtggctgtggtgaagtcggaagatgtggaagcagggttagcatcccctggtgggcagccctcccctgaaggtgccactccacaggtggtcaccctccacgtggcagagccagggggcggtgcagcagccgagagccagctaggccctcctgacctaccgcagatcaccctggcacctggtccatttggtgggactggctacagtgtcatcacagcaccccctatggaggagggaacatcagctcctggcacaccttacagcgaggagcccgcaggagaggcagcccaggctgtggttgtgagtgacaccctaaaagaagctggcacccactacatcatggctactgatggtacccagttgcaccacattgagctcaccgcagatggctccatctccttcccaagtccagatgctctggcctctggtgccaaatggcccctgctgcagtgtgggggactgcccagagacggccctgagcccccatctccagccaagacccactgcgtaggggactcccagagctctgcctcctcacctcctgcaaccagcaaagccctgggcctggcagtgcccccgtcaccgccatctgcagccactgctgcatcaaagaagttttcctgcaagatctgtgccgaggccttccctggccgagctgagatggagagtcacaagcgggcccacgctgggcctggtgccttcaagtgccccgactgccccttcagtgcccgccagtggcccgaggtccgggcgcacatggcacagcactcaagcctacggccccaccagtgtagccagtgcagctttgcctccaagaacaagaaggacctgcgtcggcacatgctgactcacacaaaggagaagccttttgcatgccacctctgcgggcagcgtttcaaccgtaacgggcacctcaagttccacatccagcggctgcacagtcctgatgggaggaagtcaggaacccctacagcccgggcccctacccagaccccaacccagaccatcatcctgaacagtgatgacgaaacactggccaccctgcacactgcactccagtccagtcacggggtcctgggcccagagcggctacagcaggcactgagccaggaacacatcatcgttgcccaggaacagacagtgaccaatcaggaggaagccgcctacatccaagagatcaccacggcagatggccagaccgtacagcacctggtgacctccgacaaccaggtgcagtatatcatctcccaggatggtgtccagcacctgctcccccaggaatatgttgtggtccctgaaggccatcacatccaggtacaggagggccagatcacacacatccagtatgaacaaggagccccgttccttcaggagtcccagatccagtatgtgcctgtgtccccaggccagcagcttgtcacacaggctcaacttgaggctgcagcacactcagctgtcacagcagtggctgatgctgccatggcccaagcccagggcctgtttggtacagacgagacagtgcccgaacacattcaacagctgcagcaccagggcatcgagtacgacgtcatcaccctggccgatgactgagccccgagggcccaacacagatcatggatttgcggccagctctcctgggggtagggggccaccaggactcacctccctcttcatttaggatctccagatactggatagccagcatcctctcattcccagggagccagacctgtgctgttggggttaggggcagccatgggccccagccaggacatgctgggtgccccagcctgcaggcaggctttgggagagaaatttatttttgtttgggtggacccactggcctgtcagtctcaataaagggaccggagtccagtcctgaacagcttaaaaaaaaaaa

SEQ ID NO: 23704 - DNA, 2979 bp, Homo Sapiens
atgaagacagaaacagtgccaccgttccaggaaactccagctggatcgagctgtcacctcaataacctgttgagtagccggaagctgatggctgtgggggtcttgcttggctggctcctggtcatacaccttctggtcaacgtgtggctgctgtgccttctgtcggcattgctagtggtgctgggaggatggctgggctccagcctcgctggagtggcttcaggtcgactgcatctggaacgcttcatcccgttggccacctgtcctccatgccctgaggcagaaaggcagctggaacgggagatcaaccgcaccatccagatgattattcgagattttgtgttatcttggtaccgttccgtgagccaggagccagcctttgaggaagaaatggaggcagccatgaaagggttggtccaggagcttcggagaaggatgagcgtgatggacagtcatgctgttgcccagagtgttctgactctctgcggttgtcacctgcagagctacattcaggcaaaggaggccactgcagggaagaatggtccagttgagccttcccacctctgggaggcttactgccgggcgactgccccacatcctgctgtgcacagccccagtgctgaagtcacctatacgcgtggcgttgtgaatttgttgcttcaagggctggtgcccaagccccacttggagactcgtaccggacgccatgtagtggtcgaactcatcacatgcaatgtaatcttaccactgatcagcaggctgtcagatcctgactggatccaccttgtactcgtgggtatcttttccaaggccagagatccagcaccctgcccagccagtgcccccgaacagccctcagtgcccacatctctgccactgattgctgaggtagagcagcttccagaagggagagcttctccagtagcagccccagtattcctaagttacagtgagccagagggttctgcaggcccctctccagaggttgaagaaggccacgaagctgtagagggagatttgggtgggatgtgtgaagaaagaaaagtaggaaacaactcatctcatttcctacagccaaatcttcgaggtcccctgttcttatgtgaagactcagagctggagtctccgctgtctgaactgggcaaagaaaccatcatgctcatgactccaggcagctttctctctgacaggattcaggatgccctgtgtgccctagagagttcccaggctctggaacccaaagatggtgaggcatctgaaggagcagaggctgaggagggtccagggacagaaacagagacaggcctgccggtctccacactgaattcctgcccagagatccatattgacacagcagacaaggagatagaacaaggagatgttaccgcctctgttacagctttgctggaggggccagaaaagacctgcccctcacggccgtcatgcttagagaaggatctcaccaatgatgtgagctcccttgatcctactctgccaccagttctgctttcctcctctccacctggtcctctcagctcagccaccttcagctttgagcccctaagcagtcccgatggtccagttatcatccagaaccttcgtatcactggcaccattacagcccgagagcacagtggcactggattccacccatacacactctatactgtgaagtacgagacagcccttgacggtgaaaacagcagcggcctgcagcagctggcctaccacactgtgaatcgtcgctatcgggagttcttgaatctgcagacccgtctggaggagaaaccagatctacgaaagttcatcaaaaatgtgaagggtcctaaaaagctctttccagatcttccatttggaaacatggacagtgacagagtagaagcccgtaagagcctcctagaatcattcctaaagcaactctgtgccattccagagatcgctaacagtgaggaggtgcaggagttccttgctctgaacacagatgctcgtattgcctttgtcaagaaaccatttatggtctctagaatagacaagatggtggtgagtgccattgtggacaccttgaagacagcgtttcctcgctctgaaccccagagccccacagaggagctgagtgaggccgagaccgaaagcaagccccagacagaaggcaagaaggctagcaagtccaggctgaggttctcatccagtaaaatttctccagcactaagtgtgactgaagcacaagacaagattctttattgtctccaggaaggcagtgtggagtctgagactctatccatgtctgcgatggaatcttttattgaaaaacagacaaagttactggaaatgcagccaacaaaagccccagaaaaagatcctgaacaacctcccaaaggacgtgtggacagttgcgtgtcagatgcagccgtgccagcccaagaccccagcaacagcgatccaggaacagagacagagttagctgacacagccctggatctgctcctcttgctactaacagaacagtggaaatggctatgtaccgaaaacatgcaaaagtttcttcgtcttatctttgggaccctagttcaaaggtggctagaggtgcaggtagctaatttaacaagtccacagcgctgggtgcagtacctccggcttcttcaggagtccatctggcctggtggagttttgcctaagtttccacggcccgtaaggacccaagagcagaaactggctgctgagaaacaggctttgcagagcctgatgggagtcctcccagatctcgtagtagaaattcttggggtgaacaaatgccggctgagctggggtctagtcctggagtcactacaacaacccctcatcaacaggcatttgatttactgccttggggacatcatcctggaattcttggatctcagtgcctctgttgaggagtctgctgctaccacctctgcctcagataccccaggcaactctaagaggatgggtgtctcctcttag

SEQ ID NO: 23705 - DNA, 4887 bp, Homo Sapiens
  misc_feature (2870)..(2870): n is a, c, g, or t
  misc_feature (3527)..(3527): n is a, c, g, or t
  misc_feature (3901)..(3901): n is a, c, g, or t
  misc_feature (3978)..(3978): n is a, c, g, or t
cggcgcgttgcggcaggtgccctgggcgtacctgaggcgcggtggcctgagcccggccgccatcgatgaccccggtcgcggacttgcttcaggctggccaccccccgtcttgtttcatcatctgtgttgagtaaccatggggaggaagctggacctgtctggtttgactgatgatgaaacagagcatgttcttcaggtggttcaaagagacttcaatcttcgcaaaaaagaagaagaacgactaagtgagctgaagcagaagctggatgaggaaggcagcaagtgcagcatcctctcgaagcaccagcagtttgtggagcactgctgcatgcgctgctgctcgcccttcaccttcctcgtcaacaccaagcgccagtgtggagattgcaaattcaatgtctgcaagagctgctgctcctaccagaagcacgaaaaggcctgggtctgctgcgtctgccagcaagcgaggcttctgagggcccaatctctggaatggttctacaataatgtgaagagccgcttcaagcgctttggcagtgccaaggttctgaagaacctgtacaggaagcaccggctggagagtggcgcgtgcttcgacattctaggaggaagcctttttgagtcaaacctggagaatgaaggaagcatttctggcagtgattcaacattttataggcagtcagaaggacatagtgtgatggacaccttggctgtggccctacgggtggctgaagaggccattgaggaagcaatttccaaagcagaggcatatggggacagcctggacaagcaaaatgaggccagttacctgcgggaccacaaggaggagctaactgaggaactggccacgacaatcctgcagaagattatacgaaaacagaagagcaaaagtgagcagcaagtggaagaagagccaggatggccacatccccagagttgcagcacaaaggtggcagatgaggggacctcagcatcccctggaggctaccgtgctcccgctgccctctggaggtcccagtctgccttctcaatcactggagaagaagccctgaagacccctccagtggaggctccatcgaggcagccaagggaccaaggccaacacccgagagcagagtctgctctgcccagctggaagagtgtggacaggctggatgaaacaaacctggccccagttttgcagagccccgacgggaactgggtggccctgaaggatggcgctccaccccccacccgactactggccaaacctaagagcgggacgtttcaggccctggaggtggcctccagtgtggcatctgcctacgatgagatgggctccgatagcgaggaagactttgactggagtgaggccttgagcaagctgtgtcccaggtcccgggccctgcccaggaacccccagcctcagcccacacaggcccagagctctgaccaaggccccatagctgcctccccatcctctgcactctcccccaaccctgaggccatgtgctctgactcggagacctcctccgcaggctcttcccgagaagttgggcaccaggccagactgtcctggttgcagaggaaggcccccaggaaccctgcagctgagaagatgcgcttgcatggagagctggacgtgaacttcaacccccagttggccagcagggagacctcggacagcagcgagccggaggaggccccccacaccacagaccggcgggccaggaggtggagaagagcccgattgggctcagaagagccaagcaaagaaccatcttcccccagcgcccagctccgggatctagacacacatcaggtgtcggatgatttatcagagacagacatcagcaatgaggctcgggaaccccagactctcacagacaccacagaggagaaacggagaaacaggctgtacgagttagcaatgaaaatgagtgaaaaggagacttcttcaggggaggatcaggagtctgagcccaagacagaatctgagaaccagaaggaaagtctgtcctctgaagacaacagccagagtgtccaggaagagctgaagaagaagttttctgctgtttctctctgcaacatctccacagaagtcctgaaagtcatcaatgccacagaggagttgatagcaggatctacagggccctgggagtccccacaagtccctcctgacagacagaaggggatgtttcctcgtgggacagaccaagtgagactggatgagcagctgacttccctggaagaaaatgtatacctggcagcaggcactgtgtatggactggagacccagctgactgagctagaagatgccgcccgctgcatccacagtggcactgatgagacccatctggcggatctggaggaccaggtggccacggctgcagcccaagtccaccatgctgaactccagatttcagatattgagagccggatttcagccctgaccattgcaggattaaacatagcaccatgtgtgcgcttcacaagaagacgggatcagaagcaaaggacccaggtacaaaccatagatacatcaaggcagcaaaggaggaaactgcctgctccaccggtgaaagctgaaaaaattgagacatcttcagtgactaccattaaaacatttaaccacaacttcattctccaaggctcctcaacaaacaggactaaggaaaggaaaggcaccaccaaggatttgatggagcctgctctggagtcagctgtgatgtactgacaccatggaattccactgccagtgacccactgcctccggccgtacacgacagtgccttgacccaacagccatcgagtactgtatgtatttccacctgaggagaaggcctggggaggccacagtgcaccattgcacagggctgtcctgatacctnatccagaaagccgtctcagacttcagcactgcggtcttgcccactctctgccttaggctcccaggggaatccaagacagaaaatgaagacactggcttccaacagcagcgctccatgtttaagatacatattttccctgtttgctttgctactgtatgttgactttaagatctttttttaaatacatttgattcagctagtattccatgtcaacaatttgtccaaaggaaaactgctggagggaggtggagggaggaaggtgggaattattatttaatacatcattaatgcttattaatctctcacaagcatctttgtcttgcaaatcctaagggaaaagcaagtccctgcagtgagcactagggacagtctaatttggggattgctcaaccatcaagactgcaggtctcccttcagccacctccttcctgctaaaagcttagcctaccacactaccagtcattcccatcgctttgcaatcacaagccacaggatgagaagttctgactcactcatgccatgcccagggctatctgaaacaatgtctcattaagaatttagggttcttccatgggcttactgacagttgcccagatctgaaggggaaagggtcttgagaaagaccatcactggctcaactttagggcactgttcagngtcaacatgatgtggtttagcagtgatcacatctaaacaaagtttaggtaaatgaattatcgcagagaaaaaccacatgagaaaatttttgtactccaaatttacttcccaataaatattcagcaaagtagtaaaatgaccttaaagataaaaatgattagggaatagccttagaaaatttataggtataaaaaattcaaggacaaactgtgcatttaatggacacaagaattgactctaactccatgtctgtggtttctttgaacccatatcaaatgtatgactatttagagtgtttataagagataatggaactgaactttcactcaattaattgggcattaacaaccttcttttatgtttgttcctgatanagtctgaatcttaggaagaaggtaaaagaaaggaggcaagagaatagttatgatgaatatgtgttaagtgcctgctntgaaggaggcaatgttcttctcatttgaatccttatggcaaccttattcaataggttttcccatatttcagaatttaataactgaaggccagagagattaatttgccaaagccacacctttatgctaattatgattggaatgcatcacaaaagcctaactctgttgttttcaacctctacgttattttgctgctatgtgcatttccagatctgattttctgctaacttgtgtgctatgatccactcctgatgggggtctacattaatcttccagtactccttgctgatgctgtgttatgtgtcatctaacagaaatgactcctttgaaataagtaaatctttggctttttgttctgttggtgtgattcaaagcaaaacaaacaaacaaaaacaaattttaagaacacaacaaaaaagatttgacttccgaatagaatgttttctttaagaggcatgaaaagcaactattgttgtgttacagtgttaaaaatattcagttttctttgacaaaaatgtgtactgtgtaagccttgcaaacaaaaaacaacaaaaaagaagcagcagcagcagcctgctgtgtggcatctgaacttttataaaggtttccttgtgccaaataagtgcaaagatttaatttactattaaaaaccataagcatatgttatagttccagaagaattattttgtcatcaagtgattttgatctttagtgtcaatatttatatttagattaatttttataaatgaaaatattttaatggtttaagaaaatgaggacaacaggataatatctttgatgacttctgaaagttatgcttcccttcatgttatatgcacattgccaagaattactgtcaagagaaatgataagtaaaagtcatttatgaaaataaaaaaaaaaaaaaaaaa

SEQ ID NO: 23706 - DNA, 5406 bp, Homo Sapiens
atgcctgaaaatcctgctacagataaactgcaggtgctgcaggtacttgatcgcctgaaaatgaaattgcaggagaagggtgacacgtcgcagaatgagaagttatctatgttttatgagacactaaagagtcctctcttcaaccagatactcacacttcagcagtccatcaagcaactgaagggtcaactcaaccatataccctcagattgttcagccaactttgatttttctaggaaaggtttgttagtgttcacagatggttccattactaatggaaatgtccacaggccctctaataactcgactgtatctgggttatttccgtggaccccgaagttgggaaatgaagactttaactcagtcatccaacagatggctcagggccggcaaattgaatatatagatatagaacggccttcaactggaggccttggattcagtgtggtggccctcagaagtcaaaatctcggaaaagttgatatcttcgtgaaggatgtccagccagggagtgtagcagacagggatcaaagattaaaggaaaatgatcaaatattggccattaatcacacgccattggatcagaacatttcccatcagcaagcaattgcattattacaacaaaccactggatctttgagactgattgtggccagggaaccagtccacacaaaaagcagtacttctagcagcctaaatgatacaactctgcctgaaacagtttgttggggccatgttgaagaggttgagctcattaatgatggctctggactaggttttggaatagttggaggaaaaacaagtggcgtggttgtgaggactatagttcctggaggattagcagatcgagatggaagactccagacaggggaccacatcttgaagattggtggcacaaacgtgcagggaatgaccagtgagcaagttgcacaagttctaaggaactgtgggaattcagtcaggatgctcgttgctagagatccagctggtgacatttcagtcaccccccctgcccctgcagccttacctgttgccctgcctactgtagccagcaagggccctggttctgacagttctctttttgaaacttataatgttgagcttgtgagaaaagatgggcagagtcttggaattagaattgttggctatgttggaacatctcatacaggggaagcttcagggatttatgtgaaaagtataatacctggcagtgctgcgtaccacaatggccacattcaagtgaatgacaaaatagttgctgtcgatggcgtgaacattcagggttttgccaaccatgatgttgttgaagtattacgaaatgcagggcaggtggtacacctaaccctagttcgaaggaagacatcctcatctacttctccacttgaaccaccttcagacagaggaactgttgtagaaccactgaaaccaccagctctctttctaactggagcagtggaaactgaaactaatgtggatggtgaagatgaggaaattaaagaaagaattgatactttaaaaaatgacaacatacaagccttagaaaaattggaaaaagtcccagactctccagaaaatgagctgaaatccagatgggaaaacctgttgggtcctgattatgaagtaatggttgctactttggacacacagattgcagatgatgctgagttacagaaatattcaaagctgctgcctattcacactctgaggcttggtgtggaagtggattcctttgatgggcaccattatatttcttcaattgtttctggtggtcctgttgatacattgggtctcctacagccagaagatgagctgcttgaggtcaatggcatgcagctttatggaaaatctcgccgagaagcagtctcctttcttaaagaagtgccacccccttttactttggtttgctgtcggaggttgtttgatgatgaagcttctgtagatgaaccaaggcgcactgaaacctctcttcctgagacagaggttgaccacaatatggatgtcaatactgaagaagatgatgatggggaattagcactgtggtcccctgaagtcaagattgttgaactagtaaaagattgtaaaggtttgggattcagcattttggattaccaggaccctttagatcctacaagatcagtgattgtgatccgctccctggtagcagatggtgtagcagaaagaagtgggggactattacctggagaccgcctggtctcagtcaatgaatactgtttggacaacacctcacttgctgaagctgtggaaatattgaaagctgtgccaccaggcctagtacaccttggcatctgtaagcctttggtggaagataatgaagaagaaagttgttatattttacattcaagcagtaatgaagacaagactgaattttcaggaacaattcatgatataaattcatctttaatactcgaagcacccaagggatttagagatgaaccatattttaaagaagaacttgtggatgaaccatttctagatctgggaaagtctttccattcccaacaaaaagagatagagcaaagcaaggaggcctgggagatgcatgaatttctgactcctagattgcaggaaatggatgaagaaagagaaatgcttgttgatgaagaatatgagttatatcaagatccctcaccatccatggagttgtatcccttgtcgcacattcaagaggccactcctgtgccctctgtgaatgaacttcactttggtacacagtggttgcatgataatgaaccatccgagtctcaagaggcaagaaccgggaggactgtctattcccaggaggcacagccgtatggctattgccctgaaaatgtgatgaaagaaaattttgtcatggagtccctaccatctgtaccatcaactgaaggaaacagtcaacaaggcagatttgacgacctggaaaatcttaattcattagcaaaaactagtctggatttaggcatgatcccgaatgatgtccaaggtcctagcttgctcattgaccttcctgttgtggctcaaaggagggagcaagaagatttgcctttatatcaacaccaagcgacacgagttatttccaaggcctcagcatacacaggaatgttgtcttctagatatgccactgatacatgtgagttacctgagagagaagaaggcgaaggagaagaaactccaaattttagccactggggtccaccgagaattgttgagatttttagagaacccaatgtgtctcttgggatcagtattgttggtggacaaactgttataaaacgtctaaagaatggagaggagcttaaaggtatattcatcaaacaagttttagaagacagtccagcagggaagacgaacgcacttaaaactggagataaaatacttgaggtgtctggagtagatttgcagaatgcctcacacagcgaagcagttgaggccattaagaatgcaggaaaccctgtggtgttcattgttcagagtttgtcatccactccacgagtcattcctaatgtacataacaaggccaacaaaatcaccagtaaccagaaccaggacacccaagaaaagaaagaaaagaggcaaggaactgctccaccgccaatgaaacttcctcctccttataaagctctgactgatgacagtgatgaaaatgaagaagaagatgcctttaccgaccaaaaaatcagacaaagatatgcagatctgcctggagaactgcacattattgaacttgaaaaagataagaatggacttggactcagccttgctggtaataaagaccgatcacgcatgagcatatttgtggtgggaattaacccggaaggacctgctgccgcagatggacgaatgcgtattggagatgaactcttagagataaacaatcagattctgtatggaagaagtcaccaaaatgcatctgccattattaagactgccccatcaaaggtcaagctggttttcatcagaaacgaggatgcagtcaatcagatggccgttactccctttccagtgccatcaagttctccatcttctattgaggatcagagcggcaccgaacctattagtagtgaggaagatggcagcgtcgaagttggtattaaacaattgcctgaaagtgaaagcttcaaactggctgtcagccagatgaaacagcaaaaatatccaacaaaagtctccttcagttcacaagagataccattagcaccagcttcatcataccattcaacagatgcagacttcacaggctatggtggtttccaggctcctctgtcagtggaccccgcaacgtgtcccattgtccctggacaggaaatgattatagaaatatccaagggacgttcagggcttggtctcagcattgtgggaggaaaagacacacccttgaatgctatagttatccatgaagtctatgaagaaggggcagcagccagagatggaagactttgggctggtgaccagatattagaggttaatggggttgacctgaggaactccagccacgaagaagccatcacagccctgaggcagaccccccagaaggtgcggctggtggtgtatagagatgaggcacactaccgggatgaggagaacttggagattttccctgtggatctgcagaagaaagctggccggggcctgggcctgagcatcgttgggaaacgaaatggaagcggagtgtttatttctgacatcgtgaaaggcggagccgcagacctggatgggagattgattcagggagatcagatcttatctgtgaatggggaggacatgagaaatgcctcacaggagacagtggccaccatcctcaagtgtgcacagggacttgtgcagctagagattggaagactccgagctggttcctggacctccgcaaggacgacatcacagaacagtcagggtagtcagcagagtgcacacagcagctgtcatccctccttcgctcctgtcatcactggcctgcaaaacctggttggcacaaaaagagtttcagatccttcccagaaaaattcaggcacagatatggaaccaaggactgttgagataaacagggagctcagtgatgcccttggaatcagtattgctggaggaagaggaagtcccataggagatatccccgtatttattgccatgattcaggctagcggagtggccgcacggacacagaagcttaaagttggagatcggattgtcagcattaacgggcaacctttggatgggctgtctcacgcggatgtggttaatctgctgaagaacgcctacgggcgcattatcctgcaggttgtagcagataccaatataagcgccatagcagctcagcttgaaaacatgtctacaggctaccaccttggttcgcccactgctgaacaccatccagaagacacagaggagcagctgcagatgacggccgattaa

SEQ ID NO: 23707 - DNA, 16282 bp, Homo Sapiens
atgcacagtagtagttatagttaccgtagcagtgattctgtgtttagtaacactaccagcactcgaaccagtcttgattcaaatgaaaatcttctcttggttcattgtggtccaacactgatcaactcttgcattagcttcggcagtgaatcctttgatggacacaggttagaaatgttgcaacagattgccaacagagttcagagggacagtgtcatctgtgaagacaaactgattcttgctggaaatgctcttcagtctgattctaaaagattagaatcaggagtgcagtttcagaatgaagcagaaattgctgggtatatacttgaatgtgagaaccttttacgccagcatgtaattgatgtacagattcttattgatggaaaatactaccaggcagatcaattggtacagagggttgcaaaactgcgtgacgaaattatggccttaaggaacgaatgttcttctgtgtacagcaaaggacgcatactgacaacagaacagacaaagctcatgatatcaggaatcactcaaagtttaaactcaggatttgcacagaccttacaccctagtctgacctcagggctgacccagagtttaacaccttccctaacctcttctagtatgacttctggcctgtcatcagggatgacttcccgcctgactccatctgtcactccagcttatacacctggtttcccatcaggattagttccaaatttcagttcaggagtagagccaaattcattgcaaactttgaagttgatgcagatccgaaaaccccttctaaagtcttctttgctggatcaaaatttaacagaagaagaaatcaatatgaaatttgttcaggatcttttgaattgggttgatgagatgcaggtacaactggaccgcactgagtggggctcagatttgccaagtgttgaaagccatttagaaaatcataaaaatgttcatagagctattgaagaatttgaatctagtctcaaagaagctaaaatcagtgagattcaaatgacagcacctcttaaactgacttatgcagaaaagttgcacagattagagagtcagtatgcaaaactcttgaatacatccaggaatcaagaacggcaccttgatacactccataattttgtaagtcgtgcgactaatgaacttatttggttgaatgaaaaagaagaggaggaagttgcttatgactggagtgagagaaacaccaacatagctaggaaaaaagattatcatgctgaattaatgagagaacttgatcaaaaggaagaaaatattaaatcagttcaggagatagcagagcagctacttctagaaaatcatccagcccggttaactattgaggcctacagagcggcaatgcagacgcagtggagctggatcttacagctctgccagtgtgtggagcagcacataaaggagaacacagcgtatttcgagtttttcaatgatgccaaagaagctactgattacttaaggaatctaaaagatgccattcagcggaagtacagctgtgatagatcaagcagcattcacaagctagaagaccttgttcaggaatcaatggaagagaaagaagaacttctgcagtacaaaagcactatagcaaacctaatgggaaaagcaaaaacaataattcaactgaagccaaggaattctgactgtccactcaaaacttctattccgatcaaagctatctgtgactacagacaaattgagataaccatttacaaagacgatgaatgtgttttggcaaataactctcatcgtgctaaatggaaggtcattagtcctactgggaatgaggctatggtcccatctgtgtgcttcaccgttcctccaccaaacaaagaagcggtggaccttgccaacagaattgagcaacagtatcagaatgtcctgactctttggcatgagtctcacataaacatgaagagtgtagtatcctggcattatctcatcaatgaaattgatagaattcgagctagcaatgtggcttcaataaagacaatgctacctggtgaacatcagcaagttctaagtaatctacaatctcgttttgaagattttctggaagatagccaggaatcccaagtcttttcaggctcagatataacacaactggaaaaggaggttaatgtatgtaagcagtattatcaagaacttcttaaatctgcagaaagagaggagcaagaggaatcagtttataatctctacatctctgaagttcgaaacattagacttcggttagagaactgtgaagatcggctgattagacagattcgaactcccctggaaagagatgatttgcatgaaagtgtgttcagaatcacagaacaggagaaactaaagaaagagctggaacgacttaaagatgatttgggaacaatcacaaataagtgtgaggagtttttcagtcaagcagcagcctcttcatcagtccctaccctacgatcagagcttaatgtggtccttcagaacatgaaccaagtctattctatgtcttccacttacatagataagttgaaaactgttaacttggggttaaaaaacactcaagctgcagaagccctcgtaaaactctatgaaactaaactgtgtgaagaagaagcagttatagctgacaagaataatattgagaatctaataagtactttaaagcaatggagatctgaagtagatgaaaagagacaggtattccatgccttagaggatgagttgcagaaagctaaagccatcagtgatgaaatgtttaaaacgtataaagaacgggaccttgattttgactggcacaaagaaaaagcagatcaattagttgaaaggtggcaaaatgttcatgtgcagattgacaacaggttacgggacttagagggcattggcaaatcactgaagtactacagagacacttaccatcctttagatgattggatccagcaggttgaaactactcagagaaagattcaggaaaatcagcctgaaaatagtaaaaccctagccacacagttgaatcaacagaagatgctggtgtccgaaatagaaatgaaacagagcaaaatggacgagtgtcaaaaatatgcagaacagtactcagctacagtggaggactatgaattacaaacaatgacctaccgggccatggtagattcacaacaaaaatctccagtgaaacgccgaagaatgcagagttcagcagatctcattattcaagagttcatggacctaaggactcgatatactgccctggtcactctcatgacacaatatattaaatttgctggtgattcattgaagaggctggaagaggaggagaagtcactggaagaagaaaagaaagaacatgttgaaaaagccaaagaattgcaaaaatgggtatcaaatatcagcaagacattgaaagatgcagagaaggctggaaaacctcccttctctaagcaaaagatttccagtgaggaaatatcaaccaagaaggaacaattatcggaagcacttcaaactatacagctttttttggcaaaacatggagacaaaatgacagatgaagaaagaaatgaattggaaaaacaagtgaaaactcttcaggaaagttataatttattattcagtgaatctctgaaacagctacaagaatcacaaacctcaggagatgtaaaggtagaggagaagattgtagcagagcgtcagcaggagtataaagagaaactccaagggatatgtgatcttcttacccaaactgaaaaccgcctaattggtcaccaagaagccttcatgattggagatggcacagttgagttaaagaaatatcagtccaagcaagaggaattacagaaagatatgcaaggaagtgcacaggcattggctgaagtagtgaaaaacacagagaacttcttaaaagagaatggtgaaaagctgtcacaggaagataaggctttgattgaacagaaacttaatgaagctaagataaagtgtgaacagcttaatttaaaagcagaacagtctaaaaaggagctggataaagttgtgacaacagcaatcaaggaagaaactgaaaaggtagcagcagtgaagcagctggaagagagcaaaaccaaaatagaaaaccttttggactggttgtcaaatgttgacaaagactcagaaagggcagggacaaaacacaaacaggtaatcgaacagaacgggacccattttcaagaaggtgatggcaagtcagcaattggagaagaggatgaagttaatggtaacctgttggagactgatgttgatgggcaagttggaaccactcaggagaatctgaatcagcaatatcagaaagttaaggcccaacacgagaagatcatctctcagcaccaagcagtgatcatagccactcagtctgcacaagtgttgcttgagaaacagggtcagtatctctctcctgaagaaaaagagaaactgcaaaagaacatgaaggaactgaaagtgcattatgaaactgcactggctgagtcagagaagaaaatgaagttaactcactctctgcaggaagaattagaaaagtttgatgctgactataccgagtttgagcactggctacagcagtcagaacaagaacttgaaaacctggaggcaggtgcagatgacatcaatggtttaatgaccaaattgaagaggcagaagagtttctcagaagacgttatttctcacaaaggtgacttgagatacatcacaatttctggaaacagagtgttggaagctgccaaatcttgcagcaagagagacggtggcaaggttgatacttctgcaacccacagagaagtgcagcgcaagttggatcatgctactgatcggttcaggtctctctactctaagtgcaatgttcttggaaataatcttaaagatctggtggataaatatcaacactatgaagatgcttcatgtggacttcttgctggactccaggcctgtgaggccacagcgagcaaacacttatctgaacctattgcggtggaccccaaaaatcttcaaaggcaattagaagagaccaaggctttgcaaggacagatatcaagtcagcaggttgctgtagagaaactgaagaaaacggctgaagtgcttttagatgccaggggatctttacttccagccaagaatgatatccagaaaacacttgatgacattgttgggagatatgaggatctgtccaagtctgttaatgaacgaaatgaaaaactccagataaccttgacccgttcactgagtgtgcaggatggcttggatgaaatgctggactggatgggaaatgtggaaagttctctgaaagaacaaggtcaagtgcctttaaactctactgctcttcaggatattatcagtaaaaacattatgttggaacaggatattgcaggtcgtcagagcagtataaatgccatgaatgaaaaagtgaagaaatttatggaaacaacagatccatccactgcatcctcactgcaagccaaaatgaaagacttgtctgctcggttttcagaagcaagtcataaacacaaagaaactcttgccaaaatggaggagctaaaaaccaaagtagaactgtttgagaacctctcagaaaagctccagacatttttagaaacaaaaactcaggctcttactgaagtagatgtgccaggaaaagatgttactgaattgtctcagtatatgcaggaatcaacttctgaatttttagaacacaagaaacatcttgaagttttgcatagtctcttgaaggagatatccagccatggcttaccaagtgataaggctttggtccttgaaaaaacaaataatttgtcaaagaaattcaaggaaatggaggataccatcaaagaaaaaaaagaagctgtaacttcttgtcaagaacagttggatgctttccaagttcttgttaaatcattgaagtcatggataaaagaaacaacaaaaaaagttcccattgtacagccttcttttggtgcagaggatttaggaaaatctttggaagacactaagaaattacaagaaaagtggagtttaaaaacaccagagattcagaaagtaaacaacagtgggatctcactatgtaacttaataagtgctgtgaccacccctgcaaaggcaatagcagcagttaaatcaggtggagcagtattaaatggtgaaggaacagccacaaatactgaggaattttgggcaaataaaggtttaacatccattaaaaaggacatgactgacataagtcatggttatgaagatcttggcctcttactcaaggacaaaatagcggaactgaacactaaactctccaaattgcaaaaggctcaggaagaatcaagtgcaatgatgcagtggttacagaaaatgaacaaaactgcaacaaaatggcagcagacacctgcacctacagatactgaagctgtgaagactcaagttgagcagaataagtcgtttgaggcagaactgaagcagaatgtaaacaaagtacaggagttgaaagacaaattgacagagctgttggaggagaacccagatactcctgaggcccccagatggaaacagatgttgacagaaatagattctaagtggcaagaactcaatcaattaacaattgatagacaacaaaaactggaagaatcctccaataatctaacccagttccagactgtagaggcccaattgaaacagtggcttgtggaaaaagaacttatggtcagtgttcttgggcccttgtcaattgacccaaatatgctaaacacacaaaggcagcaggtgcagattttgctgcaagaattcgccactcggaaacctcaatatgaacagctgacagcagctggtcagggcattctgagcaggcctggagaagacccttctttacgtgggattgtgaaagagcaactggcagctgtgacccaaaaatgggatagcctaacagggcaattgagtgacagatgtgactggattgaccaagccattgttaaaagcacacagtatcaaagcctgctgagaagcctttctgataaactgagtgacttggataataaactcagcagcagtctggctgtgagcacgcaccctgatgctatgaaccaacagttggaaacagcccaaaaaatgaagcaggagatacagcaggaaaagaagcagataaaagtggcccaggcactctgtgaggatttgtcagcactggttaaagaagagtacttgaaagcagaacttagtaggcaactagaaggcatcttaaaatcatttaaggatgttgaacagaaagcagagaatcatgtccagcaccttcagtcggcctgtgcaagctctcatcaatttcagcaaatgtctagagattttcaggcttggctggatacaaagaaagaagagcaaaacaaatctcatccaatatctgccaaactcgatgtcttggagtcattaattaaagatcataaagactttagtaaaactttgaccgctcagtctcatatgtatgaaaaaaccattgcagaaggtgaaaatctgttattaaaaacacaagggtctgagaaggcagccttacagttacagcttaatacaattaaaaccaattgggatacatttaataagcaggtgaaagaaagagaaaacaagttaaaagagtcattggaaaaagcccttaagtataaagagcaagtagagactctctggccatggatagacaaatgccaaaacaacctggaggaaataaaattttgcttggatcctgctgaaggagagaattctattgccaagttaaagtctctgcagaaggaaatggaccaacactttggtatggtagaattactgaacaacacagccaatagcttgctcagtgtctgtgagatagataaaggagttgttacagatgagaataagtcactgatccagaaggtggacatggtcactgaacaacttcacagtaagaaattctgtctggagaacatgactcagaagtttaaagaatttcaagaagtttccaaagaatctaaaaggcagcttcagtgtgcaaaggagcagctagatatccatgattcgctgggatcccaggcttacagtaacaaatacctgaccatgttgcaaactcagcagaaatcacttcaggccttgaagcatcaggtagatttggctaaaagacttgcacaggaccttgtggtagaggcctcagactcaaagggaacctctgatgttttattacaagtggaaaccatagctcaagagcatagtacactaagtcagcaggttgatgaaaagtgttctttcttagaaaccaagcttcagggcattgggcatttccggaataccattcgagaaatgttttctcagttcgcagagtttgatgatgaactggatagcatggctccagtggggagagatgcagaaacattgcaaaagcaaaaggaaactataaaagcctttctaaagaaactagaagccctcatggcaagcaatgacaatgccaataaaacctgcaagatgatgttagccacagaagaaacctctcctgaccttgttggaatcaaaagggacttggaggccttaagcaaacaatgcaacaagttactggaccgagcccaagccagagaagagcaggttgaagggacaattaaacgccttgaagaattttacagcaaattgaaagaattttctattctgctccagagagccgaagaacatgaagagtcacaaggtcctgttggtatggaaacggagacaattaatcagcagcttaacatgttcaaggtattccagaaagaagagattgaacccttgcaaggtaaacagcaagatgtaaactggttaggtcaaggccttattcagagtgctgccaaaagcactagcactcagggcttggagcatgacctggatgatgtcaatgcacggtggaagactctcaataagaaggtggctcagcgagcagcccagctgcaggaggccttgctgcactgtgggaggttccaggatgccctggagtccctgctcagctggatggtggacactgaggagcttgtggccaatcagaagcccccgtcggctgagttcaaagtggtaaaggcccagatacaagaacaaaagcttctccagagattgttggatgaccgaaaatctacggtggaggtaatcaaacgagaaggagaaaaaattgctacaacagcagagcccgcagataaagtgaagattttgaaacagctcagtctcttggatagcagatgggaggcattgcttaataaagctgaaacaaggaatcgtcagttggaaggtatctcggtggtagcacagcaatttcatgaaaccttagaaccactgaacgagtggcttacaaccatagaaaagaggctggtgaattgtgagcccataggaacccaagcatctaaacttgaggaacaaattgcacagcacaaagccttagaagatgacatcatcaatcacaataaacatttacaccaggctgttagcattggccagtccttaaaggttttgagctccagggaggataaagatatggtgcagagtaaattagacttctctcaagtatggtacattgagattcaagagaaaagtcacagcaggtctgagctcctccagcaggccttatgtaatgctaagatttttggggaagatgaagttgaactgatgaactggctgaatgaagtgcatgacaaactgagcaagctctcagtccaggattacagcactgaggggctatggaagcagcagtctgaacttcgggttctgcaagaggacatcttactcaggaaacaaaatgtagatcaggctttactaaatggtttagaactacttaaacaaaccacaggtgatgaagttttaataattcaagataaattggaagccattaaagcaaggtacaaagacattactaaactgagcactgatgtggccaagactctggaacaggcgctgcagcttgcaaggcggctgcactccacacacgaagaactgtgtacctggctggacaaagtggaggtggaattactttcatatgaaactcaggttctgaaaggagaagaagcaagtcaagcacaaatgagaccaaaggaactgaaaaaggaagctaagaacaacaaagccttactggactcccttaatgaagtgagcagtgctttgctggaactggtaccatggagggcaagagaaggacttgagaaaatggtagctgaggacaatgagcgctaccgattagtgagcgacaccatcactcagaaggtggaggaggtcgatgcagccattctgcgatcacagcagtttgaccaagcagctgatgctgagttatcctggattactgagacagaaaaaaaattgatgtctctgggtgacatcaggcttgagcaagaccagacttctgctcagcttcaagttcaaaagacattcaccatggagattttgagacacagggatattattgatgaccttgttaaatctgggcataaaatcatgaccgcatgcagtgaagaggaaaagcaatcaatgaagaaaaaactggacaaggtactgaagaactatgataccatctgccagattaattcagaaaggtatctgcagctggaacgggcacagtccctggttaaccaattctgggaaacatatgaagaactttggccatggctgacagaaacacaatcaatcatctctcagcttcccgccccagcccttgaatatgaaactctaaggcagcagcaggaagaacatcggcaactgcgtgagtcgatagctgaacacaagcctcatatagataagatgaacaaaactgggccacagttactggaattgagccctggggaaggcttttctatccaagagaagtatgtggcagccgacaccctttacagtcaaattaaagaagatgtcaaaaagcgtgctgtggcactggatgaagccatttctcaatcaactcagttccatgacaagatagatcagatccttgagagcctggaacgcatcgtggaacgtctgaggcagccaccctctatctctgcagaggttgagaagatcaaggaacagatcagtgaaaataagaatgtgtcagtagacatggaaaagctacagccgttgtatgaaactcttaaacagaggggagaggaaatgattgctagatctggggggactgataaagacatatctgccaaagctgttcaggataagcttgaccaaatggttttcatttgggagaacatacacacactggtggaagagagggaagccaaactactggatgtgatggagctagcagaaaagttctggtgtgatcacatgtcattgatagttaccattaaagatactcaagatttcatccgggacctggaaggtcctggaattgatccttcagtagtaaaacaacagcaagaagcagcagagaccataagggaagaaatagatggactacaggaggagctggatatagttattaacctaggttctgaactcattgcggcatgtggggagcctgataaacccattgtcaagaagagtatagatgagttaaattcagcatgggattctctaaataaagcttggaaagaccggattgacaaacttgaggaggcaatgcaggctgccgttcagtaccaggatggactgcaggcggtatttgactgggtagatattgcaggtggtaaattagcttcaatgtctccaattggaacagatctcgaaactgtcaagcagcagattgaagagctaaagcaatttaagtctgaggcctatcaacagcagatagaaatggaaagactgaatcatcaagcagagcttttgctaaagaaagtaacagaagagagtgacaaacacactgttcaagacccattaatggaactgaaattgatatgggatagcctggaggagagaatcatcaacagacagcataaactggagggtgctctattagccttgggtcagttccaacatgccctggatgagctcctggcatggctgacacacaccgagggcttgctaagtgagcagaaacctgttggaggagaccctaaagccattgaaattgaacttgccaagcatcatgtgctccaaaatgatgtattagcccatcagtccacagtggaagccgttaataaaggaggaaatgatctaattgaatcaagtgcaggagaagaagcaagcaaccttcagaacaagctagaggttttaaatcaacgctggcaaaatgttttggaaaaaacagaacaaaggaagcagcagctggatggtgccttgcgccaggccaaagggttccatggcgaaattgaggatttgcagcagtggctgactgacacggagcgtcatctgttggcatctaaaccgctgggaggtttaccggaaacagccaaggagcagcttaatgtccatatggaagtctgtgctgcctttgaagctaaagaagaaacatataagagtctgatgcagaaaggccagcagatgcttgcaagatgcccaaaatctgcagagacaaatattgaccaagacataaataacttgaaagaaaaatgggaatcggtggaaaccaaactcaatgaaaggaaaactaaactggaagaggctctcaacttggcaatggagttccacaattctctccaagacttcatcaactggcttactcaggctgaacagaccctaaatgtagcttctcggccaagtctcatcttggacacagtcttatttcaaattgacgaacacaaggtttttgccaatgaagtaaattctcatcgtgagcagataatagagctggacaaaactggaacccacctaaaatattttagtcagaaacaagatgttgttctaatcaagaatctacttatcagtgtacaaagtcgatgggaaaaagtggttcaacggttggtagagagaggaagatctttggatgatgcaaggaagagagccaagcagttccatgaagcttggagtaaacttatggagtggctagaagagtcagaaaagtctttggattctgaactggaaatcgcaaatgatccagacaaaataaaaacacaacttgcacaacataaggagtttcagaaatcactcggagccaagcattctgtctacgacaccaccaacaggactggacgttctctgaaggagaaaacctccctggctgatgacaacctgaaactggatgacatgctgagtgaactcagagacaaatgggataccatatgtggaaaatctgtggaaagacaaaacaaattggaggaagccctgttattttctggacaattcacagatgccctacaggctctcattgattggttatatagagttgaaccccagctggcagaagaccagcctgttcatggagacattgatttggtgatgaatctgatcgataatcacaaggccttccaaaaagagttggggaagaggaccagcagtgtgcaggccctgaagcgctcagcccgagaactcatagraggcagtcgggatgactcctcctgggtcaaggtccagatgcaggaattaagcacacgctgggagaccgtgtgtgcactttctatatcaaagcaaacacggttagaagcagccctgcgtcaggcagaggaattccactcggtggtacatgccctcttggagtggctggctgaggcggagcaaaccctgcgtttccatggtgtcctcccagatgatgaggatgctctccggactctcattgatcagcataaagaattcatgaagaaactggaagaaaagagagctgaactaaataaagccaccactatgggcgacaccgttttggctatctgccaccccgactccatcactaccattaagcactggataacaatcatccgggcgaggtttgaggaggtgctggcctgggcaaagcaacatcagcagagattagcaagtgctctggctgggcttattgccaaacaggaattgttggaagctttgctggcttggttgcaatgggctgaaactacacttactgataaggataaagaagtcatcccccaggagatcgaagaggtgaaagcactcattgcagaacaccagaccttcatggaggaaatgaccagaaaacagcctgatgttgataaagtaacgaagacctataagaggagagctgctgatccttcctcattacaatcccatattccagtcttggataagggacgagcaggaagaaaacgctttccagcatcaagcttgtatccctctgggtcacagacacaaattgaaaccaaaaatcctagggtaaacttactggtgagcaaatggcagcaagtctggctcctggcgttggaaagaaggaggaaactcaatgatgccttggacagactagaggagctgagggaatttgctaactttgattttgatatttggcgcaaaaaatacatgcgatggatgaatcacaagaaatctcgagtgatggacttcttcaggagaattgataaagaccaggatgggaaaataacgcggcaggaatttattgatggaattctttcctcaaagtttccaaccagtcgcttggagatgagcgcagttgcagacatctttgacagagatggcgatggatatattgactactatgaatttgtagcagcccttcacccaaataaagatgcatataaacctatcacagatgccgacaaaatcgaagatgaggtgacaaggcaggtagctaagtgtaaatgtgcaaagcgatttcaagttgagcagattggtgataataaatacaggttcttcctgggaaatcagtttggagactcccagcaactgcgactggtccggatcctgcggagtactgtgatggttcgtgttggaggtggatggatggcacttgatgagttcttagtgaaaaatgatccttgcagggccaaaggaaggacaaacatggaactgcgtgagaagttcattttagcagatggtgccagccagggtatggctgctttccgaccccgaggccgaagatcccggccatcatcacgaggcgcttcacccaacagatccacttctgtgtccagtcaggctgcgcaggcggcctccccacaggtccctgccaccaccacacccaagattctccatcctttaacacgcaattatggtaaaccatggttgacaaacagcaaaatgtcaactccttgtaaagcagcagagtgctcagactttcccgtgccatctgcagagggaacgccaatacaaggaagcaagcttcgacttccaggatatttatcagggaaaggcttccactctggggaggacagtggcttgataacaactgcagctgccagagtccgaacacagtttgctgattccaagaagactcccagccgaccaggaagtcgagctggaagcaaagctggcagcagggccagcagccgccgaggcagtgatgcatcagactttgacatttcagaaatccagtccgtgtgctcagatgtggaaactgtcccccagacacacagacctacaccccgagcaggttctcggccatccacagcgaagccttcaaaaatccccacgccccagaggaaatcacctgccagcaaattggacaagtcctcaaagagatagtgcaattggttctaccaaggcccttccttgagcatttattatttaagtttgaacgatgtaaaatatggtgtagaaattcttgtgaaatattgcaagaggcgagtttaaaattctgcagatggccttatttgtgtatttgtctttttattttatctgtataattttttttgtcagatattctggggttaaagtcacatcatatgtgaggaggaaaagtttaacatgaactaacatttctgcactgtaacgtgccgggcacacactaaactcagttactgtacctacaggtaagtctacatcctctctgacagccacagcactacatcaatccctgacgttagggatacctcatgacattttcctgtttttatggaaactctgagaagctgaatgatacatgcaggggatattttttgagatgatttaaatgtaaaccaaaagatggaagacaaaaagacaaacacacccacacgcagtctttgcagtatctgacagagaactcacaggaagttacttcaagcacttgccagtactatgatattcaagtaccttgcagcatttctctgccattgctttcaatgaggccagaggcatcctggatattagacctattatactgtaagaatataagtataaagtgcgttcatatacatgtgaggttttcttttgcttgagtggacagtagcacctgtatcattgaactcattttgtatcagagcaattttgcttgcagaaagctatgaaataaaacacgtcccttaactgc

SEQ ID NO: 23708 - DNA, 873 bp, Homo Sapiens
cctcccaaggctccatgccagacaaagcatgcgtgtcacacttgctacaatagcctggatggtttcttttgtctccaattattcacacacagcaaatattttgccagatatcgaaaatgaagatttcatcaaagactgcgttcgaatccataacaagttccgatcagaggtgaaaccaacagccagtgatatgctatacatgacttgggacccagcactagcccaaattgcaaaagcatgggccagcaattgccagttttcacataatacacggctgaagccaccccacaagctgcacccaaacttcacttcactgggagagaacatctggactgggtctgtgcccattttttctgtgtcttccgccatcacaaactggtatgacgaaatccaggactatgacttcaagactcggatatgcaaaaaagtctgtggccactacactcaggttgtttgggcagatagttacaaagttggctgcgcagttcaattttgccctaaagtttctggctttgacgctctttccaatggagcacattttatatgcaactacggaccaggagggaattacccaacttggccatataagagaggagccacctgcagtgcctgccccaataatgacaagtgtttggacaatctctgtgttaaccgacagcgagaccaagtgaaacgttactactctgttgtatatccaggctggcccatatatccacgtaacagatacacttctctctttctcattgttaattcagtaattctaatactgtctgttataattaccattttggtacagcacaagtaccctaatttagttcttttggactaatacaattcaggaaagaaaaaacccaaaaaccaacctcattcaca

SEQ ID NO: 23709 - DNA, 1927 bp, Homo Sapiens
gtccttcctgtggtgcagcttcgggtctcggagtttggcccctactctgaccccaccccagctccgctccgccttgggttccggcagaacccgccttgcggtagccatggcagcaggctccgaggcgaccactcctgtgatcgttgcggctggggctggaggggaggaaggtgaacatgtcaaaccttttaagccagagaaagcaaaagaaattatcatgtctttacaacaacctgcaatcttctgtaacatggtgtttgattggccagcacgacactggaatgctaaatacctttcgcaggtccttcatggcaagcagatacgattcagaatggggatgaaaagcatgagcacagttcctcagtttgaaactacatgtaattacgtagaagctacactcgaagagtttctgacctggaactgtgaccagtctagtatttctggaccatttagagattatgaccattccaagttctgggcttatgctgactataaatattttgtcagtctatttgaagacaagacagatcttttccaggatgtgaaatggtctgacttcgggtttcctggaagaaatggacaggaaagtacattgtggattggctccttgggagcccacacaccctgtcatctggactcctatggttgtaacttggtattccaggtacaaggaaggaaacgatggcatctctttcctcctgaagatactcctttcctttatccaactagaatcccttatgaagaatctagtgtgttcagtaaaatcaatgttgtcaatcctgatttaaagcgttttcctcagttccggaaagctcaaagacatgcggttacactgagcccaggacaggttctctttgttcccagacactggtggcattacgtagaatccattgatcctgtcactgtcagtataaactcatggattgaactggaagaggatcacctagcccgggtagaagaggcaatcacccgtatgcttgtgtgtgccctgaaaactgcagagaatccacaaaataccagagcctggttaaaccccactgaggttgaggaaacgtcccatgcagccaactgttgctacttaaatgcagctgtttctgcattttttgatcgctgcagaacatctgaggtagtagaaatccaagcactgagaacagatggagagcacatgaaaaaggaagaattaaatgtgtgcaaccacatggaggtgggccaaacaggtagccagaacttgaccacaggaacagacaaaccggaggcagcaagtccctttggccctgatctggtccctgtagcacagaggtccgaagaaccgccttcagaaagaggaggcatatttggaagtgatgggaaagactttgtggacaaggatggagaacactttggaaaattgcattgtgccaagagacaacaaataatgagcaacagtgaaaatgcaattgaggaacagattgcctcaaatactactacgactcctcaaacattcatttctacggatgacttgctggactgcttggtgaatccacaagtaaccaggatagtggcacaacttttgatacaaggaagaagtttatgattcaagtggaagatgacttttaaaataatattttttaaatatatatttttaagtagtatgactaaaataaagatgaaccagcaaaaggtcagtttgcacatttgtaaatgtatttatccttaccgaattacatgtcagtctgttgccaccttctttcatgcacattcctctttggccaaactggctgctctttgtttgtaagcttttgttcctctctcatcccatacttttagcctgtgtcaaatgtaagtcccaagtatttccagcaggaagtaatgtcttcctcagcctcaaccagggaccaaccggctgcttacttttgcaaataaaattttactacaaaaaaaaaaaaaa

SEQ ID NO: 23710 - DNA, 4389 bp, Homo Sapiens
atgtccaaagtgatccagaagaagaaccactggactagcagggttcacgaatgcaccgtgaagcggggaccccagggcgagctgggggtgacggtgctgggaggcgcggagcacggggagtttccgtacgtcggagcggtggcggcggtcgaggcagcggggcttcccggcggcggcgagggcccgaggctgggcgaaggggagctgcttctggaggtgcagggggtccgggtgtccggcttgccccgctatgacgtgctgggggtcatcgacagctgcaaggaggccgtcaccttcaaggccgtcagacaaggaggaaggctgaacaaggacctgcgacattttctcaatcagcgattccagaaggggtttcctgatcatgagctccagcagaccataagggataacctttaccgccatgctgtgccttgcacaacccgatctcccagagaaggagaagtgcctggcgtggactataactttctgactgtgaaggagttcttggacctcgagcagagtgggactcttctggaagtcggcacctatgaaggaaactattatgggacacccaagcctcctagccagccagtcagtgggaaagtgatcacgacggatgccttgcacagccttcagtctggctctaagcagtcgaccccgaagcgaaccaagtcctacaatgatatgcaaaatgctggcatagtccacgcggagaatgaggaggaggatgacgttcctgaaatgaacagcagctttacagccgattctggtgaacaagaggagcacactctccaagaaacagcattaccacctgtgaatagtagcatcatcgctgctcccatcacggacccttctcagaagttccctcaatacctacctctttctgcagaggataatttaggtcctctacctgaaaactgggagatggcctatactgaaaatggagaagtctattttatagaccataacacgaaaacaacatcttggttagaccctcggtgcctaaacaagcagcagaagccactggaagagtgtgaagatgatgaaggggtacacaccgaggagctggacagtgaactagaactgcctgctggttgggaaaagattgaagaccctgtctatggtatctactatgtagaccacatcaacaggaagacacaatatgagaacccggttctagaagccaaacggaagaagcagcttgagcagcagcagcagcagcaacagcagcagcaacagcagcagcagcagcagcagcagcagcagacagaagaatggacagaagatcactcagcccttgtgcctcctgttattccaaaccaccctccaagcaatccagagccagccagagaagttccacttcagggcaaacccttttttacacgaaacccttctgagttgaaaggcaagttcattcacacaaagctgcggaaaagcagtcgtggctttggcttcacggtggttggaggggatgaacctgatgagtttctccagatcaagagcttggtcctagatggtcctgctgcattggatggcaagatggaaacaggggatgtgattgtaagtgtgaatgacacctgtgttttgggacacacacatgctcaagttgtgaagatcttccagtccatccccattggtgccagcgtggaccttgaactctgccgaggttatccattgccttttgatccagatgaccccaatacaagtttagtgacctcggtagccattttggataaagaaccaattattgtgaatgggcaagagacctatgattcaccagctagccacagtagtaaaacaggcaaagtcaatggcatgaaggatgccaggccaagcagcccagcggacgtggcttcaaatagttctcatggttatcctaatgacactgtttctttggcttcctccatagccactcagccagaactcataactgttcatattgtcaaagggccaatgggctttggttttactatcgcagacagtcctggtgggggtggccaaagagtgaaacagattgttgacagcccaaggtgccgaggcctgaaagaaggggatctcatagtggaagttaataagaagaacgtgcaggccctaactcacaaccaagtggtggatatgctggttgagtgtcctaagggaagtgaggtcacattgttggtgcaacgaggagggctgccagttcccaagaagagcccaaagtcgcaaccactggaaaggaaagacagccagaatagttctcagcacagtgtttccagccaccgaagcctgcacacagcatccccaagccacagcacacaggtgctccccgagttcccacctgcagaggcccaagctccagatcaaactgacagctctggccagaaaaaaccagatccttttaaaatctgggcccagtccaggagcatgtatgaaaaccgacttccagattaccaggaacaggacatcttcctctggagaaaagagactggatttggatttaggattctgggtggaaatgaaccaggggaacctatttatattggtcacatcgtaccactgggtgctgctgatactgacggccgcctgaggtctggagatgaattaatctgtgtggatgggacgccagtaattggaaaatcacaccagcttgtggtccagcttatgcaacaagctgccaagcaaggccacgtcaatctcacggtgcggcgtaaagtggtttttgcggtgcccaaaaccgagaacgaggtgccctcgccagcctcctctcatcacagtagcaaccagccggcctcgctgacagaagagaagcgcactccgcagggcagccagaactcgctgaacacggtgagctcgggcagcggcagcaccagcggcatcggcagtggcggcggcgggggcagcggcgtggtcagcaccgtggtgcagccctacgacgtggagatccggcgcggggagaacgagggcttcggcttcgtcatcgtgtcctcggtgagcaggcccgaagcaggcacgacctttggcaatgcatgtgtggctatgcctcacaaaataggtcggattattgaggggagccctgctgaccgctgtggcaagctgaaagtaggagaccggatcttggcagtaaatggatgttccatcaccaacaaatcccattcagacattgtgaacctaatcaaggaagcgggaaacacagttaccctccgcatcattcctggggatgagtcctcgaatgccaccttgctgaccaatgcagagaagattgccaccatcaccaccacacacaccccttctcagcaagggacccaggagacaaggaataccaccaaaccaaagcaggaatctcaatttgagttcaaagcaccccaagcaacacaggagcaagatttttacactgtggaactggaaagaggagccaagggatttggctttagccttcgaggaggccgagagtataacatggacctctatgttctgcgcttagcagaggacggtcctgcggagaggtgtggaaagatgaggattggtgatgaaattttagagatcaatggtgagaccaccaaaaacatgaagcattctcgagctatagaactgattaagaatggtggccgcagagttcgtctgtttctgaagcggggagacggctcagtaccagaatatgaccccagcagcgaccgccacggccccgccaccggtccacaaggtgttccggaagtgagggccgggcccgaccgccggcagcatccgtcattggagtccagttacccacccgatcttcacaaatcatcaccacatggggaaaagcgggcacacgcaagagatccgaaaggcagcagagagtatagcagacaacccaatgaacaccacacctggaatgggacttcgaggaaacccgacagcggggcatgccgacccaaggaccgggcgccggagggacggagggacgcgcaggccgagcgcgcggcagccgccaacggccccaagaggcggtccccagagaagcggagggagggcacccgcagcgccgacaacactttggagaggagggagaagcacgagaagagacgagacgtctctccggagcggaggcgagagcggtcacccacccgcaggagagacggctcccccagccggcggagacggtctctggagagactcctggagcagaggaggtcccccgagcgcaggagagggggctcgcccgagcgcagggccaagtccaccgaccggaggcgcgcacgctcccccgagcgcaggagagagcggtccctggacaaaaggaacagagaggacagagccagccaccgagaaagggaagaggcgaatctgaaacaggatgccggcagaagttccagacatcccccggagcagagaaggcgaccttacaaagaatgtagcaccgacctcagtatctga

SEQ ID NO: 23711 - DNA, 7629 bp, Homo Sapiens
atggtggccctgtccttaaagatttgtgtgcgccactgcaacgtggtgaagaccatgcagtttgaaccatctacagctgtgtacgatgcgtgtcgagtcattcgggaacgggtgcctgaggcacaaactgggcaagcttctgactatggactctttctttcggatgaagacccgaggaaagggatttggctggaagcgggcagaacactggattactacatgttgcggaatggggatattttggaatataaaaagaaacagagacctcagaaaatccggatgctggatggatccgtgaagacagtgatggtggatgattccaagactgtgggggagctcctggtcactatttgtagcagaataggaataacaaattatgaagaatactccttaatccaagaaactattgaagaaaagaaagaggaaggaacgggcacactcaaaaaagacaggacactgttacgagatgagaggaaaatggagaagttgaaggccaagctgcacacagatgatgacctaaattggctggatcacagccgaacattcagagaacaaggagtagatgaaaacgaaacgttgctgcttagacggaagttcttttactctgatcagaatgtagattcgagagaccccgtgcagctgaacttgctttatgttcaggcacgggatgacatcctgaatggctctcaccctgtctccttcgagaaagcttgtgagtttggtggatttcaagcccagatacaatttggacctcatgtggaacataaacacaaacctggatttttagacctgaaggaattcctgcccaaagaatatatcaagcagagaggagctgaaaagaggatctttcaggcacataagaactgcggagagatgagtgagatagaagccaaggtcaagtacgtcaaactcgcacggtccctccgcacatatggcgtgtccttcttcctggtgaaggagaagatgaaaggcaagaacaagctggtgcctcgcctgctggggatcaccaaagactcggtgatgcgcgtggatgagaagaccaaggaagtgctgcaggagtggcccctcaccaccgtcaagcgctgggcagcctcacccaagagcttcacactggattttggggagtatcaggaaagctactattcagtacaaaccaccgagggagagcagatatcccagctgattgcaggctacattgacatcatcctgaaaaagaaacaaagtaaagatcgatttggactagaaggtgatgaggagtcaaccatgttagaagagtccgtttccccaaaaaagtccaccatcttgcagcagcagttcaaccggaccgggaaggcagagcacggctcagtggcgctgccggccgtgatgcgctcgggctccagcgggcctgagaccttcaacgttggcagcatgccctcgccacagcagcaggtcatggttgggcagatgcaccgaggccacatgccgccactgacttcagcccagcaggccctgatggggaccatcaacacaagcatgcacgccgtccagcaggcccaggatgatctcagtgagctcgactcgctgccacctctcggccaggatatggcatctagggtatgggttcagaacaaagtcgacgaatccaaacacgaaatccattctcaagttgatgctatcacggccggaacggcttcagttgttaacctcacagctggtgaccctgcagacactgactacacagctgtgggatgtgcgatcaccactatttcttccaacctgacggagatgtccaagggtgtgaagctattggccgccctcatggatgatgaggtgggcagcggggaggacttgctcagagctgccaggaccctcgctggggcggtgtcagacttgctgaaagctgtgcagcctacttctggagagcctcgacagacagttttgactgctgctggcagcatcggacaagccagtggggatcttctgagacagattggagagaatgagactgatgagcgattccaggatgttttaatgagtttggccaaagctgttgccaatgcagctgccatgttggtactaaaggcaaagaatgttgcccaagtggccgaagacactgtcctacagaacagggtaattgctgctgccacccagtgtgccctctccacctcccagcttgtggcatgtgccaaggttgtgagccccactattagctcccctgtgtgccaggagcagctgattgaagcagggaagctggtggaccgctcggtggagaactgtgtccgtgcctgccaggcggccactaccgatagtgagctcctgaagcaggtcagcgcagcggccagcgtggtcagccaggccctccatgatctcctgcagcatgtgcggcagtttgccagccgaggcgagcccatcggccgctacgaccaggctactgacaccatcatgtgtgtcaccgagagcatcttcagctccatgggtgacgctggtgaaatggtgcgccaggcgcgggttctggcccaagccacatcagacctcgtcaatgccatgaggtcagatgcagaagccgaaatcgacatggagaattcaaagaagctcctggcagcagcaaaactcttagctgactccactgctcgcatggtggaagctgcaaagggggctgcagccaacccagagaatgaggaccagcagcaaaggctgagagaagctgcagaaggcctccgggtagcaaccaacgcagctgcccagaatgctattaagaaaaaaattgtcaaccgactggaggttgcagccaagcaggccgcagcggcagctacacagaccatcgccgcctcccagaatgcagctgtttccaacaagaaccctgcggcccagcagcagctggtccagagttgcaaggcagtggctgatcacatccctcagctggtccagggagtgagggggagccaagctcaagctgaagacctgagtgcccagctggctctcatcatctccagccagaacttcctccagcctggaagcaagatggtgtcctctgccaaagccgcagtgcccaccgtgagtgaccaggccgcagccatgcagctgagccagtgtgccaagaacctggccaccagcttggcggagctgcgtaccgcctcgcagaaggcccatgaagcttgtggtccgatggaaatcgattcagctctgaatacggtgcagacgcttaagaatgaactgcaggatgccaagatggcagccgtggagagccagctgaagccacttccaggggaaacgctggaaaaatgtgctcaggacctgggaagcacatccaaggcggtgggctcctccatggcacagctgctgacctgtgctgctcaaggcaacgaacactacacaggggtggctgctagagagacggcccaagctctgaaaacactggcccaggccgcccgtggagtggctgcatcgacaaccgaccccgcggccgcccatgccatgttagattctgctcgagacgtgatggagggctccgccatgctcattcaagaggccaagcaggccctgattgcacctggagatgcagagcgtcaacaaagactggctcaggtggctaaagccgtctcacactccttgaataactgcgtaaattgcctccctgggcagaaggatgtggacgtggccttgaagagcatcggggagtccagcaagaagctgcttgtggattcgctacctccaagcacgaagcctttccaggaagcccagagtgaactgaaccaggcagcagctgatctgaaccagtctgctggggaagtggtccatgccacccggggccagagtggagagttcgctgcagcctctggaaagttcagtgatgattttgatgaattcctcgatgctggcattgagatggctggccaagctcagacaaaagaagaccagatccaagtgatagggaacctcaagaatatctcgatggcatccagcaagctgctgttagctgccaagtctctctctgtagatccaggagctcccaatgcgaaaaatctcctggctgcagctgcaagagctgtgacagagagcatcaatcaactcatcactctgtgtacccaacaagctccgggccagaaagagtgcgataatgccctgcgggagctcgagactgtgaaggggatgttggacaatcctaatgaacctgttagtgacctctcttactttgactgcattgagagtgtgatggaaaactccaaggttctgggtgaatcgatggcagggatttcacagaatgccaagaccggagacctccctgcctttggggaatgtgtggggattgcatccaaggctctctgtgggctgacagaggctgcagcccaggctgcatacttggttggcatctctgatccaaacagccaggcaggccaccagggcctggtggaccccatccagtttgccagggctaaccaggccatccagatggcatgccagaacttggtggaccctggcagcagcccatcacaggtcctgtcagccgccacaattgttgccaagcacacgtcagccttgtgtaatgcctgccgcatcgcctcatccaagacggccaacccagtagccaagaggcacttcgtccagtcagccaaggaagtcgccaacagcactgccaacctggtgaagaccatcaaggccctggatggggatttctctgaagacaaccgcaataagtgtcgcatcgccaccgcacccttgattgaagctgtggagaacctgacagcgttcgcctcaaaccctgagtttgtcagcattcctgcccagatcagctccgagggttcccaggcacaggaaccaatcctggtctcagccaagaccatgctggagagttcatcgtacctcattcgcactgcacgctctctggccatcaaccccaaagacccacccacctggtctgtactggctggacattcccatacagtgtccgactccatcaagagtctcatcacttctatcagggacaaggcccctggacagagggagtgtgattactccatcgatggcatcaaccggtgcatccgggacatcgagcaggcctcgctggccgccgtcagccagagcctggccacgagggacgacatctctgtggaggccctgcaggagcagctgacttcggtggtccaggaaatcggacaccttatcgatcccatcgccacagcggctcggggagaagcagctcagctgggacataaggtgacacaactggcaagctattttgagcccttgatcttagccgcagttggtgtggcctccaagattcttgatcatcagcagcagatgacggtgctggaccagaccaagactctcgcagagtctgccttgcagatgttgtatgcagccaaagaaggtggcggaaaccccaaggcacaacacacccatgacgccatcacagaggccgcccagttgatgaaggaagccgtggatgacatcatggtgacgctgaacgaagctgccagtgaagtggggctggttgggggcatggtggacgccattgcagaagccatgagcaagctggatgaaggcactcctccagaaccaaagggaacatttgtcgactatcagacgactgtggttaaatactccaaagccattgcggtgacagctcaggaaatgatgactaagtcggttactaacccggaggagttgggaggactggcttcacaaatgaccagtgactatgggcacctggctttccagggccagatggcagcagccacggcggaaccagaggagatcggattccagattcgcactcgtgtgcaggacctgggccacggctgtatcttcctggtgcagaaggcaggggccctccaggtctgccccacagacagctacaccaagagggagctgatcgaatgcgcccgtgccgtcacggaaaaggtctccttggtgctctcggctctccaggccgggaacaaaggaacccaggcatgcattacagccgccaccgctgtgtctgggatcattgccgacctggacaccaccattatgtttgcaacagcggggacgctgaatgcagagaacagtgagaccttcgcagaccacagggagaacattctcaagacggccaaggccttggtagaagacacgaaactacttgtgtcaggagctgcgtccactcctgacaagctggcccaggcggcccagtcctcagcagccaccatcacccagctcgcagaagtggtcaagctgggggcagccagcctgggctccgacgaccccgagacccaggtggttttgatcaatgccatcaaagatgtggccaaggccctttctgatctcatcagtgctaccaagggagctgccagcaagccagtggacgacccttccatgtaccagctcaagggggctgccaaggtgatggtgaccaatgtcacctcgctcctcaagactgtaaaggcagtggaggatgaggccacccggggcaccagggcgcttgaggccacaattgaatgcataaagcaggagcttacggtgttccagtcaaaagacgtacctgaaaagacatcatcacctgaagaatccataaggatgacgaaaggcatcaccatggcaacagccaaagccgtggcagctgggaactcatgtagacaggaggacgtgattgctactgccaacctgagccggaaagccgtgtcagatatgttgacggcttgcaagcaagcatccttccaccccgatgtcagtgacgaggtgagaaccagagccttgcgtttcgggacggagtgcacccttggctacttggacctcctggagcacgtcttggtgattcttcagaaaccaaccccagaattcaagcagcagctggccgctttctccaagcgagtcgccggcgctgtgacagagctcatccaggcggcggaagccatgaaaggaacagagtgggtggatccagaagacccaactgtcattgcagaaacagagttactgggggctgcagcatccatcgaagctgctgctaagaagttagagcaactgaagccaagagcaaaaccaaaacaagcggatgagaccctggactttgaggaacagatcttggaagctgctaaatccattgctgctgccacaagcgccctggtcaaatcggcctcagcagcccagagggagctggtggcccaaggaaaggtgggctccatccctgccaatgctgcagacgacggacagtggtcacaggggctgatttctgctgcccggatggtggcggctgcgaccagcagtctctgtgaggcggccaatgcctccgttcagggacacgccagcgaggagaagctcatctcatctgccaagcaggtcgccgcttccacggctcagctgctggtggcctgcaaggtgaaggccgaccaggattcagaggccatgaggcggctacaggcggcaggaaatgctgtgaaaagagcctcagacaatcttgtccgtgcagcccagaaggcagcttttggcaaagctgatgacgacgatgttgtagtgaaaaccaagtttgtggggggcattgctcagatcatcgccgcccaggaagaaatgctaaagaaagagcgagaactggaagaagcaaggaaaaaactggcccaaatccgccagcagcagtataagtttttacccaccgagctgagggaagatgagggctaa

SEQ ID NO: 23712 - DNA, 792 bp, Homo Sapiens
atgggccagacagctctggcagggggcagcagcagcacccccacgccacaggccctgtaccctgacctctcctgtcccgagggcttggaagagctgctgtctgcaccccctcctgacctgggggcccagcggcgccacggttggaaccccaaagactgttcagagaacatcgaggtcaaggaaggagggttgtactttgagcggcggcccgtggcccagagcactgatggggcccggggtaagaggggctattcaaggggcctgcacgcctgggagatcagctggcccctagagcagaggggcacgcatgccgtggtgggcgtggccacggccctcgccccgctgcagactgaccactacgcggcgctgctgggcagcaacagcgagtcgtggggctgggacatcgggcgggggaagctgtaccatcagagcaaggggcccggagccccccagtatccagcgggaactcagggtgagcagctggaggtgccagagagactgctggtggttctggacatggaggagggaactctgggctacgctattgggggcacctacctggggccagcattccgcggactgaagggcaggaccctctatccggcagtaagcgctgtctggggccagtgccaggtccgcatccgctacctgggcgaaaggagagcggagccacactcccttctgcacctgagccgcctgtgtgtgcgccacaacctgggggatacccggctcggccaggtgtctgccctgcccttgccccctgccatgaagcgctacctgctctaccagtga

SEQ ID NO: 23713 - DNA, 6352 bp, Homo Sapiens
ggggctggcccgaggctgcggcgttctccccaaggaagtgtcttctccgctttccctgttcttctgtttctcacacactttctatctcattctgtaactttcaagcctttccttctaactgtatgtatttagttacttgttttcaagctggttccctctctggccccctggcctggggaaagcctccacacttactgcgggtcttgtttagagtctgagtttgtgagattatttggggcagagtgggcgagtggctgacaggtgacccccaggaggaggattcctggggctggtgtcttctcccagctgctgcttccagtgggcctgggcccaggactggacctccgctggcacccctgagtgcctccctgccaggccatgctgctgtagaccctaacagcgtctcttcctggccaagagaagcctgtccccaagaacaggagagccatggccggcctccgagggaacgctgtggctggcctcctctggatgctgctgctgtggagtgggggcggcggctgccaggctcagcgggcaggttgcaaaagtgtccactacgatctggtcttcctcctggacacctcctccagcgtgggcaaggaggactttgagaaggtccggcagtgggtggccaacctggtggacaccttcgaggtgggccccgaccgcacccgtgtgggggtcgtgcgctacagcgaccggcccaccacggccttcgagttgggactctttggctcgcaggaggaggtcaaggcggctgcccggcgtctcgcctaccacgggggcaacaccaacacgggagacgcgctccgctacatcacggcccgcagcttctccccacacgccggcggccgccccagggaccgcgcctacaagcaggtggccatcctgctcaccgacggccgcagccaggacctggtgctggacgccgcggcggcagcccaccgcgctggcatccgcatctttgccgtgggcgtgggcgaggcactcaaggaggagctggaggagatcgcctcagagcccaagtccgcccacgtcttccacgtgtccgacttcaatgccatcgacaagatccggggcaagctgcggcgccgtctttgtgaaaatgtgctctgtcctagcgttcgtgtagaaggagatcgctttaagcacaccaatggaggaaccaaggaaatcacaggttttgacctgatggatttgttcagtgtgaaggaaatcttggggaagagagagaatggagctcagagttcctatgtacggatgggatccttccctgtggtgcaaagtactgaggatgtgttcccccaaggtttacctgatgagtacgcctttgtcacaaccttccggttcaggaaaacctctcggaaggaagactggtatatctggcaggtcatcgaccagtacggcatcccacaggtctccatccggctggatggtgaaaacaaggcagtcgagtacaacgctgtgggtgccatgaaagatgctgtcagggtggtcttccgaggttctcgggtcaatgacctctttgaccgggactggcacaagatggccctgagcatccaggcccagaacgtctccctgcacattgactgtgcgctggtgcagacactacccatcgaggaacgggagaacattgacatccagggcaagactgtgattggcaagcgcctctacgacagtgtgcccattgactttgacctacagcggattgtgatctattgtgactcgagacacgcagaattggagacttgttgtgatatcccctcgggtccgtgccaggtgaccgtggtgacagagcctccacctccacccccaccccagcggcctcccaccccaggcagtgaacagattgggtttttgaagaccatcaactgctcctgcccagctggagagaagggtgaaatgggagttgctggccccatggggctccctggtccaaagggagacataggagccattgggccggttggcgctcctggacctaagggagagaaaggtgatgtgggcataggaccttttggccaaggggaaaagggtgaaaagggttccctgggcctgcccggcccccctgggagagacggcagcaaaggcatgagaggggagccaggagagctgggagagccggggctgccgggtgaggtcggcatgcgggggccccaaggaccacctggactccccggacctcctggacgtgtcggagctcctggtctccaaggagaacgaggtgaaaagggaactcgaggagaaaagggagagcgaggcctggatggattccctgggaagcctggggacacaggacagcagggcaggcccggcccttctggtgtggcaggaccccagggagaaaagggtgacgtgggacctgcggggccacctggtgtaccaggctcagtggtgcagcaagagggcttgaaaggggaacagggagctccaggacccagaggtcaccaaggcgcccccggtcctccaggagctcggggtccaataggcccagaaggcagggatggacctcctggtttgcaaggtctccgagggaagaaaggtgacatgggaccacctggaatccctggattgctggggctgcagggccctccaggaccccctggtgtcccaggcccccctggaccgggaggttctccgggtttgcctggagagatcggcttcccgggaaagcctggacctcctgggcccacgggaccccctggaaaggacgggccaaatggaccaccaggtccgccaggaaccaagggagaaccaggagaaagaggggaagatggtctgcctggaaaaccaggccttcggggagaaattggggagcagggcctggcaggccgacctggagagaagggagaagcaggcctcccaggggctccaggcttcccaggtgtgagaggagagaaaggagaccagggagaaaaaggtgaactgggacttccaggactgaaaggtgaccgaggtgaaaagggtgaagctggtcctgcaggccctcccgggttacctggaactacatccctgttcacaccacatccacggatgcccggagaacaagggcccaaaggagagaagggcgatccaggcctgcctggggaaccgggactgcagggccgtcctggagaattggggcctcagggacccactggaccaccgggtgccaagggacaggaaggtgcacatggggctcctggagcagctggaaaccccggtgctcccggacatgtcggtgcccccggtcccagtggccctccaggaagtgtgggtgctcccggcctcagaggcaccccagggaaagatggggagcgtggtgagaagggtgcagcgggggaagaaggcagcccagggccagttggtcccaggggagatcctggtgctcctgggctccctgggccgcccggaaaagggaaggatggagagccgggactccgtggatcacctggactccctggacccctaggaaccaaggctgcttgcggaaaagtcagagggtcagaaaactgtgcactgggagggcaatgtgttaagggggatcgaggagctcctgggatccctggttctcctggcagccgtggtgacccaggcattggggttgctggccctcctggcccttccggaccaccaggagacaaaggatccccgggatcacgaggcttacctggattccctggcccccagggcccagccggccgggacggtgcaccaggaaatccaggagaaagagggcctcctggcaagccgggcctctcttcactactgtctccaggggacataaatctcttggctaaggatgtgtgcaatgactgccctcctggccccccaggcctccctggtctaccaggttttaaaggggacaaaggtgtcccaggaaagccagggagagaaggcacagaagggaaaaagggagaggctgggcctccaggcctaccagggcccccaggaatagctggaccacagggaagtcaaggagaacgtggtgcagatggtgaggttgggcagaaaggtgatcagggtcatcctggagttccaggtttcatggggcccccagggaaccccgggccaccaggggcagatggaattgcaggagctgctggaccaccaggaatccaagggtcacctgggaaagaaggccctcctggcccccaaggcccatctggattacccggaatcccaggagaagaaggcaaagagggcagagatggaaagccgggtccccctggagagccgggcaaagcaggagagccaggtctaccaggaccagagggtgcccgaggcccacctggcttcaagggacacacaggcgattctggtgcacccggtccccggggagagtctggtgccatggggcttcctggtcaggaagggttaccaggaaaagatggtgacactggacccactgggccacagggtccccaaggaccaaggggcccaccgggcaagaatggatcaccgggatctccaggagagcctggcccttcaggaacccctggccagaaaggaagcaaaggggaaaatggcagcccaggacttcctggcttcctgggtccccgtgggcctccgggagaaccaggagagaaaggagtcccaggcaaggagggggtccctgggaagcctggagagcctggattcaaaggagaaaggggagatcctgggatcaaaggtgacaaaggacctcctggtggaaaaggccagcctggggaccctggaatcccaggccacaaaggccacacaggcctgatgggtccccaaggactacctggggagaatggaccagttggacccccagggcctccaggccagccgggatttccaggactgaggggggagtctccatccatggaaaccctgcgtcggcttattcaagaagagctggggaagcagcttgaaaccagactcgcctacctcctggcccagatgcccccggcgtacatgaagtcatctcaaggcagacctgggcccccagggccccctggaaaagatgggcttccaggccgggccggccccatgggggagccaggtcgtcctgggcaggggggtctggaaggaccctctggacccataggtcccaaaggtgagcgaggagccaaaggtgacccaggtgcacctggagttggcctccgaggcgagatgggaccccctggaatcccaggtcaacccggggaacctggctatgctaaagatggacttcctgggatccctggccctcaaggggagacaggaccagctggacatcctggcctcccaggacctcccggtcccccaggccaatgtgacccttcccagtgtgcctacttcgccagccttgctgcccggccgggtaatgtgaagggtccctaaaggactctggaaagccagaagactgcagtggatttctgaaacttgaactcagagcccagtgggaagccagaggtcttgaaagacttcagccatgtgttccttttttttttctttcttttatcgtttgctttttgttttattttcttgagagacctcaaaattattaaatccaacagacgctgccggtcggtcagattattattaatattattgttgttgttaattattattattatttcatatgctgatgctttgtgagttcttttccactcctttaaagttgggaaaacttgattcgtggggcaggagattgtttcttcattcttctgacagcccccatctgacgcgtaactgcccattttaaggaaactcttggtgctacaaaaccctgaccagacacttggcaaatttacctctttcttcaaaagaaaaactttaagaaaatgagccaatgggcttcattctcagtcatgcccggagatcacccaggagaaataatacaaacaccaccactgtccagagagagtaaagaagcagaaagagaaagaatttgcaaccatgaggaatgttcccacctcccgacgggacgtgcatttggaaaacacagaatcagccctcagggtgcactccagccacctcagtgctctaagctcacagaagtgaaataatgtctgtgggttggcaatggctttgtgggatcatatgtcttggccaaagatgggaaaacctatgttgaagaggcagcccttgagtgttaatttgtcttctaaactgtgtaaggccccttcaagttcctcttgttggtttcaattatattaattataaaacaagtggatgtggtgaccatccacttgtgtttccctaatgatgggcagttggccagggcactgaccagagctgggaaatttgtatctccaaggcggctctgtctctgaaataaatggcatcaagtgcatgtgtgtatgcgacatgccctgcctgaacaggtgctcaataaatccaagtttccttctcttgaaaaaaa

SEQ ID NO: 23714 - DNA, 9468 bp, Homo Sapiens
tgtctttctccgcggcgaaggtgaagagttgtcccagctcggcccgcgggggagccccgggagccgcacgtgtcctgggtcatgaaacttaatccacagcaagctcccttatatggtgattgtgttgttacagtgctgcttgctgaagaggacaaagctgaagatgatgtagtgttttacttggtatttttgggttccaccctccgtcactgtacaagtactcggaaggtcagttctgatacattggagaccattgctcctggtcatgattgttgtgaaacagtgaaggtgcagctctgtgcttccaaagagggccttcccgtgtttgtggtggctgaagaagactttcatttcgtccaggatgaagcgtatgatgcagctcaattcctagcaaccagtgctggaaatcagcaggctttgaactttacccgttttcttgaccagtcaggacccccatctggggatgtgaattcccttgataagaagttggtgctggcattcaggcacctgaagctgcccacggagtggaatgtattggggacagatcagagtttgcatgatgctggcccgcgagagacattgatgcattttgctgtgcggctgggactgctgaggttgacgtggttcctgttgcagaagccaggtggccgcggagctctcagtatccacaaccaggaaggggcgacgcctgtgagcttggccttggagcgaggctatcacaagctgcaccagcttctaaccgaggagaatgctggagaaccagactcctggagcagtttatcctatgaaataccgtatggagactgttctgtgaggcatcatcgagagttggacatctatacattaacctctgagtctgattcacatcatgaacacccatttcctggagacggttgcactggaccaatttttaaacttatgaacatccaacagcaactaatgaaaacaaacctcaagcagatggacagtcttatgcccttaatgatgacagcacaggatccttccagtgccccagagacagatggccagtttcttccctgtgcaccggagcccacggaccctcagcgactttcttcttctgaagagactgagagcactcagtgctgcccagggagccctgttgcacagactgaaagtccctgtgatttgtcaagcatagttgaggaggagaatacagaccgttcctgtaggaagaaaaataaaggcgtggaaagaaaaggggaagaggtggagccagcacctattgtggactctggaactgtatctgatcaagacagctgccttcagagcttgcctgattgtggagtaaagggcacggaaggcctttcgtcctgtggaaacagaaatgaagaaactggaacaaaatcttctggaatgcccacagaccaggagtccctgagcagtggagatgctgtgcttcagagagacttggtcatggagccaggcacagcccagtattcctctggaggtgaactgggaggcatttcaacaacaaatgtcagtaccccagacactgcaggggaaatggaacatgggctcatgaacccagatgccactgtttggaagaatgtgcttcagggaggggaaagtacaaaggaaagatttgagaactctaatattggcacagctggagcctctgacgtgcacgtcacaagtaagcctgtggataaaatcagtgttccaaactgtgcccctgccgccagttccctggatggtaacaaacctgctgagtcttcacttgcatttagtaatgaagaaacctccactgaaaaaacagcagaaacggaaacttcacgaagtcgtgaggagagtgctgatgctccagtagatcagaattctgtggtgattccagctgctgcaaaagacaagatttcagatggattagaaccttatactctcttagcagcaggcataggtgaggcaatgtcaccctcagctttagcccttcttgtgctggaagaagatgtaatgccacaccagaactcagaaacaaattcatctcatgctcaaagccaaaagggcaaatcctcacccatttgttctacaactggagacgataaactttgtgcagactctgcatgtcaacagaacacagtgacttctagtggcgatttggttgcaaaactgtgtgataacatagttagcgagtccgaaagcaccacagcaaggcaacccagctcacaagatccacccgatgcctcccactgtgaagacccacaggctcatacagtcacctctgaccctgtaagggatacccaggaacgtgcggatttttgtcctttcaaagtggtggataacaaaggccaacgaaaagatgtgaaactagataaacctttaacaaatatgcttgaggtggtttcacatccacatccagttgtccctaaaatggagaaagaactggtgccagaccaggcagtaatatcagacagtactttctctctggcaaacagtccaggcagtgaatcagtaaccaaggatgacgcactttcttttgtcccctcccagaaagaaaagggaacagcaactcctgaactacatacagctacagattatagagatggcccagatggaaattcgaatgagcctgatacgcggccactagaagacagggcagtaggcctgtccacatcctccactgctgcagagcttcagcacgggatggggaataccagtctcacaggacttggtggagagcatgagggtcccgcccctccagcaatcccagaagctctgaatatcaaggggaacactgactcttccctgcaaagtatgggtaaggccactttggctttagattcagttttgactgaagaaggaaaacttctggtggtttcagaaagctctgcagctcaggaacaagataaggataaagcggtgacctgttcctctattaaggaaaatgctctctcttcaggaactttgcaggaagagcagagaacaccacctcctggacaagatactcaacaatttcatgaaaaatcaatctcagctgactgtgccaaggacaaagcacttcagctaagtaattcaccgggtgcatcctctgcctttcttaaggcagaaactgaacataacaaggaagtggccccacaagtctcactgctgactcaaggtggggctgcccagagcctggtgccaccaggagcaagtctggccacagagtcaaggcaggaagccttgggggcagagcacaacagctctgctctgttgccatgtctgttgccagatgggtctgatgggtccgatgctcttaactgcagtcagccttctcctctggatgttggagtgaagaacactcaatcccagggaaaaactagtgcctgtgaggtgagtggagatgtgacggtggatgttacaggggttaatgctctacaaggtatggctgagcccagaagagagaatatatcacacaacacccaagacatcctgattccaaacgtcttgttgagccaagagaagaatgccgttctaggtttgccagtggctctacaggacaaagctgtgactgacccacagggagttggaaccccagagatgatacctcttgattgggagaaagggaagctggagggagcagaccacagctgtaccatgggtgacgctgaggaagcccaaatagacgatgaagcacatcctgtcctactgcagcctgttgccaaggagctccccacagacatggagctctcagcccatgatgatggggccccagctggtgtgagggaagtcatgcgagccccgccttcaggcagggaaaggagcactccctctctaccttgcatggtctctgcccaggacgcacctctgcctaagggagcagacttgatagaggaggctgccagccgtatagtggatgctgtcatcgaacaagtcaaggccgctggagcactgcttactgagggggaggcctgtcacatgtcactgtccagccctgagttgggtcctctcactaaaggactagagagtgcttttacagaaaaagtgagtactttcccacctggggagagcctaccaatgggcagtactcctgaggaagccacggggagccttgcaggatgttttgctggaagggaggagccagagaagatcattttacctgtccaggggcctgagccagcagcagaaatgccagacgtgaaagctgaagatgaagtggattttagagcaagttcaatttctgaagaagtggctgtagggagcatagctgctacactgaagatgaagcaaggcccaatgacccaggcgataaaccgagaaaactggtgtacaatagagccatgccctgatgcagcatctcttctggcttccaagcagagcccagaatgtgagaacttcctggatgttggactgggcagagagtgtacctcaaaacaaggtgtacttaaaagagaatctgggagtgattctgacctctttcactcacccagtgatgacatggacagcatcatcttcccaaagccagaggaagagcatttggcctgtgatatcaccggatccagttcatccaccgatgacacggcttcactggaccgacattcttctcatggcagtgatgtgtctctctcccagattttaaagccaaacaggtcaagagatcggcaaagccttgatggattctacagccatgggatgggagctgagggtcgagaaagtgagagtgagcctgctgacccaggcgacgtggaggaggaggagatggacagtatcactgaagtgcctgcaaactgctctgtcctaaggagctccatgcgctctctttctcccttccggaggcacagctgggggcctgggaaaaatgcagccagcgatgcagaaatgaaccaccggagtatgagctggtgcccctctggtgtgcagtactctgctggcctgagtgctgactttaattacagaagtttcagtctagaaggcttgacaggaggagctggtgtcggaaacaagccatcctcatctctagaagtaagctctgcaaatgccgaagagctcagacacccattcagtggtgaggaacgggttgactctttggtgtcactttcagaagaggatctggagtcagaccagagagaacataggatgtttgatcagcagatatgtcacagatctaagcagcagggatttaattactgtacatcagccatttcctctccattgacaaaatccatctcattaatgacaatcagccatcctggattggacaattcacggcccttccacagtaccttccacaataccagtgctaatctgactgagagtataacagaagagaactataatttcctgccacatagcccctccaagaaagattctgaatggaagagtggaacaaaagtcagtcgtacattcagctacatcaagaataaaatgtctagcagcaagaagagcaaagaaaaggaaaaagaaaaagataagattaaggagaaggagaaagattctaaagacaaggagaaagataagaagactgtcaacgggcacactttcagttccattcctgttgtgggtcccatcagctgtagccagtgtatgaagcccttcaccaacaaagatgcctatacttgtgcaaattgcagtgcttttgtccacaaaggctgccgagaaagtctagcctcctgtgcaaaggtcaaaatgaagcagcccaaagggagccttcaggcacatgacacatcatcactgcccacggtcattatgagaaacaagccctcacagcccaaggagcgtcctcggtccgcagtcctcctggtggatgaaaccgctaccaccccaatatttgccaatagacgatcccagcagagtgtctcgctctccaaaagtgtctccatacagaacattactggagttggcaatgatgagaacatgtcaaacacctggaaattcctgtctcattcaacagactcactaaataaaatcagcaaggtcaatgagtcaacagaatcacttactgatgagggagtaggtacagacatgaatgaaggacaactactgggagactttgagattgagtccaaacagctggaagcagagtcttggagtcggataatagacagcaagtttctaaaacagcaaaagaaagatgtggtcaaacggcaagaagtaatatatgagttgatgcagacagagtttcatcatgtccgcactctcaagatcatgagtggtgtgtacagccaggggatgatggcggatctgctttttgagcagcagatggtagaaaagctgttcccctgtttggatgagctgatcagtatccatagccaattcttccagaggattctggagcggaagaaggagtctctggtggataaaagtgaaaagaactttctcatcaagaggataggggatgtgcttgtaaatcagttttcaggtgagaatgcagaacgtttaaagaagacatatggcaagttttgtgggcaacataaccagtctgtaaactacttcaaagacctttatgccaaggataagcgttttcaagcctttgtaaagaagaagatgagcagttcagttgttagaaggcttggaattccagagtgcatattgcttgtaactcagcggattaccaagtacccagttttattccaaagaatattgcagtgtaccaaagacaatgaagtggagcaggaagatctagcacagtccttgagcctggtgaaggatgtgattggagctgtagacagcaaagtggcaagttatgaaaagaaagtgcgtctcaatgagatttatacaaagacagatagcaagtcaatcatgaggatgaagagtggtcagatgtttgccaaggaagatttgaaacggaagaagcttgtacgtgatgggagtgtgtttctgaagaatgcagcaggaaggttgaaagaggttcaagcagttcttctcactgacattttagttttccttcaagaaaaagaccagaagtacatctttgcatcattggaccagaagtcaacagtgatctctttaaagaagctgattgtgagagaagtggcacatgaggagaaaggtttattcctgatcagcatggggatgacagatccagagatggtagaagtccatgccagctccaaagaggaacgaaacagctggattcagatcattcaggacacaatcaacaccctgaacagagatgaagatgaaggaattcctagtgagaatgaggaagaaaagaaaatgttggacaccagagcccgagaattaaaagaacaacttcaccagaaggaccaaaaaatcctactcttgttggaagagaaggagatgattttccgggacatggctgagtgcagcacccctctcccagaggattgctccccaacacatagccctagagttctcttccgctccaacacagaagaggctctcaaaggaggacctttaatgaaaagtgcaataaatgaggtggagatccttcagggtttggtgagtggaaatctgggaggcacacttgggccgactgtcagcagccccattgagcaagatgtggtcagtcccgtttccctgccccggagagcagagacctttggaggatttgacagccatcagatgaatgcttcaaaaggaggcgagaaggaagagggagatgatggccaagatcttaggagaacggaatcagatagtggcctaaaaaagggtggaaatgctaacctggtatttatgcttaaaagaaacagtgagcaggttgtccagagcgttgttcatctctacgagctcctcagcgctctgcagggtgtggtgctgcagcaggacagctacattgaggaccagaaactggtgctgagcgagagggcgctcactcgcagcttgtcccgcccgagctccctcattgagcaggagaagcagcgcagcctggagaagcagcgccaggacctggccaacctgcagaagcagcaggcccagtacctcgaggagaagcgcaggcgcgagcgtgagtgggaagctcgtgagagggagctgcgggagcgggaggccctcctggcccagcgcgaggaggaggtgcagcaggggcagcaggacctggaaaaggagcgggaggagctccagcagaagaagggcacataccagtatgacctggagcgactgcgtgctgcccagaaacagcttgagagggaacaggagcagctgcgccgggaggcagagcggctcagccagcggcagacagaacgggacctgtgtcaggtttcccatccacataccaagctgatgaggatcccatcgttcttccccagtcctgaggagcccccctcgccatctgcaccttccatagccaaatcagggtcattggactcagaactttcagtgtccccaaaaaggaacagcatctctcggacacacaaagataaggggccttttcacatactgagttcaaccagccagacaaacaaaggaccagaagggcagagccaggcccctgcgtccacctctgcctctacccgcctgtttgggttaacaaagccaaaggaaaagaaggagaaaaaaaagaagaacaaaaccagccgctctcagcccggtgatggtcccgcgtcagaagtatcagcagagggtgaagagatcttctgctgaccctcttcctctctgctgaggcagctgcctcctgatcctggccagcccacctctcctgctgtccccgcgtgcacaagtctcttacactggacgcccactgctcctcagcgtccagtcctcctgggcggccccaggtcctggacaataagcaacagatgatattgagtgtcgggtggggaaggaggcccagactctgcttcggccatgatttgtgactgcccaggactctcaggttgggctggccctactcaggattacactgaaagtaatggcctcgtaagtacaggtgatggttttggacacgtcaggaattcctaaaggctgaaagagtgtatccaagtaaggtctgaacctccgactgccttttatttgggggaacacaaaaccaaacagcagatgttttggacttgatctgtgtacgtacatggggacctgtctgcatatacacacggggaatgccagaagaaggcccagtctgtaccaggcgtctggtcaacttagcacaagggcagtgcctggacggacccggagcccccgcatatcagcagttcacccagtactcctcagagactggtttccctctaaacccatcccgggcacataccacccctgttttgcatgtatttctcatttcattttagggatgacaaacatttgtgaaaccagtgagagaaggcttgatgtgtataaaagacgtgatgtgcaccacctcgatctcggtgtttcaggcactaaagcaacaaaacaacccatagtatctcattttgtcatcagatccagaagaaatatcctggttttccagcatgtttacccacatgttttgggcatggataaagtgaagaggcctactcaccattatccctgcagcgtgacaccttttgattgtcactgaccactcagaaggggccacggcctcctggctgtgttcctgag

SEQ ID NO: 23715 - DNA, 2133 bp, Homo Sapiens
ttcgcatgcggctgccgggccggaggtggtagcggcgccgggcgcgctccgcccgcccctcctccgggccgcactgaggctcgggcgcgcggggacatgtcggtggcgacgggcagcagcgagacggccggcggggccagcggcggcggcgcacgggttttcttccaaagcccccggggtggcgccggtggcagccccggctccagcagcggctcaggctcctcccgggaggactcggcgcccgtggccacggcggccgctgcagggcaggttcagcagcaacagcagcggcgacaccagcagggaaaagtgacagtgaaatacgatcgtaaggagcttcggaagcggctggtgctggaggaatggatcgtggagcagctgggtcagctctacggctgcgaggaagaagaaatgccagaggtagaaattgacattgatgatcttcttgatgcagacagtgatgaagagagagcttcaaaattacaggaagctcttgtagactgctacaaaccaacagaggaatttatcaaagagctgctttctcggataagaggcatgaggaaactgagccctccgcagaagaagagtgtatgattctggaacagggtgaaactctcccagagacgaagaaagagtcctgggatttgtacttcatgaagacttttgtgaaagaataggtgtccttatgaacaacgtttttgtttttttttttttcttttttggtgtgaaggtgggggggtctattagacatttattcaagagcgttctttttttggttttaaaggtttttgttaatgtaatattttaatagcaaagatatcatgactctagccacagcctaaccaaggattatcaaaggaggtggacactcaaggaagggccacgccaggctgcgtttcctgcaaggactcagatgttcagtaccttatgatacagggaagatagttttcttacaagtagtttggtaatattttttttcttaagttgtacatttgactcagctgtcaaatttctcacacttgtatatatctacacacaactaagttaaaatgttgatgtgagttttatttcacatggatggaataaacttgtggttgtcctttaactggaggtcccagcacatgtgttttcaagaggccactaggcattcttcactgagtgctgctgacttcaacgttcactttatgcaccaaagtgaaagaattcagtgtatccgttattttaatgcactacaccacagaaatgttaagttggtcaagggcttaatttatggaatttctattatttcattggttgggatgctttgccaggtcatgtgcttattgtctcattttgtagtcttttaaagttgtatgaacccttaatttgaagaactaacttgatttctagagaaatatccacactatctcagtggtattttgcattggaaaaaggaagcactgtgtagcagtgaattgtctgctttccaccgagtactgtgtttattctctctccaggaaagcagatcaaaagaaagttagcagatcgagtgtcttcttccttagaaataggttctggtagcttctgtgcctgggtagtatcagaccagtgggagtaaaccgagtgttaagtgtcaaggtgagaaagcctcacattctctcaagacagttgctctaggagctgagttgctggtttggaagtgtggagattgcatttctggcttctctcaatggcttgtgttgaggactctgggtgctcctggccctaattgtgcaccctgatccccgtgcttggagctaggcctggtggcgtgctctagccctctcagttaccagctctttggagaaggatcaaaattcagatggaatgtgggatgggtaataggtgagagtagaaacccttccctccaggaggcccccgctgactcccacagaaacccacctaccataagatgtcttcaggtggccttgtccaaggatgggggtcaggcattttatatcaagggtgctctgaacatattttattttttaaaaaaactatgtttgtgaattttgcgtatactggcaagcttttgaaaatgtatttaattttgtattgtttaccaatgatttatttacaagatatttactcaaataaatggagctgcttacaaaa

SEQ ID NO: 23716 - DNA, 5356 bp, Homo Sapiens
cctcccaactggtgactggttagtgatgaggctgtgtgcttctgagctgggcatccgaaggcatccttggggaagctgagggcacgaggaggggctgccagactccgggagctgctgcctggctgggattcctacacaatgcgttgcctggctccacgccctgctgggtcctacctgtcagagccccaaggcagctcacagtgtgccaccatggagttggggcccctagaaggtggctacctggagcttcttaacagcgatgctgaccccctgtgcctctaccacttctatgaccagatggacctggctggagaagaagagattgagctctactcagaacccgacacagacaccatcaactgcgaccagttcagcaggctgttgtgtgacatggaaggtgatgaagagaccagggaggcttatgccaatatcgcggaactggaccagtatgtcttccaggactcccagctggagggcctgagcaaggacattttcaagcacataggaccagatgaagtgatcggtgagagtatggagatgccagcagaagttgggcagaaaagtcagaaaagacccttcccagaggagcttccggcagacctgaagcactggaagccagctgagccccccactgtggtgactggcagtctcctagtgggaccagtgagcgactgctccaccctgccctgcctgccactgcctgcgctgttcaaccaggagccagcctccggccagatgcgcctggagaaaaccgaccagattcccatgcctttctccagttcctcgttgagctgcctgaatctccctgagggacccatccagtttgtccccaccatctccactctgccccatgggctctggcaaatctctgaggctggaacaggggtctccagtatattcatctaccatggtgaggtgccccaggccagccaagtaccccctcccagtggattcactgtccacggcctcccaacatctccagaccggccaggctccaccagccccttcgctccatcagccactgacctgcccagcatgcctgaacctgccctgacctcccgagcaaacatgacagagcacaagacgtcccccacccaatgcccggcagctggagaggtctccaacaagcttccaaaatggcctgagccggtggagcagttctaccgctcactgcaggacacgtatggtgccgagcccgcaggcccggatggcatcctagtggaggtggatctggtgcaggccaggctggagaggagcagcagcaagagcctggagcgggaactggccaccccggactgggcagaacggcagctggcccaaggaggcctggctgaggtgctgttggctgccaaggagcaccggcggccgcgtgagacacgagtgattgctgtgctgggcaaagctggtcagggcaagagctattgggctggggcagtgagccgggcctgggcttgtggccggcttccccagtacgactttgtcttctctgtcccctgccattgcttgaaccgtccgggggatgcctatggcctgcaggatctgctcttctccctgggcccacagccactcgtggcggccgatgaggttttcagccacatcttgaagagacctgaccgcgttctgctcatcctagacgccttcgaggagctggaagcgcaagatggcttcctgcacagcacgtgcggaccggcaccggcggagccctgctccctccgggggctgctggccggccttttccagaagaagctgctccgaggttgcaccctcctcctcacagcccggccccggggccgcctggtccagagcctgagcaaggccgacgccctatttgagctgtccggcttctccatggagcaggcccaggcatacgtgatgcgctactttgagagctcagggatgacagagcaccaagacagagccctgacgctcctccgggaccggccacttcttctcagtcacagccacagccctactttgtgccgggcagtgtgccagctctcagaggccctgctggagcttggggaggacgccaagctgccctccacgctcacgggactctatgtcggcctgctgggccgtgcagccctcgacagcccccccggggccctggcagagctggccaagctggcctgggagctgggccgcagacatcaaagtaccctacaggaggaccagttcccatccgcagacgtgaggacctgggcgatggccaaaggcttagtccaacacccaccgcgggccgcagagtccgagctggccttccccagcttcctcctgcaatgcttcctgggggccctgtggctggctctgagtggcgaaatcaaggacaaggagctcccgcagtacctagcattgaccccaaggaagaagaggccctatgacaactggctggagggcgtgccacgctttctggctgggctgatcttccagcctcccgcccgctgcctgggagccctactcgggccatcggcggctgcctcggtggacaggaagcagaaggtgcttgcgaggtacctgaagcggctgcagccggggacactgcgggcgcggcagctgcttgagctgctgcactgcgcccacgaggccgaggaggctggaatttggcagcacgtggtacaggagctccccggccgcctctcttttctgggcacccgcctcacgcctcctgatgcacatgtactgggcaaggccttggaggcggcgggccaagacttctccctggacctccgcagcactggcatttgcccctctggattggggagcctcgtgggactcagctgtgtcacccgtttcaggtggggtgaggggcttggaagagacatccttgtgttgggcattaactgcggtcttggtgccaagcccagtgctctgtggggtccttttagtatgcagagcagccgggtggggcagaatggattctctccatttttaagatgaggatgttgaggctcagagaggggcagccacttgccacacagcaagtgagaggcaatggcattctcccagtcaatatttgaaggcccgccatgtgccagtcactggggtatgtctagaatctgagactgacctgggctcaaatttgttttattctttccaccccctgagcacgccaccgttttcttatgctaagagtaaagccatggcctccccttggactctctgcctccattctctcctcttccactccattttgtattcagcaaccagaccaatcttctcagaacttgaatctgattgtatcccatccctgcttacaatccttcagggacactccaccactgtcaggatgaaggctaaatttcttaatttggtttcattaagtcggtctgcaatctgcttgagcatttcagcttaatcgccagaggattgcttccatatttccccctaaacatactttacccaagctgtaaggtcctacataattgtgccaataatttagcagtgagcttcctggtagccgaagcaaaaagggaaagaaaaccactgtgtgagttgtgagaaagtaggaatcaataaaggctggagtggtcgctgccttgagcgacacggtggcgatggaaggctttctgggaaaggtagaggttgagctaaggaaagaaagtattttaataggtaggaggacccttcatggagctgcccttccattaaggtctagcctggtcaccgtgcctgggtctgaggccctccctccacaggctgtgggagtccctgcggcagcatggggagaccaagctacttcaggcagcagaggagaagttcaccatcgagcctttcaaagccaagtccctgaaggatgtggaagacctgggaaagcttgtgcagactcagaggacgagaagttcctcggaagacacagctggggagctccctgctgttcgggacctaaagaaactggagtttgcgctgggccctgtctcaggcccccaggctttccccaaactggtgcggatcctcacggccttttcctccctgcagcatctggacctggatgcgctgagtgagaacaagatcggggacgagggtgtctcgcagctctcagccaccttcccccagctgaagtccttggaaaccctcaatctgtcccagaacaacatcactgacctgggtgcctacaaactcgccgaggccctgccttcgctcgctgcatccctgctcaggctaagcttgtacaataactgcatctgcgacgtgggagccgagagcttggctcgtgtgcttccggacatggtgtccctccgggtgatggacgtccagtacaacaagttcacggctgccggggcccagcagctcgctgccagccttcggaggtgtcctcatgtggagacgctggcgatgtggacgcccaccatcccattcagtgtccaggaacacctgcaacaacaggattcacggatcagcctgagatgatcccagctgtgctctggacaggcatgttctctgaggacactaaccacgctggaccttgaactgggtacttgtggacacagctcttctccaggctgtatcccatgagcctcagcatcctggcacccggcccctgctggttcagggttggcccctgcccggctgcggaatgaaccacatcttgctctgctgacagacacaggcccggctccaggctcctttagcgcccagttgggtggatgcctggtggcagctgcggtccacccaggagccccgaggccttctctgaaggacattgcggacagccacggccaggccagagggagtgacagaggcagccccattctgcctgcccaggcccctgccaccctggggagaaagtacttctttttttttatttttagacagggtctcactgttgcccaggctggcgtgcagtggtgcgatctgggttcactgcaacctccgcctcttgggttcaagcgattcttctgcttcagcctcccgagtagctgggactacaggcacccaccatcatgtctggctaatttttcatttttggtagagacagggttttgccgtgttggccgggctggtctcgaactcttgacctcgggtgatccacccacctcagcctcccaaagtgctgggattacaagcgtgagccactgcaccgggccacagagaaagtacttctccaccctgctctccgaccagacaccttgacagggcacaccgggcactcagaagacactgatgggcaacccccagcctgctaattccccagattgcaacaggctgggcttcagtggcagctgcttttgtctatgggactcaatgcactgacattgttggccaaagccaaagctaggcctggccagatgcaccagcccttagcagggaaacagctaatgggacactaatggggcggtgagaggggaacagactggaa

SEQ ID NO: 23717 - DNA, 5883 bp, Homo Sapiens
ctaaactcgaattaagagggaaaaaaaatcagggaggaggtggcaagccacaccccacggtgcccgcgaacttccccggcagcggactgtagcccaggcagacgccgtcgagatgcagggcccaccgctcctgaccgccgcccacctcctctgcgtgtgcaccgccgcgctggccgtggctcccgggcctcggtttctggtgacagccccagggatcatcaggcccggaggaaatgtgactattggggtggagcttctggaacactgcccttcacaggtgactgtgaaggcggagctgctcaagacagcatcaaacctcactgtctctgtcctggaagcagaaggagtctttgaaaaaggctcttttaagacacttactcttccatcactacctctgaacagtgcagatgagatttatgagctacgtgtaaccggacgtacccaggatgagattttattctctaatagtacccgcttatcatttgagaccaagagaatatctgtcttcattcaaacagacaaggccttatacaagccaaagcaagaagtgaagtttcgcattgttacactcttctcagattttaagccttacaaaacctctttaaacattctcattaaggaccccaaatcaaatttgatccaacagtggttgtcacaacaaagtgatcttggagtcatttccaaaacttttcagctatcttcccatccaatacttggtgactggtctattcaagttcaagtgaatgaccagacatattatcaatcatttcaggtttcagaatatgtattaccaaaatttgaagtgactttgcagacaccattatattgttctatgaattctaagcatttaaatggtaccatcacggcaaagtatacatatgggaagccagtgaaaggagacgtaacgcttacatttttacctttatccttttggggaaagaagaaaaatattacaaaaacatttaagataaatggatctgcaaacttctcttttaatgatgaagagatgaaaaatgtaatggattcttcaaatggactttctgaatacctggatctatcttcccctggaccagtagaaattttaaccacagtgacagaatcagttacaggtatttcaagaaatgtaagcactaatgtgttcttcaagcaacatgattacatcattgagttttttgattatactactgtcttgaagccatctctcaacttcacagccactgtgaaggtaactcgtgctgatggcaaccaactgactcttgaagaaagaagaaataatgtagtcataacagtgacacagagaaactatactgagtactggagcggatctaacagtggaaatcagaaaatggaagctgttcagaaaataaattatactgtcccccaaagtggaacttttaagattgaattcccaatcctggaggattccagtgagctacagttgaaggcctatttccttggtagtaaaagtagcatggcagttcatagtctgtttaagtctcctagtaagacatacatccaactaaaaacaagagatgaaaatataaaggtgggatcgccttttgagttggtggttagtggcaacaaacgattgaaggagttaagctatatggtagtatccaggggacagttggtggctgtaggaaaacaaaattcaacaatgttctctttaacaccagaaaattcttggactccaaaagcctgtgtaattgtgtattatattgaagatgatggggaaattataagtgatgttctaaaaattcctgttcagcttgtttttaaaaataagataaagctatattggagtaaagtgaaagctgaaccatctgagaaagtctctcttaggatctctgtgacacagcctgactccatagttgggattgtagctgttgacaaaagtgtgaatctgatgaatgcctctaatgatattacaatggaaaatgtggtccatgagttggaactttataacacaggatattatttaggcatgttcatgaattcttttgcagtctttcaggaatgtggactctgggtattgacagatgcaaacctcacgaaggattatattgatggtgtttatgacaatgcagaatatgctgagaggtttatggaggaaaatgaaggacatattgtagatattcatgacttttctttgggtagcagtccacatgtccgaaagcattttccagagacttggatttggctagacaccaacatgggttacaggatttaccaagaatttgaagtaactgtacctgattctatcacttcttgggtggctactggttttgtgatctctgaggacctgggtcttggactaacaactactccagtggagctccaagccttccaaccatttttcatttttttgaatcttccctactctgttatcagaggtgaagaatttgctttggaaataactatattcaattatttgaaagatgccactgaggttaaggtaatcattgagaaaagtgacaaatttgatattctaatgacttcaaatgaaataaatgccacaggccaccagcagacccttctggttcccagtgaggatggggcaactgttctttttcccatcaggccaacacatctgggagaaattcctatcacagtcacagctctttcacccactgcttctgatgctgtcacccagatgattttagtaaaggctgaaggaatagaaaaatcatattcacaatccatcttattagacttgactgacaataggctacagagtaccctgaaaactttgagtttctcatttcctcctaatacagtgactggcagtgaaagagttcagatcactgcaattggagatgttcttggtccttccatcaatggcttagcctcattgattcggatgccttatggctgtggtgaacagaacatgataaattttgctccaaatatttacattttggattatctgactaaaaagaaacaactgacagataatttgaaagaaaaagctctttcatttatgaggcaaggttaccagagagaacttctctatcagagggaagatggctctttcagtgcttttgggaattatgacccttctgggagcacttggttgtcagcttttgttttaagatgtttccttgaagccgatccttacatagatattgatcagaatgtgttacacagaacatacacttggcttaaaggacatcagaaatccaacggtgaattttgggatccaggaagagtgattcatagtgagcttcaaggtggcaataaaagtccagtaacacttacagcctatattgtaacttctctcctgggatatagaaagtatcagcctaacattgatgtgcaagagtctatccattttttggagtctgaattcagtagaggaatttcagacaattatactctagcccttataacttatgcattgtcatcagtggggagtcctaaagcgaaggaagctttgaatatgctgacttggagagcagaacaagaaggtggcatgcaattctgggtgtcatcagagtccaaactttctgactcctggcagccacgctccctggatattgaagttgcagcctatgcactgctctcacacttcttacaatttcagacttctgagggaatcccaattatgaggtggctaagcaggcaaagaaatagcttgggtggttttgcatctactcaggataccactgtggctttaaaggctctgtctgaatttgcagccctaatgaatacagaaaggacaaatatccaagtgaccgtgacggggcctagctcaccaagtcctgtaaagtttctgattgacacacacaaccgcttactccttcagacagcagagcttgctgtggtacagccaatggcagttaatatttccgcaaatggttttggatttgctatttgtcagctcaatgttgtatataatgtgaaggcttctgggtcttctagaagacgaagatctatccaaaatcaagaagcctttgatttagatgttgctgtaaaagaaaataaagatgatctcaatcatgtggatttgaatgtgtgtacaagcttttcgggcccgggtaggagtggcatggctcttatggaagttaacctattaagtggctttatggtgccttcagaagcaatttctctgagcgagacagtgaagaaagtggaatatgatcatggaaaactcaacctctatttagattctgtaaatgaaacccagttttgtgttaatattcctgctgtgagaaactttaaagtttcaaatacccaagatgcttcagtgtccatagtggattactatgagccaaggagacaggcggtgagaagttacaactctgaagtgaagctgtcctcctgtgacctttgcagtgatgtccagggctgccgtccttgtgaggatggagcttcaggctcccatcatcactcttcagtcatttttattttctgtttcaagcttctgtactttatggaactttggctgtgatttatttttaaaggactctgtgtaacactaacatttccagtagtcacatgtgattgttttgttttcgtagaagaatactgcttctattttgaaaaaagagttttttttctttctatggggttgcagggatggtgtacaacaggtcctagcatgtatagctgcatagatttcttcacctgatctttgtgtggaagatcagaatgaatgcagttgtgtgtctatattttcccctcacaaaatcttttagaatttttttggaggtgtttgttttctccagaataaaggtattactttagaaataggtattctcctcattttgtgaaagaaatgaacctagattcttaagcattattacacatccatgtttgcttaaagatggatttccctgggaatgggagaaaacagccagcaggaggagcttcatctgttcccttcccacctccaacctagccctactgcccaccccaccccaacccaccccatgcccagtggtctcagtagatacttcttaactggaaattctttcttttcagaatctaggtggtgaattttttttaagtggcacggtctttttctgcttgaaatctgatcacaccccccagccattgccctccctctctttttcctctgtagagaaatgtgaggggcagtacatttactgtgcttttcacaccatctcagaggttgaggagcatactgaaaattgccctggggggtgctgggtgtgctgtctccttcccacatcctcagccccacaccagctctatttcaggggtgagagtcagagagcactgcaatatgtgcttcatgggatttcgattcgaagatcctagaccagggagacactgtgagccagggatacaacaaaatactaggtaagtcactgcagaccgacctccctgcagtttgggaaagaagctgggtttgtggagaatcagagcatcttgacatgactgctgacctaaagatccctggcattggccagggatcctgtggaacctcttctagttcaggggtgtgagcattagactgccagttgtctagtgacatctgatgcttgctgtgaacttttaagatccccgaatcctgagcacctcaatctttaattgccctgtattccgaagggtaatataatttatctggatggaaattttaaagatgaatcccccttttttcttttcttctctcttttctttccttctccctttcttctttgccttctaaatatactgaaatgatttagatatgtgtcaacaattaatgatcttttattcaatctaagaaatggtttagtttttctctttagctctatggcatttcactcaagtggacaggggaaaaagtaattgccatgggctccaaagaatttgctttatgtttttagctatttaaaaataaatccatcaaaaataaagtatgcaaatgtatctttt

SEQ ID NO: 23718 - DNA, 3126 bp, Homo Sapiens
atggcggcggcggcggcagctggtgcggcctccgggctgccgggtccagtggcacaaggattaaaggaagcgttagtggatacgctcaccgggatcctatccccagtacaggaggtgcgggcggctgctgaagaacagattaaggtgctggaggtgacggaggaatttggtgttcacttggcagaactgactgtagatccccagggggcactggcaatccgtcagctggcatcagtcatcttgaaacaatatgtggagactcactggtgtgcccaatcagagaaatttaggcctcctgaaactacagaaagggcaaaaattgttatccgggagctattgcctaatgggttgagagaatcgataagcaaagtgcgctccagtgtggcctatgcagtgtcagccattgcccactgggactggcctgaagcttggccccaactcttcaacctgctcatggagatgttggtgagcggagacttaaatgccgtccatggagccatgcgtgtgctgacagaattcactcgtgaagttacagacacacagatgccacttgttgctcctgtcattctcccagagatgtataagatcttcaccatggctgaggtgtatggtattcgaacccgttcccgagccgtggagatttttaccacttgtgcccatatgatctgtaacatggaggagctggaaaagggtgcagccaaagtcctgatctttcccgtggtacagcagttcacagaggcctttgttcaggccctccagataccagatggccccacatctgacagtgggtttaagatggaggtcctaaaggcagtgacagccctagtgaaaaacttcccaaagcacatggtgtcctccatgcagcagattctgcctattgtttggaacaccctaaccgagagtgcagctttttatgtgaggacagaagtaaattacacagaagaagtagaagatcctgtggattctgatggtgaagtcctgggctttgaaaatctcgtctttagcatttttgaatttgtccatgctctactagaaaatagcaaattcaaaagcactgttaagaaagccttgcctgaattgatttattatattatcctgtacatgcaaatcactgaggagcagattaaagtatggacagccaacccccaacaatttgtagaagatgaagatgatgatacattctcctatactgttagaatagcagctcaagacttgttgctggctgtggccacagatttccagaatgaaagtgcagcagccctggctgctgcagccactcgacatttacaagaagctgagcaaaccaaaaacagtggcactgagcactggtggaagatccatgaggcatgcatgcttgccctaggctcagtgaaggccatcatcactgacagtgtgaaaaatggcaggattcattttgacatgcatgggttcctgaccaatgtcatccttgcagacctcaacctctcagtgtctcctttcctcttgggccgggcactttgggctgccagtcggttcactgttgctatgtcccctgaactgatccagcagttcctacaggcaacagttagtggtcttcacgagacacagcccccatcagttcgaatttctgcagtgagagccatctggggttattgtgaccaactgaaagtctcagagagtacccacgtgctccagcccttcctccccagcatccttgatggcttaattcacctagcagcccagttcagctcagaggtcctcaacctggtgatggagaccctgtgcatcgtttgtacagtagaccccgaattcacagcaagcatggaaagcaaaatctgccccttcaccatcgccattttcctaaagtacagtaatgatcccgtcgtcgcctcactggctcaggacatcttcaaggagctgtcccagattgaagcctgtcagggcccaatgcaaatgaggctgattcccactctggtcagcataatgcaggccccagcagacaagattcctgcagggctttgtgcgacagccattgatatcctgacaacagtagtacgaaatacaaagcctcccctttcccagcttctcatctgccaagctttccctgctgtggcacagtgtacccttcacacagatgacaatgccaccatgcagaatggcggagagtgcttgcgggcctatgtgtcagtgaccctggaacaagtagcccagtggcatgatgagcagggccacaatggactgtggtatgtgatgcaagtggtgagccagctcctggacccccgcacctcagagttcactgcggcctttgtgggccgccttgtttccaccctcatctccaaggcagggcgggaactcggggagaatctagaccagattcttcgtgccatcctcagtaagatgcagcaggcagagacgctcagtgtcatgcagtccctgatcatggtgttcgctcatctggtgcacactcagctagaacctctcttggagttcctgtgtagcctcccaggacctactggcaaacctgctctagagtttgtgatggctgagtggacaagccgacagcacctgttctatggacagtatgaaggcaaagtcagctctgtggcactctgtaagctgctccagcatggcatcaatgcagatgacaaacggctacaggatatccgtgtgaagggagaggagatctacagcatggatgagggcatccgcacccgctctaagtcagccaaaaacccagaacgctggacaaacattcctttgctggtcaagatcctaaagctgatcatcaacgagctctccaacgtcatggaggctaatgccgctcgccaggccactcctgcagagtggagtcaagatgactccaatgatatgtgggaggaccaggaggaggaagaggaggaggaggaggatggtttagctggccaacttttatctgacattcttgctacaagtaaatatgaggaggattactacgaggatgatgaggaagatgaccctgatgccctgaaggatcctctctatcagattgatctgcaggcatatctcacagatttcctctgccagtttgctcagcagccctgctacataatgttttcaggccaccttaatgacaatgagaggcgagttctacagaccatcggcatctaa

SEQ ID NO: 23719 - DNA, 4170 bp, Homo Sapiens
gtagatgaggaaactgaagttgaggaatagtgaagagtttgtccaatgtcatagccccgtaatcaacgggacaaaaattttcttgctgatgggtcaagatggcatcgtgaagtggttgttcaccgtaaactgtaatacaatcctgtttatggatttgtttgcatatttttccccccatagggaaaccttttttccatggctcaggacacactcctggatcgagccaacaggagaactttctggtaagcatttggctaacttttttttttttgagatggagtcttgctgtgtcgcctaggctggagtgcagtggcgtgatcttggctcactgcagcctccacctcccgggttcaatcaattctcctacctcaacttcctgagtagctgggattacaggcgcccgccaccacacccggctcatttttgtacttttagtagagacacagttttgccatgttggccaggctggtcttgaattcctcagctcaggtgatatgcctgccttggcctctcaaagtgctgggattacaggcgtgagccactgtgcccggccttggctaacttttcaaaattaaagattttgacttgttacagtcatgtgacatttttttctttctgtttggtgagtttttgataatttatatctctcaaagtggagactttaaaaaagactcatctgtgtgccgtgttcactgcctggtatcttagtgtggaccgaagcctaaggaccctgaaaacagctgcagatgaagatggcaagcacccgctgcaagctggccaggtacctggaggacctggaggatgtggacttgaagaaatttaagatgcacttagaggactatcctccccagaagggctgcatccccctcccgaggggtcagacagagaaggcagaccatgtggatctagccacgctaatgatcgacttcaatggggaggagaaggcgtgggccatggccgtgtggatcttcgctgcgatcaacaggagagacctttatgagaaagcaaaaagagatgagccgaagtggggttcagataatgcacgtgtttcgaatcccactgtgatatgccaggaagacagcattgaagaggagtggatgggtttactggagtacctttcgagaatctctatttgtaaaatgaagaaagattaccgtaagaagtacagaaagtacgtgagaagcagattccagtgcattgaagacaggaatgcccgtctgggtgagagtgtgagcctcaacaaacgctacacacgactgcgtctcatcaaggagcaccggagccagcaggagagggagcaggagcttctggccatcggcaagaccaagacgtgtgagagccccgtgagtcccattaagatggagttgctgtttgaccccgatgatgagcattctgagcctgtgcacaccgtggtgttccagggggcggcagggattgggaaaacaatcctggccaggaagatgatgttggactgggcgtcggggacactctaccaagacaggtttgactatctgttctatatccactgtcgggaggtgagccttgtgacacagaggagcctgggggacctgatcatgagctgctgccccgacccaaacccacccatccacaagatcgtgagaaaaccctccagaatcctcttcctcatggacggcttcgatgagctgcaaggtgcctttgacgagcacataggaccgctctgcactgactggcagaaggccgagcggggagacattctcctgagcagcctcatcagaaagaagctgcttcccgaggcctctctgctcatcaccacgagacctgtggccctggagaaactgcagcacttgctggaccatcctcggcatgtggagatcctgggtttctccgaggccaaaaggaaagagtacttcttcaagtacttctctgatgaggcccaagccagggcagccttcagtctgattcaggagaacgaggtcctcttcaccatgtgcttcatccccctggtctgctggatcgtgtgcactggactgaaacagcagatggagagtggcaagagccttgcccagacatccaagaccaccaccgcggtgtacgtcttcttcctttccagtttgctgcagccccggggagggagccaggagcacggcctctgcgcccacctctgggggctctgctctttggctgcagatggaatctggaaccagaaaatcctgtttgaggagtccgacctcaggaatcatggactgcagaaggcggatgtgtctgctttcctgaggatgaacctgttccaaaaggaagtggactgcgagaagttctacagcttcatccacatgactttccaggagttctttgccgccatgtactacctgctggaagaggaaaaggaaggaaggacgaacgttccagggagtcgtttgaagcttcccagccgagacgtgacagtccttctggaaaactatggcaaattcgaaaaggggtatttgatttttgttgtacgtttcctctttggcctggtaaaccaggagaggacctcctacttggagaagaaattaagttgcaagatctctcagcaaatcaggctggagctgctgaaatggattgaagtgaaagccaaagctaaaaagctgcagatccagcccagccagctggaattgttctactgtttgtacgagatgcaggaggaggacttcgtgcaaagggccatggactatttccccaagattgagatcaatctctccaccagaatggaccacatggtttcttccttttgcattgagaactgtcatcgggtggagtcactgtccctggggtttctccataacatgcccaaggaggaagaggaggaggaaaaggaaggccgacaccttgatatggtgcagtgtgtcctcccaagctcctctcatgctgcctgttctcatggattggtgaacagccacctcacttccagtttttgccggggcctcttttcagttctgagcaccagccagagtctaactgaattggacctcagtgacaattctctgggggacccagggatgagagtgttgtgtgaaacgctccagcatcctggctgtaacattcggagattgtggttggggcgctgtggcctctcgcatgagtgctgcttcgacatctccttggtcctcagcagcaaccagaagctggtggagctggacctgagtgacaacgccctcggtgacttcggaatcagacttctgtgtgtgggactgaagcacctgttgtgcaatctgaagaagctctggttggtcagctgctgcctcacatcagcatgttgtcaggatcttgcatcagtattgagcaccagccattccctgaccagactctatgtgggggagaatgccttgggagactcaggagtcgcaattttatgtgaaaaagccaagaatccacagtgtaacctgcagaaactggggttggtgaattctggccttacgtcagtctgttgttcagctttgtcctcggtactcagcactaatcagaatctcacgcacctttacctgcgaggcaacactctcggagacaaggggatcaaactactctgtgagggactcttgcaccccgactgcaagcttcaggtgttggaattagacaactgcaacctcacgtcacactgctgctgggatctttccacacttctgacctccagccagagcctgcgaaagctgagcctgggcaacaatgacctgggcgacctgggggtcatgatgttctgtgaagtgctgaaacagcagagctgcctcctgcagaacctggggttgtctgaaatgtatttcaattatgagacaaaaagtgcgttagaaacacttcaagaagaaaagcctgagctgaccgtcgtctttgagccttcttggtaggagtggaaacggggctgccagacgccagtgttctccggtccctccagctgggggccctcaggtggagagagctgcgatccatccaggccaagaccacagctctgtgatccttccggtggagtgtcggagaagagagcttgccgacgatgccttcctgtgcagagcttgggcatctcctttacgccagggtgaggaagacaccaggacaatgacagcatcgggtgttgttgtcatcacagcgcctcagttagaggatgttcctcttggtgacctcatgtaattagctcattcaataaagcactttctttatttt

SEQ ID NO: 23720 - DNA, 3979 bp, Homo Sapiens
  misc_feature (639)..(639): n is a, c, g, or t
cggcgggcgccctgtgagcggccccgatgtggcaggaggcgatgcggcgccgccgctacctgcgggaccgctccgaggaggcggcgggcggcggagacgggctgccgcggtcccgggactggctctacgagtcctactactgcatgagccagcagcacccgctcatcgtcttcctgctgctcatcgtcatgggctcctgcctcgccctgctcgccgtcttcttcgcgctcgggctggaagttgaagaccatgtggcgtttctaataacagttccaactgccctggcgattttctttgcgatatttatcctggtctgcatcgagtctgtgtttaagaagctgctgcgcctcttctcgttggtgatatggatatgccttgttgccatgggatacctgttcatgtgttttggaggcaccgtctctccctgggaccaggtatcgttcttcctcttcatcatcttcgtggtgtacaccatgctgcccttcaacatgcgagacgccatcattgccagcgtcctcacctcctcctcccacaccatcgtgcttagcgtctgcctgtctgcaacaccgggaggcaaggagcaccttggtctggcagatcctggccaatgtgatcattttcatctgtgggaacctggcnggactaaccataagcacctcatggaactcgctcttcagcaaacatatcaggacacctgtaattgcatcaagtcgcggatcaagttggaatttgaaaaacgtcaacaggagcggcttctgctctccctgctgccggcccacatcgccatggagatgaaagcggagatcatccagaggctgcagggccccaaggcgggccagatggagaacacaaataacttccacaacctgtatgtgaagcggcatacaaacgtgagcatcttatacgctgacatcgttggctttacccggctggcaagtgactgctccccgggagaactagtccacatgctgaatgagctctttggaaagtttgatcaaattgcaaaggagaatgaatgcatgagaattaaaattttaggagactgctactactgtgtatctggactccctatatctctccctaaccatgccaagaactgtgtgaaaatggggctggacatgtgtgaagccataaagaaagtgagggatgctactggagttgatatcaacatgcgcgtgggcgtgcattctgggaatgtcctgtgtggcgtgattggtctgcagaagtggcaatatgatgtgtggtcacatgatgtgaccttggccaaccacatggaagctggaggggtccctggacgtgttcacatttcttctgtcaccctggagcacttgaatggcgcttataaagtggaggagggagatggtgacattagggacccatatttaaaacagcacctggtgaaaacctactttgtgatcaaccccaagggagaacgacggagcccccagcatctcttcagacctcgccacacccttgatggagccaaaatgagggcctcggtccgcatgacccggtacttggagtcctggggggcagccaagccctttgcacacctacatcacagggacagcatgaccacagagaacggcaagatcagcaccacggatgtacccatgggtcagcataattttcaaaatcgcaccttaagaaccaagtcacaaaagaagagatttgaagaagaattgaatgaaaggatgattcaagcaattgatgggattaatgcacagaagcaatggctcaagtctgaagacattcagagaatctcactgcttttctataacaaagtactagaaaaagagtaccgggccacggcactgccagcgttcaagtattatgtgacttgtgcctgtctcatattcttctgcatcttcattgtgcagattctcgtgctgccaaaaacgtctgtcctgggcatctcctttggggctgcgtttctcttgctggccttcatcctcttcgtctgctttgctggacagcttctgcaatgcagcaaaaaagcctctcccctgctcatgtggcttttgaagtcctcgggcatcattgccaaccgcccctggccacggatctctctcacgatcatcaccacagccatcatattaatgatggccgtgttcaacatgtttttcctgagtgactcagaggaaacaatccctccaactgccaacacaacaaacacaagcttttcagcctcaaataatcaggtggcgattctgcgtgcgcagaatttatttttcctcccgtactttatctacagctgcattctgggactgatatcctgttccgtgttcctgcgggtaaactatgagctgaagatgttgatcatgatggtggccttggtgggctacaacaccatcctactccacacccacgcccacgtcctgggcgactacagccaggtcttatttgagagaccaggcatttggaaagacctgaagaccatgggctctgtgtctctctctatattcttcatcacactgcttgttctgggtagacagaatgaatattactgtaggttagacttcttatggaagaacaaattcaaaaaagagcgggaggagatagagaccatggagaacctgaaccgcgtgctgctggagaacgtgcttcccgcgcacgtggctgagcacttcctggccaggagcctgaagaatgaggagctataccaccagtcctatgactgcgtctgcgtcatgtttgcctccattccggatttcaaagaattttatacagaatccgacgtgaacaaggagggcttggaatgccttcggctcctgaacgagatcatcgctgactttgatgatcttctttccaagccaaaattcagtggagttgaaaagattaagaccattggcagcacatacatggcagcaacaggtctgagcgctgtgcccagccaggagcactcccaggagcccgagcggcagtacatgcacattggcaccatggtggagtttgcttttgccctggtagggaagctggatgccatcaacaagcactccttcaacgacttcaaattgcgagtgggtattaaccatggacctgtgatagctggtgtgattggagctcagaagccacaatatgatatctggggcaacactgtcaatgtggccagtaggatggacagcaccggagtcctggacaaaatacaggttaccgaggagacgagcctcgtcctgcagaccctcggatacacgtgcacctgtcgaggaataatcaacgtgaaaggaaagggggacctgaagacgtactttgtaaacacagaaatgtcaaggtccctttcccagagcaacgtggcatcctgaagagtcaccttcattttggcaagaagactgtattttcaggaaggtatcacacactttctgactgcaacttctgtcccttgtttttgatgtgcgtgctgtctgtcctatggagcctctgcagactcgttctcgtgacccagtggcataccgtttggtgtctgatgtgtgccagatcgttctgccacttgcactgtgcttgctcctaagcaaaagggaaaaggagcgcgcgtgatagaagaaaagcactgggagaactaacagaggagaaaggtgaaacacacacacattcttaaggcaataaaactagggggtgtatattatcttctggtgcatgttcttttctggaaaatatggtagctcgccaaccgcatctgctcatctgatattcaaacacacagtattcgtgaataagttgattctgtcccccacgtggactctgtgctcacccattgtctcattgccagtggtgtccaagggcccccgttgggacccacggctctcgtccctctgctccgtgtgtctcatgccagcagcacgtcgccatccgtcaccagaattagtcctcacagcctaggaccagttttgtatcaaactcgtctgatgttttgatgccatttgtcttttgtaaagttaattcattaaaagttttatgtactttgaaaaaaaaaaaaaaaaaa

SEQ ID NO: 23721 - DNA, 8240 bp, Homo Sapiens
gggagcaggagcctcgctggctgcttcgctcgcgctctacgcgctcagtccccggcggtagcaggagcctggacccaggcgccggcggcgggcgtgaggcgccggagcccggcctcgaggtgcataccggacccccattcgcatctaacaaggaatctgcgccccagagagtcccggacgccgccggtcggtgcccggcgcgccgggccatgcagcgacggccgccgcggagctccgagcagcggtagcgcccccctgtaaagcggttcgctatgccgggaccactgtgaaccctgccgcctgccggaacactcttcgctccggaccagctcagcctctgataagctggactcggcacgcccgcaacaagcaccgaggagttaagagagccgcaagcgcagggaaggcctccccgcacgggtgggggaaagcggccggtgcagcgcggggacaggcactcgggctggcactggctgctagggatgtcgtcctggataaggtggcatggacccgccatggcgcggctctggggcttctgctggctggttgtgggcttctggagggccgctttcgcctgtcccacgtcctgcaaatgcagtgcctctcggatctggtgcagcgacccttctcctggcatcgtggcatttccgagattggagcctaacagtgtagatcctgagaacatcaccgaaattttcatcgcaaaccagaaaaggttagaaatcatcaacgaagatgatgttgaagcttatgtgggactgagaaatctgacaattgtggattctggattaaaatttgtggctcataaagcatttctgaaaaacagcaacctgcagcacatcaattttacccgaaacaaactgacgagtttgtctaggaaacatttccgtcaccttgacttgtctgaactgatcctggtgggcaatccatttacatgctcctgtgacattatgtggatcaagactctccaagaggctaaatccagtccagacactcaggatttgtactgcctgaatgaaagcagcaagaatattcccctggcaaacctgcagatacccaattgtggtttgccatctgcaaatctggccgcacctaacctcactgtggaggaaggaaagtctatcacattatcctgtagtgtggcaggtgatccggttcctaatatgtattgggatgttggtaacctggtttccaaacatatgaatgaaacaagccacacacagggctccttaaggataactaacatttcatccgatgacagtgggaagcagatctcttgtgtggcggaaaatcttgtaggagaagatcaagattctgtcaacctcactgtgcattttgcaccaactatcacatttctcgaatctccaacctcagaccaccactggtgcattccattcactgtgaaaggcaaccccaaaccagcgcttcagtggttctataacggggcaatattgaatgagtccaaatacatctgtactaaaatacatgttaccaatcacacggagtaccacggctgcctccagctggataatcccactcacatgaacaatggggactacactctaatagccaagaatgagtatgggaaggatgagaaacagatttctgctcacttcatgggctggcctggaattgacgatggtgcaaacccaaattatcctgatgtaatttatgaagattatggaactgcagcgaatgacatcggggacaccacgaacagaagtaatgaaatcccttccacagacgtcactgataaaaccggtcgggaacatctctcggtctatgctgtggtggtgattgcgtctgtggtgggattttgccttttggtaatgctgtttctgcttaagttggcaagacactccaagtttggcatgaaagatttctcatggtttggatttgggaaagtaaaatcaagacaaggtgttggcccagcctccgttatcagcaatgatgatgactctgccagcccactccatcacatctccaatgggagtaacactccatcttcttcggaaggtggcccagatgctgtcattattggaatgaccaagatccctgtcattgaaaatccccagtactttggcatcaccaacagtcagctcaagccagacacatggcccagaggttcccccaagaccgcctgataataatttggtatttggaggctcctgtgtcactgcaggaactaaaggaggctaaatccatgcctgatggaggagaagagttctatggttatctgcaaattctggccagacaacatcttgacgtcactccttagcttccataacctagccaagcaagaagttgcctttccaagacaaagcagtgtgctctaatgactaacccctcaaagtactatgccactttaactatagacccatctcctcgatcaatcaggatggcaagatggagctgaggagctcagcaacatcaagtctggagttggtctttaactcaactagctcgtttagacgtgtctgaacaccacatcacctgacagcacggggtggtttcccagtaaaatttacaaactcagctcaagggcagctgtgttgctttcctttccttgactgctgagaaactttttgacagggaacaatggaaacacaccttctgagctgaaacaaacaaacagaaacaaaacatactaaccagcaaaatccccaaatcatcaatcttgggttctcttgaagggcaggagtgtgttttatcttctcccgtcggagcaaacactatagatgtcctccctaaaattctgtcttccctagagcagccttgtaaattagctagggtcctagggttgaggcctaaatcaacttaaaattgtctctaaatatgtacctggatgtgtttgtacttgcagagcatgccctcttcatgtgcctagggctagtaactccctgtggcagaggcatgtaaagtattctgactttttttttttcaacttaattccatttccaatgaaatggatttttaaaaattttctccagagtgtgccatacttctccagctattatagttaatgtgtgtgtatccttgtgtatatgtgtgtttgtgtgtgcatatgtgttttcctagtggttacatgcttactaggcaattatgtaaataagcacagattcataggccagctaggcctgaggaaagaagacattataaagggagggagtattttaacattagctaaagctatcacacaaggcacccattctgctcccctcaacagccacagcccacttcgtccttgtcttaccaataaggggaaaggctggaggtgatatttttcacagaaccgcagaggttttgaacatatttgcaacattactttgagtacacatgagcaaaaattctgaattacatccaggaccccagaagctcattagatcaaagagtgcggggcccctcagagttaccagagattatctgcagacttcagtgcaatcgaatgaccatggtccattttgatggtcagaggtaggactgaaaaacgggtagaaacaattgctttagcgcttccttctgtactttgcctattaatgttttgtctttcaaaaatatattttctcctaattgtttaattggccaaataatggctgctttgggagttgtttgtatgccttggaaggccatggcctgcactttaaaaataagctaagtccattctgcccagcacgagcattaggacagagaatgcacttattttaggatccttaaaaattgcttcttttatggcacactgggttgacgactcatctcgtgggagccttcatggcacattgctgctgttctgcaggtcccaatacaattccttccccctctcagtgccacggcccccccattgctagctacacaatttgatatcatattcccttttcaactccaaaggagatgataagaagctatcaaataatgctttaaaaaagcaacttgagtttcttaaaagaaaggaaatgaatacatgctgcataattacatttaaaatgtaagccatgttattataagccgcactgagatgaagatttgttagcaaaccagtttcaagcacactcacagtgaagtaaaatcatgtttttagcatctgaccattgggtaatattattctttgttatcaaaagagaaatatcacccaagtatagtatacttagacctcctagaggaaacactccagtcctaagcttggtgtctgaaaagaaaaacaaaaataaagattatggatttaggtcagggagacagagtgatattctgaagactgtgtttactccctcatcatcggccaaccaagatggagttctgcatcctgcacatatcagacatttcagtccaatttcaccaaagcatcagtgatgttctagaagcatcccagcagatggaggatcctaatgtatttgttctgggtatttcccaaggcccagcctgactggagtgtgtgtaccaacaggatgaatccaatcaagctacgcccccattttggtttcggattggccactcttgcatgtgctagtagattgtggaccaggaccagctgagcaaacacagttgcagagtagcctcctatgttgctaagaagctcctgctacccaggtgctttgaacaattgagtgctccctctggttaagtagagatggcaccaccggagtttttcttggatgtgaggctcaatcctttacggcagctattataacaaagtgaaggttttctccctgggaaatgcagcttttctctgtctttactaattctgccagcctgtgagagtaaccaccgtagctgggcttcttctcagattaattgtcatgccaggtctccttcctggggagctgtgatgctgctctgaggttgattgctgaggttgtagtgggtttttgtttgtttttgtttagtttttcttgattgttcttctttctcttgaatggcaagagaagaaacactttctctaacccacggccaggaaggaaatggggagagagctacttcttagttcaacctggttgccacataaaggaatctctctccttggactcagcccctaactggaagcaagagccactgccctctgagactgagagagcagcccgaggaggagatgaatccattctgccctttgtttgggtttgcttcctgtcagtgagagaatgctgaggcagttcctgttatgtgaaactttcatttttaaaaccaggacagtcctaaacagactggaatgagttggtcaatcccagttggtataggcccaatgatttttgctagtaagataggattgtcttcctcacccaaaatgccttcaagtgccctaaaatgggtattttaaaataagaataaataatgtagatttagtagaaaacctggaaaacataagaaacaaagatgaaacgaaaagtcccatgtaattccaccagttagagttaaccactgatatcgtttggatatatggctttctagtcttgtggatatccttttaatctcttgtaatataaagtctgaccatatgtgtccttgcatttgtttgtactggactctgttaatatttctatagtaatggctcactttggggagattgtgctgcacagtgtgtaggaagcacattgggtgtattattcccagttttgtattttgtatttccttggagatgtgcaggggttaagagcgggggtctggccatagctggccacgtcagactctcatatggtaagtatcacagagcacatgaggcctgtgttatgcgctggaaagactcaggaaatgagaggctctcttgttctgacaaggcaggctgagagctctcatttagggtcatcactccagataactccaaatgcagtttattgctcaactgaagcagatgatcactttttgcctccaagttcttcaccctagctagctcctttcaaagagccgagtatgctggatcttaaagggccaaactagttacatctcatacatttcctgatgtttagggatgccttcacttccatcaaggataccttggctgtgcaaggacctctgatagctggagtctccttttggtcactcccagctttgcttaaacttgatggagtttgctgtccagtgatccccggatctttcatcatgaaagccttccttcctctcctgatgtctcaggcctctagacctagactggggttctggcaaggaggcctctatcaatagtatgacatccaataatatgttagtgttgatattttgcacagtaatattaagtttaagagattataaaaatgagttcaaatgaataagttcctgtgatgtaagagattagatatgtgtgatttcagaaccaaagccaggggggaatcccagaaagaaaacaataatataatcctagtttctatatattatttttattcattactgtatatgggtagagatcaatattctttcttatgctgttactattaattaacacattttttaaccatgccattgaacttttgggtgcattaaagtggaacccaagctcctcattagataataatggcatttggactgagtgccatattcctaaatttccaataaagtggttgatatagagaggacaggataaagccctatagtgtgcagttatatcaaaacagctagtctccactttagggaatgcctttactagagattacatgaaatgtctgcttataaaataagcagagatggtaccactaagcagccacctgaattgttttcctacaggaatgattacttttcagatccatttatgttttcatgctcaatacttactccccttccctgcaacacccaaagagtttacttttgcaagtcatttggtcttcagtctactactgaggaatagagaggcactaactgctttacccaggatcagaactcatgttcttaccttctattaatagagtacttgagccagatggactaactggtctcacattttctctatcttggttttacttccataaacatcaatatctttacccacatgatttttccatcctcccatttttttccatatgtattagggttcaggaactatgatgctaatgatcacatttcttcctagttcctaatttcattagtgccatttcctgatatctacagaaacaattatcaatacatgtagctgcttgagccttatttagaaggctagcctttcttttccaagtgctgtcagaatgtatacatttagtctgtctttttcccttttaggagtctttgttctgggttgatggcaaaattcctctttttacatgtgagatttttgatttcactgaattctacctagatttttatggacattggattttaaagaggaaaacactcattttcttagtaagatattggtgatacatagctatgccattgatttccatactcctgagctttggggagggagacagtggccaagtagcaggcagaataagatcatcactcatgtcctgaatcaatcacactttccttctcggattgtgtatatgctctgccacttcctacatattacatcctgagtttttaagtaaagtggatcttagccagatttgagtctaatggctgattcatcggcatagttcttggcgttaacatctcagtgtcctctttagttctctttgaggattcatgtcattgagggcctttgtgcctccacttgtctcagtatgaggaagaactttggtgtgagggcggagctatgtgaagggttgctgggttgggggattagttcatatggtccccatgccatctatttacttttggagagaggggactttgagtgggtgggtatggatagatgttcctcaaggaaaccctgctggctaatgggcactacatctgtgtattactgtgattctctctgtaagctccccatgtggccaaggacccccctcctaccagggcacttcctgccacctcattgcactggtctcaaccattcagcctgctgctgctgcaccatgttgggctgcggtaggatagggaaggggttctgttgattgctaaatgttgcctaactttatttccctctcccacatttcatgcaagggagcggacctaacacatgacttgcattctcttcctatgttcagaaactccagggcttgcccacgtgtatgtatgagtgaccaatggagcttggaattctttatctatatgatctgtccgaaaatgagatcttttgtactggaatttgtgatgtagttgatcattcagagccaaacgcatataccaataaagacaagactgtcatataaaaaaaaaaaaaaaaa

SEQ ID NO: 23722 - DNA, 3857 bp, Homo Sapiens
agtaacgccttctccaagtggatggcggggtggacacgcgtcccggcgccccgggctccctgggatatgtagttcgcgacaggacgagcggaaatactgccaggattttaccacctctcgcccatttatttacttctcggtcaccgctttcgggggacagataaacaccacagatgcccatcaaaggggcgcacgggtctggaggcgcagctcaggtttttgcgttggtcaccctgccctccgcacgtggagagggcaggcataaagcaccttgaaaggaaggtgctgtcaatgctatccgacgacctgtcgccgggcaccgcagcatcctcgctcgctccgatgggacgagggacgccggccccagggtaacaggaggcgcctcgccggccgcgcgctggatgctgtgatccaggtccggagccgggttccgccgcggccgcagcgacccgaccccacccgacaggccagaggaatcagtttagacttgaaattcagtttttcctgaaactgatcagaagttagtgacaccttgattggatccgtttttctgtcaggagctcattttgcagctctcaagcttttatagcatgctgtaaacaattgtcaaagttgtttatcaagaaacagatagagttgcaacttgtttctagtaatagaaacttttacactgcattcaatgcctaacgttgcagaaacagaaaggtcaaatgattctggaaatggtgagcacaaatctgagagaaagtcacctgaagagaatctacaaggtgctgtaaaatctttctgcacaagtgcctcaggagcacccttgggtcccaaaggagatggtcattatccatggagttgtccagtgactcatacacgggaaaaaatttatgccatctgttcggactatgcctttctcaaccaggcgacctcaatctataaaactccaaatccatcccgctctccttgcctccctgatagtacctctttatctgctggaaataattcatcaagatacattggtatcccgactagtacatcggaaattatctacaatgaagaaaatagcttggaaaacttatccaacagcctgggcaagctacctctcgcatgggaaattgataaatctgaatttgatggggtgaccacaaattcgaaacacaaatcaggcaatgcaaagaaacaagtttccaagagaaaaacttcagataaaaagggaagatatcagaaggaatgtcctcagcattctcctcttgaagatattaaacagcggaaagtattagacctcagacgatggtactgcataagccgaccacagtataagacttcttgtggcatctcttcattaatttcttgttggaatttcttatacagcacaatgggagctggaaaccttccacctattacccaagaagaagctttacatattctgggctttcaacctccatttgaagatattaggtttggtcctttcacggggaatacaacacttatgaggtggtttagacaaattaatgaccacttccatgtaaaaggatgctcttatgttctatataagcctcatgggaagaataaaacagcaggagaaactgcttcaggggccctgtcaaagttaacccgtggattgaaagatgaatcgctggcttatatctatcattgccaaaatcattatttttgtccaattggcttcgaagcaacccctgttaaagctaataaagcattcagcaggggacctctctcaccacaggaagttgaatattggatcttaattggagaatcaagtagaaaacatcctgccattcactgtaaaaaatgggcagatattgttactgatctaaacactcaaaatccagaatacctggatatccggcacttagagaggggactgcagtatagaaaaacaaagaaggttgggggaaatttgcattgcatcatagcattccagagacttaactggcaaagatttggcctttggaactttccatttggaaccattagacaagaatcacaacctccaacacatgcccagggaattgccaaatctgagagtgaagacaatatttccaagaagcagcatgggcgtctgggccggtctttcagtgctagtttccatcaggactcggcatggaaaaagatgtctagtatccatgagagaaggaacagtggttaccagggttacagtgattacgatgggaatgattgactatgcttgctactgaacagctggcattatatatgaaactgctatatacaggactgtataaagacagtagaagattttagtaagcctacattaaataggagcagatcttgtggtataaaaaataaccttgtagttctccagatactaagcttgtatatgattatggtgggtgatttcagatatataagcagataagcacagattattgtcctttcaagttaagagtatataatctggacagaaaatttcacaaaattcaataaaattacaactgttgtctaaataagtgaaacacaaattcacttaatagcatcaagatttgaaatacttaagcatgaagtgacttttataatgactcgatccctagacatttgttacagatagttttatgcctaagaccaagatgtaaagtaccatctgcccttaaaaaaaattggggctgtcaatttctagttttcactcatggttaacacgcatttaaaattatttcatgagtctagtagttctttgatttatagcaggatcttgcttgcctcatttgtttcctggttatgttcttaggattctgactaagaggcaaaagagaaaagactcaagaaactgatcctggagatcgagaccatcctggctaacatggtgaaaccccgtctctactaaacatacaaaaaattagccgggtgtagtggtgggcacctgtagtcctagctactcgagaggctgaggcaggagaatggcgtgaacccgggaggtggagcttgcagtgagcggagatcgcgccactgcactccagcctgggcgacagggcaagactctgtctcaaaaaaaaaaaaaaaaaaaaagacggatccttttttttggtgcaaatgggtgacttagtgcattgattcagatttttaaaatttcttgatgtggtttgtaataatcaaatattgacaagaaccttaggtctcgaaagacttttataagtctagatgacgtttgccttaggggtaaagtaaaagaacaattggcaccttaagtttctatacccaaggttatctgtgaaatgagatctcctgatatttgattgctttctcagtatggagtcatatgttgataacagtactgaagatgcataagaaatgcccaagtcactcagaggacaactacccatattccagactctgagctgtttcctttttaaaaatcatatagacaattagctgtttgaagtgagtattaaatatttcagaagtgtgaatttcatgtatttgagctcctctagttgctgttggtttttcttctgctgccaacctgtgactcacaaatgactaggatctcttgttctttaattttagggtcttgttccaggactcaaatcagtaacttggtgattacaaggtgctgaatgtgttggtaaccatatcgcaatacacctcaaggaaaaggttcagatttttatttttaaaatattttcatttttttcttgaattttatatccgtttgttcactcgtacatgcctagcctacagaaggggatatatattatgaaatggtcatttttctgaagagaatattttgcttgaaatgcaaaggactgaaagagatttgtaggttgttgattttgttacttcatactggaacttttaaaaagatttcatcaaataaagttttgttttctactttt

SEQ ID NO: 23723 - DNA, 1773 bp, Homo Sapiens
atggctaaactgagtatcaaaggactcattgaatctgctctgagctttggccgcactttggattctgactatccccccttgcagcaattctttgttgttatggaacattgcctgaaacacggtcttaaagtaagaaaatcatttttgagttacaacaaaaccatctggggccctttggaactggtggagaagctgtaccccgaagcagaggaaataggagctagtgtccgggatctacctggtctgaagacccctctgggtcgagcaagagcgtggcttcgattagccctcatgcaaaaaaaaatggccgattacttacgttgcttaattattcagagggatctcttgagtgagttttatgagtatcacgcactaatgatggaagaagaaggagcagtaattgttgggctgctggttggcctgaatgtgatcgatgctaatctgtgtgtgaagggagaggatttagactcacaagttggagtgattgatttttctatgtatttaaagaatgaagaagatattggaaataaagaaaggaatgttcaaattgctgccatattagaccaaaagaattatgttgaagaattaaatagacaactgaacagcacagtcagcagcctccattcaagagttgattcattagaaaagtcaaatactaagctgattgaagagttagcaatagcaaagaataacatcattaaactccaggaagaaaatcatcaattacgaagtgaaaataaattgattttaatgaaaacacagcagcacctagaggttaccaaagtagatgtggaaactgagcttcaaacatataagcattctcgtcaggggctagatgaaatgtacaatgaagccagaaggcagcttcgagatgaatctcagttacgacaggatgtagagaatgagctagcagtacaagttagtatgaagcatgagattgaacttgccatgaagttgctggagaaagatatccatgagaaacaagatactctgataggccttcgacaacaactagaggaagttaaagcaattaacatagagatgtatcaaaagttgcagggttctgaagatggcttgaaagaaaaaaatgaaataattgcccgactagaagaaaaaaccaataaaattactgcagccatgaggcagctggaacaaagattgcagcaagcagagaaggcgcaaatggaagctgaagatgaggatgagaaatatctacaagaatgtctcagtaaatctgatagtctgcagaaacaaatctcccaaaaggagaaacagctggtgcaactggaaactgacttgaagattgagaaggaatggaggcagactttgcaggaagatcttcaaaaggagaaagatgccttatctcatcttagaaatgagactcaacaaatcattagtcttaaaaaagagttccttaacctccaggatgaaaatcagcagttgaaaaaaatatatcatgaacaagagcaagctcttcaagaactcggcaacaagcttagcgaatcaaaacttaaaattgaagacataaaagaagccaacaaagcattgcagggactggtttggctgaaagacaaagaagcaacacattgtaaactttgtgaaaaggaattctcactctctaagagaaagcaccactgtagaaattgtggggaaattttctgtaatgcctgctctgacaacgaactacctttgccttcttcaccaaaaccagtacgggtttgtgattcctgtcatgcattgctcattcagagatgctcatctaacttgccctga

SEQ ID NO: 23724 - DNA, 2280 bp, Homo Sapiens
atggtggaagccggtaaggcctacgtcagcaccagcaggcttttcgtgagcggcgtccgcgacctgtcccagcagtgccagggcgacaccgtcatctcggaatgtctgcagaggttcgctgacagcctacaggaggtggtgaactaccacatgatcctgtttgaccaggcccagaggtccgtgcggcagcagctccagagctttgtcaaagaggatgtgcggaagttcaaggagacaaagaagcagtttgacaaggtgcgggaggacctggagctgtccctggtgaggaacgcccaggccccgaggcaccggccccacgaggtggaggaagccaccggggccctcaccctcaccaggaagtgcttccgccacctggcactggactatgtgctccagatcaatgttctgcaggccaagaagaagtttgagatcctggactctatgctgtccttcatgcacgcccagtccagcttcttccagcagggctacagcctcctgcaccagctggacccctacatgaagaagctggcagccgagctggaccagctggtgatcgactctgcggtggaaaagcgtgagatggagcgaaagcacgccgccatccagcagcggacgctgctgcaggacttctcctacgatgagtccaaagtggagtttgacgtggacgcgcccagtggggtggtgatggagggctacctcttcaagagggccagcaacgctttcaagacatggaaccggcgctggttctccattcagaacagccagctggtctaccagaagaagctcaaggatgccctcaccgtggtggtggatgacctccgcctgtgctctgtgaagccgtgtgaggacatcgagcggaggttctgcttcgaggtgctgtcacccaccaagagctgcatgctgcaggctgactccgagaagctgcggcaagcctgggtccaggctgtgcaggccagcatcgcctccgcctaccgcgagagccctgacagttgctatagcgagaggctggaccgcacagcatccccgtccacgagcagcatcgactccgccaccgacactcgggagcgtggcgtgaagggcgagagtgtgctgcagcgtgtgcagagtgtggccggcaacagccagtgcggcgactgcggccagccggacccccgctgggccagcatcaacctgggcgtgctgctctgcattgagtgctccggcatccacaggagcctgggtgtccactgctccaaggtgcggtccctgacgctggactcgtgggagcctgagctgctaaagctgatgtgtgagcttggaaacagcgctgtgaatcagatctatgaggcccagtgtgagggtgcaggcagcaggaaacccacagccagcagctcccggcaggacaaggaggcctggatcaaggacaaatacgtggaaaagaagtttctgcggaaggcgcccatggcaccagccctggaggccccaagacgctggagggtgcagaagtgcctgcggccccacagctctccccgcgctcccactgcccgccgcaaggtccggcttgagcccgttctgccctgtgtggccgctctgtcctcagtgggcaccctggatcgtaagttccgccgagactccctcttctgtcccgacgagctggactcgctcttctcctacttcgacgcaggggccgcaggggctggccctcgcaagggtgcagagtcggaggagtccagcggtgaggcagacggggacactgaggccgaggcctggggcctggcggacgtgcgcgagctgcacccggggctcttggcgcaccgcgcagcgcgtgcccgcgaccttcctgcgctggcggcggcgctggcccacggggccgaggtcaactgggcggacgcggaggatgagggcaagacgccgctggtgcaggccgtgctagggggctccttgatcgtctgtgagttcctgctgcaaaacggagcggacgtgaaccaaagagacagccggggccgggcgcccctgcaccacgccacgctgctgggccgcaccggccaggtttgcctgttcctgaagcggggcgcggaccagcacgccctggaccaagagcagcgggacccgttggccatcgcagtgcaggcggccaacgctgacatcgtgacactgctccgtctggcgcgcatggcggaggaaatgcgcgaggccgaggctgcccctggtcccccgggcgccctggcgggcagccccacggagctccagttccgcaggtgtatccaggagttcatcagcctccacctggaagagagctag

SEQ ID NO: 23725 - DNA, 2415 bp, Homo Sapiens
atgaactaccagcagcagctggccaactcggctgccatccgggccgagatccagcgcttcgagtcggtccaccccaacatctactccatctacgagctgctggagcgcgtggaggagccggtgctgcagaaccagatccgggagcacgtcatcgccatcgaagatgccttcgtgaacagccaggaatggacgctgagtcgatctgtcccggagctcaaagtgggaattgtgggtaacttggccagcggcaagtctgccctggtgcaccggtacctgacgggcacatatgtccaggaggagtctccggaaggtggcaggttcaagaaagagattgtcgttgatggacagagctatctgctgctgatcagagatgaagggggccccccggaggcgcagtttgccatgtgggtggacgctgttatatttgtcttcagcttggaggatgaaataagtttccagaccgtttaccactactacagtcgaatggccaactatcggaacacgagcgagattcctctggttctggtgggaacccaggatgccataagttctgctaacccgagggtcatcgatgacgccagggcgaggaagctctccaacgacctgaaacggtgcacgtactacgagacgtgtgctacatacgggctgaatgtggagagggtcttccaggacgttgcccagaagattgttgccacaaggaagaagcagcagctgtccataggaccctgcaagtcgctacctaattctcccagccattcctccgtctgttccgcgcaggtgtctgccgtgcacatcagccagacaagtaatggaggtgggagtttaagcgactattcctcctccgttccatcgactcccagcatcagccagaaggaacttcggatcgatgttcctcccactgccaacacgcccacgcccgttcgcaagcagtctaagcgccggtccaacctgttcacctctcggaaagggagcgacccagacaaagagaagaaaggcctggagagtcgtgcggacagcattgggagcggccgagccatcccaattaaacagggcatgctgttgaagcgaagtggcaaatcgttgaataaagagtggaaaaagaaatatgtcaccctgtgtgacaatggcgtgctgacctatcatcccagtttacatgattacatgcagaatgttcatggtaaggagattgaccttctgagaaccactgtgaaagtcccagggaagaggccaccccgagccacgtcagcctgcgcacccatctccagccctaaaaccaatggcctatccaaggacatgagcagtttacacatctcacccaattcagacacagggctgggtgactccgtatgctccagccccagtatctccagcaccaccagccccaagctcgacccgcccccctcccctcacgccaacagaaagaagcaccgaaggaagaaaagcactagcaacttcaaagccgacggcctgtccggcactgctgaagaacaagaagaaaattttgagtttatcattgtgtccctcactggccaaacatggcactttgaagccacgacgtatgaggagcgggacgcctgggtccaagccatcgagagccagatcctggccagcctgcagtcgtgcgagagcagcaagaacaagtcccggctgacgagccagagcgaggccatggccctgcagtcgatccggaacatgcgcgggaactcccactgtgtggactgcgagacccagaatcccaactgggccagtttgaacttgggagccctcatgtgcatcgaatgctcagggatccaccggaatcttggcacccacctttcccgagtccgatctctggacctggatgactggccaatcgagctcatcaaggtgatgtcatccatcgggaacgagctagccaacagcgtctgggaagagagcagccaggggcggacgaaaccatcggtagactccacaagggaagagaaggaacggtggatccgtgccaagtacgagcagaagctcttcctggccccgctgccctgcacggagctgtccctgggccagcacctgctgcgggccaccgccgacgaggacctgcggacggccatcctgctgctggcacacggctcccgggacgaggtgaacgagacctgcggggagggagacggccgcacggcgctgcatctggcctgccgcaaggggaatgtggtcctggcgcagctcctgatctggtacggagtggacgtcacggcccgagatgcccacgggaacacagctctggcctacgcccggcaggcctccagccaggagtgcatcgacgtgctgctgcagtacggctgccccgacgagcgcttcgtgctcatggccacccctaacctgtccaggagaaacaataaccggaacaacagcagtgggagggtgcccaccatcatctga

SEQ ID NO: 23726 - DNA, 5229 bp, Homo Sapiens
agcggaggctatctccagccgtggccgatggccgtgccgggggcagagcccgctcccctccgcgcgttgctacgtgcggggatgacatggatccagacgccgtcaactacgggaaggaggaggcgagagttggagcgcgtgggagcgcagaggccggaggagggaaacaccctcccggatccagagcccggcggcggcgaagcagcagctgcggccgcgcccttgccagagccggtgcgtccgcctagccccgctccgcctgaggccgtcagggctcccgaggatggaagattcccaggagacatcgccgtcctccaacaactcctcggaggagctcagctctgctctgcacctgtccaagggcatgtcgatcttcctcgacatactgaggagagcagacaaaaatgatgatggaaaattatcctttgaagaattcaaagcatattttgcagatggtgttctcagtggagaagaattacacgagcttttccataccattgatacacataatactaataatcttgacacagaagagctatgtgaatatttttctcagcacttgggcgagtatgagaatgtactagcagcacttgaagacctgaatctttccatcctgaaggcaatgggcaaaacaaagaaagactaccaagaagcctccaatttggaacaattcgtaactagatttttattgaaggaaaccctgaatcagctgcagtctctccagaattccctggaatgtgccatggaaactactgaggagcaaacccgtcaagaaaggcaagggccagccaagccagaagtcctgtcgattcaatggcctggaaaacgatcaagccgccgagtccagagacacaacagcttctccccaaacagccctcagtttaatgtcagcggtccaggcttattagaagaagacaaccagtggatgacccagataaatagactccagaaattaattgatagactggaaaagaaggatctcaaactcgaaccaccagaagaagaaattattgaagggaatactaaatctcacatcatgcttgtgcagcggcagatgtctgtgatagaagaggacctggaagaattccagctcgctctgaaacactacgtggagagtgcttcctcccaaagtggatgcttgcgtatttctatacagaagctttcaaatgaatctcgctacatgatctatgagttctgggagaatagtagtgtatggaatagccaccttcagacaaattatagcaagacattccaaagaagtaatgtggatttcttggaaactccagaactcacatctacaatgctagttcctgcttcgtggtggatcctgaacaactagatgttcctagacattttctttatggttccaagtgcaaaacaggtgttcttatctaaaacgtcaattagaaaattatctgcggttgttaatctactgtatatttttgtttggtatatttactaagtgcactctttcaaaacttattctataactttatcaattcatgtgaattttagctcaattttcaaagttcactaatattctcaatatttaatgctaaatgctttgctacattgtaactcacctaaaaccttttagtgacaaaatcctaatatgtggaaaaaagcatatgcataaaggaataatattgtgaaaatgaatctgttatgataaagaaaaaataaagtggaaacttttagagtattacttcatagggcagattttgtaaactgtcgtatactgtaaagggttaaatcagcgttttgtgatttttaagtaactgtgagtgaagtttattcttcaacaatgtctactccatccccaacccaactcacagccctatgactactatctttgcattagttaaaaagttagtatataggcatcaaacaaccttggctgtaacctatagaatctctatccacgtatcaggttatagactggtttttcaaaagtgaacaatcctgtgataagttggagtaccatttagtaatacagcaacattgtgtcatttattagcatcataattctttgttatgtaagttaaatatatcaagaaagaagagactgtttggaaaaatgtggttcaagttttatgctatatagttttggtatgcgatacagacagctaacttttcttatgaaaaatacatatttgcatgtaaacaatgatttcaaaatacttgaaaaataaaattttaacccaaatgaataactaagaaatataaaacaagcacaaaatcttagggaagtcataaaatagtagtgaaagtattagacagaagacatctgttttcgaatttcaacactagaatgactaaaactatctacctatagaactatctgtagatagtatactatctacactctgctcaacaagctcagaaattaaatatttttaataataaaaatctgttctggttataaaccttgctaatgaaaatacaatacatataaaaatgtatagccatgttattttctagtataaattcctttgaaactataagtctttgaggaaaattataaggtaaaattttcctgtttttccccctttgaaaaactcaggaaaaaaggaagattgaactaataaaattttatttcttaaatataaatttgacctaaaatattttctcaaactaattcatgaaacagcaacttttaccaatacctttgtatactctcagttctcattcagtataaataaaattttaaaatcctttcatagttctattagaaataagtagtaaattttgatatattgtacatacacacgtgtgtgtgtgtgtgtgtgtgtgtgtgtgtgtgtgtgtgtgtatttgtgtgcctctggtcaactctaaggatgacagacactgtgtaacaacacctgggtcaactcttttaatttatatacaaagcaaagaacaacattaatggagatgcacaatgattattcaaacaagctatatatatgtacaaaggcaaacagacacataacagtctctgcagactgattgtatatagtaagaaaagatcaaaagactttaaaacctaaatgacttttgacatacaaactcttcttgagaatgtttgttgtaaatggtttcaaaaatacaaattatagccaatcaaaacattgctttggttggtgcatttaagtatccaactcaaaaagcatatcaaatattttgggtactaggcagtttccaaagtagcatggtagtattacttgttaaaagggttctgttttcattaacagtactaagtggaagggatctgcagattccaaactggaataagctctatcatattctgaaacaagaattagaatgacttgagaacgggcaaataacaaagcaaaccaatataattatatggtcattctgaccccagctcttatacaaattatacatgtatttttgtgtatgtttgtgagagttgtatgtatgtgaatgtgtgtgagtgtgtattcacatacacatatatactggaacctatagtagaaaaggaaactagtagggccaaaaaaaaaaagaaaaagaaaaagaaaaaagaaaaaaaaagaaaaaactgggacctaagtataaatatctcatcctaaagtaaacaataagtttatagttaacgaagatttttttctatttaaaaccccattttcctaaagaacaaagtagtaaaataaaaaaaaatttaaaaaattaaaaaataaaaaaaagaggtcactaaaagaccaagatgggaaacgtaacatggaatacaagcttgaatctgggaaacaagctcaaaaaacagtgaaaaaaaaagtactggtttaggagttcaaaattcagtgaaacaaactttttgccaatagacctagggatctaagaaatagaattagggagagtttacacttacttacctatatatcagcagatttttctggaagaaaccctttttttttttttttttaaacagtaacatccagagtgacaaattgcaggagatttaatgtataaaatttctaggaattaaaagcttaaacccaaaaattgttcatccatatataagaaattatcgaattaaaacttaatgtatgtcaattattttcaaatgtctaaattcctttggaaataaaaatatcagttttactttgaaattgctcaacttctgctattcatatggtctgattagtgacataagtagcagccgtttttcaacttcagtttcattcactaccattgtttccaaattatcaatctctgctagtaattatgaatttaagaccatattattatcaaaaacctagagaccaatcatatatctgaaaagaaatacccattaaaaattctgcctcctgtttattgagaactatgcattgaacattctgaatcattctaagcctctggagagactgtaatgatccattcatgagctggtatgaaatcagtgggaagcagaacaacagaaggaactttaaaagcaacaagcaattatgtaccatatatacactgtagcaaatattttatatttgagagtctttacagcttacatttccattccattattacaagtgatgaaaaacaaaaaattgcaagtagtatgcaaattataaatatacagtcttcccacttcactaaccaaattcctactttccagtgttacttcccaatttatgcaggaaacctcctgcaaagctgaaactgattagaaaattctttatattttaaaatagctctttctcatttttagagaagtcaaatagccaaccatcaaaattaagaataaattgaattgtcacagtccattacagttattgttgctagatccacctcatttgcagatgtccaaacttaaattcatctgttcttaaaatgctacttaaaactttggttgttttcctgtaatataaaagaaaaagttaatttatcaattgattgaatacagtttttactaattagtttatcaaaccaaatactgtgaacgtaccaggtgtttacagatttaaatgcatgttaccatagaaactattaaagtaactagaactgtcaaataacaaaacggctcatgtttttaaaatatatgtaactcattttaaaatatattaaattgtattccaaacctgttcttctgtttctgtggcacctaggtttaaaatatgtattaatgtgtaaatcacaagtaaaatgaattctaatgtacaagtttgttttaaaaagtgtatgtcaagcttttatttacacaataaaatgttattaaagatggaaagtcta

SEQ ID NO: 23727 - DNA, 1101 bp, Homo Sapiens
tgtcgttttggtttgagataggaagatgaggggaggaaggaggtgaggcggtaaggggcgttctctctcttgggtcccgcgcccaacttccgctggcccaaagaaactataattttgaaccaacagacctctgctggcatctgcgattgcatttttcctgttttaacaacggctgtgctagacgaagtggttgaagcccaaagacttatttttgagctcgctgtaagactgagaaatcacgtagtccttcctgaaaccactaagaggaaaaatgtctgtgacactgcatacagatgtaggtgatattaaaattgaagtcttctgtgagaggacacccaaaacatgtgaggaactggaagaggaggcaacagtatttggggcaagaagtttgaggatgaatacagtgaatatcttaagcacaatgttagaggtgttgtatctatggctaataatggcccgaacaccaatggatctcagttcttcatcacctatggcaaacagccacatttggacatgaaatacaccgtatttggaaaggtaatagatggtctggaaactctagatgagttggagaagttgccagtaaatgagaagacataccgacctcttaatgatgtacacattaaggacataactattcatgccaacccatttgctcagtagctatgatagacctggacaaataacttgacaaattgctggaacacacttattgtggtttacccggttttaattatgtcagagattgcatcatccttctgcttgtttacaactatgatcttctatgaaatggtggtaccaaggggcgcccaacagcttttatccccattcttagagcatattctttattataatgattatccaacatatttctttaattttaatacaaaaaatacatcatttaatttttgttacatatgaacattcatttttaaatgctcagcctcaagtgcaggcatttttgagtggcctgattacatattcctcccacagcaagtccgtatcctggaagtgttattttataataaaatttaaaaagttttaaagaattaaatcgtaggacaaattaattaaaatattgtgtaaaattaaaaaaaaaaa

SEQ ID NO: 23728 - DNA, 4550 bp, Homo Sapiens
attcccagtcaccaaggccccctctcactccgctccactcctcgggctggctctcctgaggatgcaccagcgtcacccccgggcaagatgccctcccctctgtgtggccggaatccttgcctgtggctttctcctgggctgctggggaccctcccatttccagcagagttgtcttcaggctttggagccacaggccgtgtcttcttacttgagccctggtgctcccttaaaaggccgccctccttcccctggcttccagaggcagaggcagaggcagaggcgggctgcaggcggcatcctacacctggagctgctggtggccgtgggccccgatgtcttccaggctcaccaggaggacacagagcgctatgtgctcaccaacctcaacatcggggcagaactgcttcgggacccgtccctgggggctcagtttcgggtgcacctggtgaagatggtcattctgacagagcctgagggtgctccaaatatcacagccaacctcacctcgtccctgctgagcgtctgtgggtggagccagaccatcaaccctgaggacgacacggatcctggccatgctgacctggtcctctatatcactaggtttgacctggagttgcctgatggtaaccggcaggtgcggggcgtcacccagctgggcggtgcctgctccccaacctggagctgcctcattaccgaggacactggcttcgacctgggagtcaccattgcccatgagattgggcacagcttcggcctggagcacgacggcgcgcccggcagcggctgcggccccagcggacacgtgatggcttcggacggcgccgcgccccgcgccggcctcgcctggtccccctgcagccgccggcagctgctgagcctgctcagcgcaggacgggcgcgctgcgtgtgggacccgccgcggcctcaacccgggtccgcggggcacccgccggatgcgcagcctggcctctactacagcgccaacgagcagtgccgcgtggccttcggccccaaggctgtcgcctgcaccttcgccagggagcacctggatatgtgccaggccctctcctgccacacagacccgctggaccaaagcagctgcagccgcctcctcgttcctctcctggatgggacagaatgtggcgtggagaagtggtgctccaagggtcgctgccgctccctggtggagctgacccccatagcagcagtgcatgggcgctggtctagctggggtccccgaagtccttgctcccgctcctgcggaggaggtgtggtcaccaggaggcggcagtgcaacaaccccagacctgcctttggggggcgtgcatgtgttggtgctgacctccaggccgagatgtgcaacactcaggcctgcgagaagacccagctggagttcatgtcgcaacagtgcgccaggaccgacggccagccgctgcgctcctcccctggcggcgcctccttctaccactggggtgctgctgtaccacacagccaaggggatgctctgtgcagacacatgtgccgggccattggcgagagcttcatcatgaagcgtggagacagcttcctcgatgggacccggtgtatgccaagtggcccccgggaggacgggaccctgagcctgtgtgtgtcgggcagctgcaggacatttggctgtgatggtaggatggactcccagcaggtatgggacaggtgccaggtgtgtggtggggacaacagcacgtgcagcccacggaagggctctttcacagctggcagagcgagagaatatgtcacgtttctgacagttacccccaacctgaccagtgtctacattgccaaccacaggcctctcttcacacacttggcggtgaggatcggagggcgctatgtcgtggctgggaagatgagcatctcccctaacaccacctacccctccctcctggaggatggtcgtgtcgagtacagagtggccctcaccgaggaccggctgccccgcctggaggagatccgcatctggggacccctccaggaagatgctgacatccaggtttacaggcggtatggcgaggagtatggcaacctcacccgcccagacatcaccttcacctacttccagcctaagccacggcaggcctgggtgtgggccgctgtgcgtgggccctgctcggtgagctgtggggcagggctgcgctgggtaaactacagctgcctggaccaggccaggaaggagttggtggagactgtccagtgccaagggagccagcagccaccagcgtggccagaggcctgcgtgctcgaaccctgccctccctactgggcggtgggagacttcggcccatgcagcgcctcctgtgggggtggcctgcgggagcggccagtgcgctgcgtggaggcccagggcagcctcctgaagacattgcccccagcccggtgcagagcaggggcccagcagccagctgtggcgctggaaacctgcaacccccagccctgccctgccaggtgggaggtgtcagagcccagctcatgcacatcagctggtggagcaggcctggccttggagaacgagacctgtgtgccaggggcagatggcctggaggctccagtgactgaggggcctggctccgtagatgagaagctgcctgcccctgagccctgtgtcgggatgtcatgtcctccaggctggggccatctggatgccacctctgcaggggagaaggctccctccccatggggcagcatcaggacgggggctcaagctgcacacgtgtggacccctgcggcagggtcgtgctccgtctcctgcgggcgaggtctgatggagctgcgtttcctgtgcatggactctgccctcagggtgcctgtccaggaagagctgtgtggcctggcaagcaagcctgggagccggcgggaggtctgccaggctgtcccgtgccctgctcggtggcagtacaagctggcggcctgcagcgtgagctgtgggagaggggtcgtgcggaggatcctgtattgtgcccgggcccatggggaggacgatggtgaggagatcctgttggacacccagtgccaggggctgcctcgcccggaaccccaggaggcctgcagcctggagccctgcccacctaggtggaaagtcatgtcccttggcccatgttcggccagctgtggccttggcactgctagacgctcggtggcctgtgtgcagctcgaccaaggccaggacgtggaggtggacgaggcggcctgtgcggcgctggtgcggcccgaggccagtgtcccctgtctcattgccgactgcacctaccgctggcatgttggcacctggatggagtgctctgtttcctgtggggatggcatccagcgccggcgtgacacctgcctcggaccccaggcccaggcgcctgtgccagctgatttctgccagcacttgcccaagccggtgactgtgcgtggctgctgggctgggccctgtgtgggacagggtacgcccagcctggtgccccacgaagaagccgctgctccaggacggaccacagccacccctgctggtgcctccctggagtggtcccaggcccggggcctgctcttctccccggctccccagcctcggcggctcctgcccgggccccaggaaaactcagtgcagtccagtgcctgtggcaggcagcaccttgagccaacaggaaccattgacatgcgaggcccagggcaggcagactgtgcagtggccattgggcggcccctcggggaggtggtgaccctccgcgtccttgagagttctctcaactgcagtgcgggggacatgttgctgctttggggccggctcacctggaggaagatgtgcaggaagctgttggacatgactttcagctccaagaccaacacgctggtggtgaggcagcgctgcgggcggccaggaggtggggtgctgctgcggtatgggagccagcttgctcctgaaaccttctacagagaatgtgacatgcagctctttgggccctggggtgaaatcgtgagcccctcgctgagtccagccacgagtaatgcagggggctgccggctcttcattaatgtggctccgcacgcacggattgccatccatgccctggccaccaacatgggcgctgggaccgagggagccaatgccagctacatcttgatccgggacacccacagcttgaggaccacagcgttccatgggcagcaggtgctctactgggagtcagagagcagccaggctgagatggagttcagcgagggcttcctgaaggctcaggccagcctgcggggccagtactggaccctccaatcatgggtaccggagatgcaggaccctcagtcctggaagggaaaggaaggaacctgagggtcattgaacatttgttccgtgtctggccagccctggagggttgacccctggtctcagtgctttccaattcgaactttttccaatcttaggtatctactttagagtcttctccaatgtccaaaaggctagggggttggaggtggggactctggaaaagcagcccccatttcctcgggtaccaataaataaaacatgcaggctg

SEQ ID NO: 23729 - DNA, 66765 bp, Homo Sapiens
  misc_feature (38757)..(38757): n is a, c, g, or t
  misc_feature (38775)..(38775): n is a, c, g, or t
  misc_feature (38778)..(38778): n is a, c, g, or t
  misc_feature (38835)..(38835): n is a, c, g, or t
  misc_feature (38838)..(38838): n is a, c, g, or t
  misc_feature (38859)..(38859): n is a, c, g, or t
  misc_feature (38868)..(38868): n is a, c, g, or t
  misc_feature (38883)..(38883): n is a, c, g, or t
  misc_feature (38892)..(38892): n is a, c, g, or t
  misc_feature (41833)..(41833): n is a, c, g, or t
  misc_feature (41838)..(41838): n is a, c, g, or t
  misc_feature (41843)..(41843): n is a, c, g, or t
  misc_feature (41847)..(41847): n is a, c, g, or t
  misc_feature (41859)..(41859): n is a, c, g, or t
  misc_feature (41865)..(41865): n is a, c, g, or t
  misc_feature (41874)..(41876): n is a, c, g, or t
  misc_feature (41881)..(41883): n is a, c, g, or t
  misc_feature (41892)..(41892): n is a, c, g, or t
  misc_feature (41911)..(41911): n is a, c, g, or t
  misc_feature (41942)..(41942): n is a, c, g, or t
  misc_feature (41945)..(41945): n is a, c, g, or t
  misc_feature (41951)..(41951): n is a, c, g, or t
  misc_feature (41986)..(41986): n is a, c, g, or t
  misc_feature (41989)..(41989): n is a, c, g, or t
  misc_feature (41991)..(41991): n is a, c, g, or t
  misc_feature (41994)..(41994): n is a, c, g, or t
  misc_feature (42000)..(42000): n is a, c, g, or t
  misc_feature (42016)..(42016): n is a, c, g, or t
  misc_feature (42022)..(42022): n is a, c, g, or t
  misc_feature (42026)..(42026): n is a, c, g, or t
  misc_feature (43909)..(43909): n is a, c, g, or t
  misc_feature (43911)..(43912): n is a, c, g, or t
  misc_feature (43916)..(43916): n is a, c, g, or t
  misc_feature (43927)..(43927): n is a, c, g, or t
  misc_feature (43929)..(43929): n is a, c, g, or t
  misc_feature (43932)..(43932): n is a, c, g, or t
  misc_feature (43939)..(43939): n is a, c, g, or t
  misc_feature (43947)..(43947): n is a, c, g, or t
  misc_feature (43965)..(43965): n is a, c, g, or t
  misc_feature (43968)..(43968): n is a, c, g, or t
  misc_feature (43970)..(43970): n is a, c, g, or t
  misc_feature (43974)..(43975): n is a, c, g, or t
  misc_feature (43982)..(43983): n is a, c, g, or t
  misc_feature (43985)..(43985): n is a, c, g, or t
  misc_feature (43989)..(43989): n is a, c, g, or t
  misc_feature (43992)..(43992): n is a, c, g, or t
  misc_feature (44013)..(44013): n is a, c, g, or t
  misc_feature (44377)..(44377): n is a, c, g, or t
  misc_feature (44379)..(44380): n is a, c, g, or t
  misc_feature (44384)..(44384): n is a, c, g, or t
  misc_feature (44395)..(44395): n is a, c, g, or t
  misc_feature (44397)..(44397): n is a, c, g, or t
  misc_feature (44400)..(44400): n is a, c, g, or t
  misc_feature (44407)..(44407): n is a, c, g, or t
  misc_feature (44415)..(44415): n is a, c, g, or t
  misc_feature (44433)..(44433): n is a, c, g, or t
  misc_feature (44436)..(44436): n is a, c, g, or t
  misc_feature (44438)..(44438): n is a, c, g, or t
  misc_feature (44442)..(44443): n is a, c, g, or t
  misc_feature (44450)..(44451): n is a, c, g, or t
  misc_feature (44453)..(44453): n is a, c, g, or t
  misc_feature (44457)..(44457): n is a, c, g, or t
  misc_feature (44460)..(44460): n is a, c, g, or t
  misc_feature (44481)..(44481): n is a, c, g, or t
  misc_feature (47185)..(47185): n is a, c, g, or t
  misc_feature (47187)..(47188): n is a, c, g, or t
  misc_feature (47192)..(47192): n is a, c, g, or t
  misc_feature (47203)..(47203): n is a, c, g, or t
  misc_feature (47205)..(47205): n is a, c, g, or t
  misc_feature (47208)..(47208): n is a, c, g, or t
  misc_feature (47215)..(47215): n is a, c, g, or t
  misc_feature (47223)..(47223): n is a, c, g, or t
  misc_feature (47241)..(47241): n is a, c, g, or t
  misc_feature (47244)..(47244): n is a, c, g, or t
  misc_feature (47246)..(47246): n is a, c, g, or t
  misc_feature (47250)..(47251): n is a, c, g, or t
  misc_feature (47258)..(47259): n is a, c, g, or t
  misc_feature (47261)..(47261): n is a, c, g, or t
  misc_feature (47265)..(47265): n is a, c, g, or t
  misc_feature (47268)..(47268): n is a, c, g, or t
  misc_feature (47289)..(47289): n is a, c, g, or t
  misc_feature (48118)..(48118): n is a, c, g, or t
  misc_feature (48120)..(48121): n is a, c, g, or t
  misc_feature (48125)..(48125): n is a, c, g, or t
  misc_feature (48136)..(48136): n is a, c, g, or t
  misc_feature (48138)..(48138): n is a, c, g, or t
  misc_feature (48141)..(48141): n is a, c, g, or t
  misc_feature (48148)..(48148): n is a, c, g, or t
  misc_feature (48156)..(48156): n is a, c, g, or t
  misc_feature (48174)..(48174): n is a, c, g, or t
  misc_feature (48177)..(48177): n is a, c, g, or t
  misc_feature (48179)..(48179): n is a, c, g, or t
  misc_feature (48183)..(48184): n is a, c, g, or t
  misc_feature (48191)..(48192): n is a, c, g, or t
  misc_feature (48194)..(48194): n is a, c, g, or t
  misc_feature (48198)..(48198): n is a, c, g, or t
  misc_feature (48201)..(48201): n is a, c, g, or t
  misc_feature (48222)..(48222): n is a, c, g, or t
  misc_feature (48226)..(48226): n is a, c, g, or t
  misc_feature (48228)..(48228): n is a, c, g, or t
  misc_feature (48231)..(48231): n is a, c, g, or t
  misc_feature (48246)..(48249): n is a, c, g, or t
  misc_feature (48253)..(48253): n is a, c, g, or t
  misc_feature (48255)..(48255): n is a, c, g, or t
  misc_feature (48265)..(48265): n is a, c, g, or t
  misc_feature (48273)..(48273): n is a, c, g, or t
  misc_feature (48278)..(48278): n is a, c, g, or t
  misc_feature (48305)..(48306): n is a, c, g, or t
  misc_feature (48313)..(48313): n is a, c, g, or t
  misc_feature (48315)..(48315): n is a, c, g, or t
  misc_feature (48322)..(48322): n is a, c, g, or t
  misc_feature (48327)..(48327): n is a, c, g, or t
  misc_feature (48340)..(48340): n is a, c, g, or t
  misc_feature (48356)..(48356): n is a, c, g, or t
  misc_feature (48362)..(48363): n is a, c, g, or t
  misc_feature (48365)..(48365): n is a, c, g, or t
  misc_feature (48367)..(48367): n is a, c, g, or t
  misc_feature (48369)..(48369): n is a, c, g, or t
  misc_feature (48378)..(48378): n is a, c, g, or t
  misc_feature (48388)..(48388): n is a, c, g, or t
  misc_feature (48393)..(48393): n is a, c, g, or t
  misc_feature (48398)..(48398): n is a, c, g, or t
  misc_feature (48402)..(48402): n is a, c, g, or t
  misc_feature (48414)..(48414): n is a, c, g, or t
  misc_feature (48420)..(48420): n is a, c, g, or t
  misc_feature (48429)..(48431): n is a, c, g, or t
  misc_feature (48436)..(48438): n is a, c, g, or t
  misc_feature (48447)..(48447): n is a, c, g, or t
  misc_feature (48466)..(48466): n is a, c, g, or t
  misc_feature (49006)..(49006): n is a, c, g, or t
  misc_feature (49009)..(49009): n is a, c, g, or t
  misc_feature (49011)..(49011): n is a, c, g, or t
  misc_feature (49014)..(49014): n is a, c, g, or t
  misc_feature (49020)..(49020): n is a, c, g, or t
  misc_feature (49036)..(49036): n is a, c, g, or t
  misc_feature (49042)..(49042): n is a, c, g, or t
  misc_feature (49046)..(49046): n is a, c, g, or t
  misc_feature (49321)..(49321): n is a, c, g, or t
  misc_feature (49326)..(49326): n is a, c, g, or t
  misc_feature (49331)..(49331): n is a, c, g, or t
  misc_feature (49335)..(49335): n is a, c, g, or t
  misc_feature (49347)..(49347): n is a, c, g, or t
  misc_feature (49353)..(49353): n is a, c, g, or t
  misc_feature (49362)..(49364): n is a, c, g, or t
  misc_feature (49369)..(49371): n is a, c, g, or t
  misc_feature (49380)..(49380): n is a, c, g, or t
  misc_feature (49399)..(49399): n is a, c, g, or t
  misc_feature (49430)..(49430): n is a, c, g, or t
  misc_feature (49433)..(49433): n is a, c, g, or t
  misc_feature (49439)..(49439): n is a, c, g, or t
  misc_feature (49474)..(49474): n is a, c, g, or t
  misc_feature (49477)..(49477): n is a, c, g, or t
  misc_feature (49479)..(49479): n is a, c, g, or t
  misc_feature (49482)..(49482): n is a, c, g, or t
  misc_feature (49488)..(49488): n is a, c, g, or t
  misc_feature (49504)..(49504): n is a, c, g, or t
  misc_feature (49510)..(49510): n is a, c, g, or t
  misc_feature (49514)..(49514): n is a, c, g, or t
  misc_feature (49519)..(49519): n is a, c, g, or t
  misc_feature (49521)..(49522): n is a, c, g, or t
  misc_feature (49526)..(49526): n is a, c, g, or t
  misc_feature (49537)..(49537): n is a, c, g, or t
  misc_feature (49539)..(49539): n is a, c, g, or t
  misc_feature (49542)..(49542): n is a, c, g, or t
  misc_feature (49549)..(49549): n is a, c, g, or t
  misc_feature (49557)..(49557): n is a, c, g, or t
  misc_feature (49575)..(49575): n is a, c, g, or t
  misc_feature (49578)..(49578): n is a, c, g, or t
  misc_feature (49580)..(49580): n is a, c, g, or t
  misc_feature (49584)..(49585): n is a, c, g, or t
  misc_feature (49592)..(49593): n is a, c, g, or t
  misc_feature (49595)..(49595): n is a, c, g, or t
  misc_feature (49599)..(49599): n is a, c, g, or t
  misc_feature (49602)..(49602): n is a, c, g, or t
  misc_feature (49623)..(49623): n is a, c, g, or t
  misc_feature (50725)..(50725): n is a, c, g, or t
  misc_feature (50730)..(50730): n is a, c, g, or t
  misc_feature (50735)..(50735): n is a, c, g, or t
  misc_feature (50739)..(50739): n is a, c, g, or t
  misc_feature (50751)..(50751): n is a, c, g, or t
  misc_feature (50757)..(50757): n is a, c, g, or t
  misc_feature (50766)..(50768): n is a, c, g, or t
  misc_feature (50773)..(50775): n is a, c, g, or t
  misc_feature (50784)..(50784): n is a, c, g, or t
  misc_feature (50803)..(50803): n is a, c, g, or t
  misc_feature (50834)..(50834): n is a, c, g, or t
  misc_feature (50837)..(50837): n is a, c, g, or t
  misc_feature (50843)..(50843): n is a, c, g, or t
  misc_feature (50878)..(50878): n is a, c, g, or t
  misc_feature (50881)..(50881): n is a, c, g, or t
  misc_feature (50883)..(50883): n is a, c, g, or t
  misc_feature (50886)..(50886): n is a, c, g, or t
  misc_feature (50892)..(50892): n is a, c, g, or t
  misc_feature (50908)..(50908): n is a, c, g, or t
  misc_feature (50914)..(50914): n is a, c, g, or t
  misc_feature (50918)..(50918): n is a, c, g, or t
  misc_feature (50923)..(50923): n is a, c, g, or t
  misc_feature (50925)..(50926): n is a, c, g, or t
  misc_feature (50930)..(50930): n is a, c, g, or t
  misc_feature (50941)..(50941): n is a, c, g, or t
  misc_feature (50943)..(50943): n is a, c, g, or t
  misc_feature (50946)..(50946): n is a, c, g, or t
  misc_feature (50953)..(50953): n is a, c, g, or t
  misc_feature (50961)..(50961): n is a, c, g, or t
  misc_feature (50979)..(50979): n is a, c, g, or t
  misc_feature (50982)..(50982): n is a, c, g, or t
  misc_feature (50984)..(50984): n is a, c, g, or t
  misc_feature (50988)..(50989): n is a, c, g, or t
  misc_feature (50996)..(50997): n is a, c, g, or t
  misc_feature (50999)..(50999): n is a, c, g, or t
  misc_feature (51003)..(51003): n is a, c, g, or t
  misc_feature (51006)..(51006): n is a, c, g, or t
  misc_feature (51027)..(51027): n is a, c, g, or t
  misc_feature (52597)..(52597): n is a, c, g, or t
  misc_feature (52602)..(52602): n is a, c, g, or t
  misc_feature (52607)..(52607): n is a, c, g, or t
  misc_feature (52611)..(52611): n is a, c, g, or t
  misc_feature (52623)..(52623): n is a, c, g, or t
  misc_feature (52629)..(52629): n is a, c, g, or t
  misc_feature (52638)..(52640): n is a, c, g, or t
  misc_feature (52645)..(52647): n is a, c, g, or t
  misc_feature (52656)..(52656): n is a, c, g, or t
  misc_feature (52675)..(52675): n is a, c, g, or t
  misc_feature (52706)..(52706): n is a, c, g, or t
  misc_feature (52709)..(52709): n is a, c, g, or t
  misc_feature (52715)..(52715): n is a, c, g, or t
  misc_feature (52750)..(52750): n is a, c, g, or t
  misc_feature (52753)..(52753): n is a, c, g, or t
  misc_feature (52755)..(52755): n is a, c, g, or t
  misc_feature (52758)..(52758): n is a, c, g, or t
  misc_feature (52764)..(52764): n is a, c, g, or t
  misc_feature (52780)..(52780): n is a, c, g, or t
  misc_feature (52786)..(52786): n is a, c, g, or t
  misc_feature (52790)..(52790): n is a, c, g, or t
  misc_feature (52795)..(52795): n is a, c, g, or t
  misc_feature (52797)..(52798): n is a, c, g, or t
  misc_feature (52802)..(52802): n is a, c, g, or t
  misc_feature (52813)..(52813): n is a, c, g, or t
  misc_feature (52815)..(52815): n is a, c, g, or t
  misc_feature (52818)..(52818): n is a, c, g, or t
  misc_feature (52825)..(52825): n is a, c, g, or t
  misc_feature (52833)..(52833): n is a, c, g, or t
  misc_feature (52851)..(52851): n is a, c, g, or t
  misc_feature (52854)..(52854): n is a, c, g, or t
  misc_feature (52856)..(52856): n is a, c, g, or t
  misc_feature (52860)..(52861): n is a, c, g, or t
  misc_feature (52868)..(52869): n is a, c, g, or t
  misc_feature (52871)..(52871): n is a, c, g, or t
  misc_feature (52875)..(52875): n is a, c, g, or t
  misc_feature (52878)..(52878): n is a, c, g, or t
  misc_feature (52899)..(52899): n is a, c, g, or t
  misc_feature (52903)..(52903): n is a, c, g, or t
  misc_feature (52905)..(52905): n is a, c, g, or t
  misc_feature (52908)..(52908): n is a, c, g, or t
  misc_feature (52923)..(52926): n is a, c, g, or t
  misc_feature (52930)..(52930): n is a, c, g, or t
  misc_feature (52932)..(52932): n is a, c, g, or t
  misc_feature (52942)..(52942): n is a, c, g, or t
  misc_feature (52950)..(52950): n is a, c, g, or t
  misc_feature (52955)..(52955): n is a, c, g, or t
  misc_feature (52982)..(52983): n is a, c, g, or t
  misc_feature (52990)..(52990): n is a, c, g, or t
  misc_feature (52992)..(52992): n is a, c, g, or t
  misc_feature (52999)..(52999): n is a, c, g, or t
  misc_feature (53004)..(53004): n is a, c, g, or t
  misc_feature (53017)..(53017): n is a, c, g, or t
  misc_feature (53033)..(53033): n is a, c, g, or t
  misc_feature (53039)..(53040): n is a, c, g, or t
  misc_feature (53042)..(53042): n is a, c, g, or t
  misc_feature (53044)..(53044): n is a, c, g, or t
  misc_feature (53046)..(53046): n is a, c, g, or t
  misc_feature (53055)..(53055): n is a, c, g, or t
  misc_feature (53065)..(53065): n is a, c, g, or t
  misc_feature (53070)..(53070): n is a, c, g, or t
  misc_feature (53075)..(53075): n is a, c, g, or t
  misc_feature (53079)..(53079): n is a, c, g, or t
  misc_feature (53091)..(53091): n is a, c, g, or t
  misc_feature (53097)..(53097): n is a, c, g, or t
  misc_feature (53533)..(53533): n is a, c, g, or t
  misc_feature (53538)..(53538): n is a, c, g, or t
  misc_feature (53543)..(53543): n is a, c, g, or t
  misc_feature (53547)..(53547): n is a, c, g, or t
  misc_feature (53559)..(53559): n is a, c, g, or t
  misc_feature (53565)..(53565): n is a, c, g, or t
  misc_feature (53574)..(53576): n is a, c, g, or t
  misc_feature (53581)..(53583): n is a, c, g, or t
  misc_feature (53592)..(53592): n is a, c, g, or t
  misc_feature (53611)..(53611): n is a, c, g, or t
  misc_feature (53642)..(53642): n is a, c, g, or t
  misc_feature (53645)..(53645): n is a, c, g, or t
  misc_feature (53651)..(53651): n is a, c, g, or t
  misc_feature (53686)..(53686): n is a, c, g, or t
  misc_feature (53689)..(53689): n is a, c, g, or t
  misc_feature (53691)..(53691): n is a, c, g, or t
  misc_feature (53694)..(53694): n is a, c, g, or t
  misc_feature (53700)..(53700): n is a, c, g, or t
  misc_feature (53716)..(53716): n is a, c, g, or t
  misc_feature (53722)..(53722): n is a, c, g, or t
  misc_feature (53726)..(53726): n is a, c, g, or t
  misc_feature (53731)..(53731): n is a, c, g, or t
  misc_feature (53733)..(53734): n is a, c, g, or t
  misc_feature (53738)..(53738): n is a, c, g, or t
  misc_feature (53749)..(53749): n is a, c, g, or t
  misc_feature (53751)..(53751): n is a, c, g, or t
  misc_feature (53754)..(53754): n is a, c, g, or t
  misc_feature (53761)..(53761): n is a, c, g, or t
  misc_feature (53769)..(53769): n is a, c, g, or t
  misc_feature (53787)..(53787): n is a, c, g, or t
  misc_feature (53790)..(53790): n is a, c, g, or t
  misc_feature (53792)..(53792): n is a, c, g, or t
  misc_feature (53796)..(53797): n is a, c, g, or t
  misc_feature (53804)..(53805): n is a, c, g, or t
  misc_feature (53807)..(53807): n is a, c, g, or t
  misc_feature (53811)..(53811): n is a, c, g, or t
  misc_feature (53814)..(53814): n is a, c, g, or t
  misc_feature (53835)..(53835): n is a, c, g, or t
  misc_feature (53839)..(53839): n is a, c, g, or t
  misc_feature (53841)..(53841): n is a, c, g, or t
  misc_feature (53844)..(53844): n is a, c, g, or t
  misc_feature (53859)..(53862): n is a, c, g, or t
  misc_feature (53866)..(53866): n is a, c, g, or t
  misc_feature (53868)..(53868): n is a, c, g, or t
  misc_feature (53878)..(53878): n is a, c, g, or t
  misc_feature (53886)..(53886): n is a, c, g, or t
  misc_feature (53891)..(53891): n is a, c, g, or t
  misc_feature (53918)..(53919): n is a, c, g, or t
  misc_feature (53926)..(53926): n is a, c, g, or t
  misc_feature (53928)..(53928): n is a, c, g, or t
  misc_feature (53935)..(53935): n is a, c, g, or t
  misc_feature (53940)..(53940): n is a, c, g, or t
  misc_feature (53953)..(53953): n is a, c, g, or t
  misc_feature (53969)..(53969): n is a, c, g, or t
  misc_feature (53975)..(53976): n is a, c, g, or t
  misc_feature (53978)..(53978): n is a, c, g, or t
  misc_feature (53980)..(53980): n is a, c, g, or t
  misc_feature (53982)..(53982): n is a, c, g, or t
  misc_feature (53991)..(53991): n is a, c, g, or t
  misc_feature (54001)..(54001): n is a, c, g, or t
  misc_feature (54006)..(54006): n is a, c, g, or t
  misc_feature (54011)..(54011): n is a, c, g, or t
  misc_feature (54015)..(54015): n is a, c, g, or t
  misc_feature (54027)..(54027): n is a, c, g, or t
  misc_feature (54033)..(54033): n is a, c, g, or t
  misc_feature (54042)..(54044): n is a, c, g, or t
  misc_feature (54049)..(54051): n is a, c, g, or t
  misc_feature (54060)..(54060): n is a, c, g, or t
  misc_feature (54079)..(54079): n is a, c, g, or t
  misc_feature (54469)..(54469): n is a, c, g, or t
  misc_feature (54474)..(54474): n is a, c, g, or t
  misc_feature (54479)..(54479): n is a, c, g, or t
  misc_feature (54483)..(54483): n is a, c, g, or t
  misc_feature (54495)..(54495): n is a, c, g, or t
  misc_feature (54501)..(54501): n is a, c, g, or t
  misc_feature (54510)..(54512): n is a, c, g, or t
  misc_feature (54517)..(54519): n is a, c, g, or t
  misc_feature (54528)..(54528): n is a, c, g, or t
  misc_feature (54547)..(54547): n is a, c, g, or t
  misc_feature (54578)..(54578): n is a, c, g, or t
  misc_feature (54581)..(54581): n is a, c, g, or t
  misc_feature (54587)..(54587): n is a, c, g, or t
  misc_feature (54622)..(54622): n is a, c, g, or t
  misc_feature (54625)..(54625): n is a, c, g, or t
  misc_feature (54627)..(54627): n is a, c, g, or t
  misc_feature (54630)..(54630): n is a, c, g, or t
  misc_feature (54636)..(54636): n is a, c, g, or t
  misc_feature (54652)..(54652): n is a, c, g, or t
  misc_feature (54658)..(54658): n is a, c, g, or t
  misc_feature (54662)..(54662): n is a, c, g, or t
  misc_feature (54667)..(54667): n is a, c, g, or t
  misc_feature (54669)..(54670): n is a, c, g, or t
  misc_feature (54674)..(54674): n is a, c, g, or t
  misc_feature (54685)..(54685): n is a, c, g, or t
  misc_feature (54687)..(54687): n is a, c, g, or t
  misc_feature (54690)..(54690): n is a, c, g, or t
  misc_feature (54697)..(54697): n is a, c, g, or t
  misc_feature (54705)..(54705): n is a, c, g, or t
  misc_feature (54723)..(54723): n is a, c, g, or t
  misc_feature (54726)..(54726): n is a, c, g, or t
  misc_feature (54728)..(54728): n is a, c, g, or t
  misc_feature (54732)..(54733): n is a, c, g, or t
  misc_feature (54740)..(54741): n is a, c, g, or t
  misc_feature (54743)..(54743): n is a, c, g, or t
  misc_feature (54747)..(54747): n is a, c, g, or t
  misc_feature (54750)..(54750): n is a, c, g, or t
  misc_feature (54771)..(54771): n is a, c, g, or t
  misc_feature (54775)..(54775): n is a, c, g, or t
  misc_feature (54777)..(54777): n is a, c, g, or t
  misc_feature (54780)..(54780): n is a, c, g, or t
  misc_feature (54795)..(54798): n is a, c, g, or t
  misc_feature (54802)..(54802): n is a, c, g, or t
  misc_feature (54804)..(54804): n is a, c, g, or t
  misc_feature (54814)..(54814): n is a, c, g, or t
  misc_feature (54822)..(54822): n is a, c, g, or t
  misc_feature (54827)..(54827): n is a, c, g, or t
  misc_feature (54854)..(54855): n is a, c, g, or t
  misc_feature (54862)..(54862): n is a, c, g, or t
  misc_feature (54864)..(54864): n is a, c, g, or t
  misc_feature (54871)..(54871): n is a, c, g, or t
  misc_feature (54876)..(54876): n is a, c, g, or t
  misc_feature (54889)..(54889): n is a, c, g, or t
  misc_feature (54905)..(54905): n is a, c, g, or t
  misc_feature (54911)..(54912): n is a, c, g, or t
  misc_feature (54914)..(54914): n is a, c, g, or t
  misc_feature (54916)..(54916): n is a, c, g, or t
  misc_feature (54918)..(54918): n is a, c, g, or t
  misc_feature (54927)..(54927): n is a, c, g, or t
  misc_feature (54937)..(54937): n is a, c, g, or t
  misc_feature (54942)..(54942): n is a, c, g, or t
  misc_feature (54947)..(54947): n is a, c, g, or t
  misc_feature (54951)..(54951): n is a, c, g, or t
  misc_feature (54963)..(54963): n is a, c, g, or t
  misc_feature (54969)..(54969): n is a, c, g, or t
  misc_feature (54978)..(54980): n is a, c, g, or t
  misc_feature (54985)..(54987): n is a, c, g, or t
  misc_feature (54996)..(54996): n is a, c, g, or t
  misc_feature (55015)..(55015): n is a, c, g, or t
  misc_feature (55405)..(55405): n is a, c, g, or t
  misc_feature (55410)..(55410): n is a, c, g, or t
  misc_feature (55415)..(55415): n is a, c, g, or t
  misc_feature (55419)..(55419): n is a, c, g, or t
  misc_feature (55431)..(55431): n is a, c, g, or t
  misc_feature (55437)..(55437): n is a, c, g, or t
  misc_feature (55446)..(55448): n is a, c, g, or t
  misc_feature (55453)..(55455): n is a, c, g, or t
  misc_feature (55464)..(55464): n is a, c, g, or t
  misc_feature (55483)..(55483): n is a, c, g, or t
  misc_feature (55514)..(55514): n is a, c, g, or t
  misc_feature (55517)..(55517): n is a, c, g, or t
  misc_feature (55523)..(55523): n is a, c, g, or t
  misc_feature (55558)..(55558): n is a, c, g, or t
  misc_feature (55561)..(55561): n is a, c, g, or t
  misc_feature (55563)..(55563): n is a, c, g, or t
  misc_feature (55566)..(55566): n is a, c, g, or t
  misc_feature (55572)..(55572): n is a, c, g, or t
  misc_feature (55588)..(55588): n is a, c, g, or t
  misc_feature (55594)..(55594): n is a, c, g, or t
  misc_feature (55598)..(55598): n is a, c, g, or t
  misc_feature (55603)..(55603): n is a, c, g, or t
  misc_feature (55605)..(55606): n is a, c, g, or t
  misc_feature (55610)..(55610): n is a, c, g, or t
  misc_feature (55621)..(55621): n is a, c, g, or t
  misc_feature (55623)..(55623): n is a, c, g, or t
  misc_feature (55626)..(55626): n is a, c, g, or t
  misc_feature (55633)..(55633): n is a, c, g, or t
  misc_feature (55641)..(55641): n is a, c, g, or t
  misc_feature (55659)..(55659): n is a, c, g, or t
  misc_feature (55662)..(55662): n is a, c, g, or t
  misc_feature (55664)..(55664): n is a, c, g, or t
  misc_feature (55668)..(55669): n is a, c, g, or t
  misc_feature (55676)..(55677): n is a, c, g, or t
  misc_feature (55679)..(55679): n is a, c, g, or t
  misc_feature (55683)..(55683): n is a, c, g, or t
  misc_feature (55686)..(55686): n is a, c, g, or t
  misc_feature (55707)..(55707): n is a, c, g, or t
  misc_feature (55711)..(55711): n is a, c, g, or t
  misc_feature (55713)..(55713): n is a, c, g, or t
  misc_feature (55716)..(55716): n is a, c, g, or t
  misc_feature (55731)..(55734): n is a, c, g, or t
  misc_feature (55738)..(55738): n is a, c, g, or t
  misc_feature (55740)..(55740): n is a, c, g, or t
  misc_feature (55750)..(55750): n is a, c, g, or t
  misc_feature (55758)..(55758): n is a, c, g, or t
  misc_feature (55763)..(55763): n is a, c, g, or t
  misc_feature (55790)..(55791): n is a, c, g, or t
  misc_feature (55798)..(55798): n is a, c, g, or t
  misc_feature (55800)..(55800): n is a, c, g, or t
  misc_feature (55807)..(55807): n is a, c, g, or t
  misc_feature (55812)..(55812): n is a, c, g, or t
  misc_feature (55825)..(55825): n is a, c, g, or t
  misc_feature (55841)..(55841): n is a, c, g, or t
  misc_feature (55847)..(55848): n is a, c, g, or t
  misc_feature (55850)..(55850): n is a, c, g, or t
  misc_feature (55852)..(55852): n is a, c, g, or t
  misc_feature (55854)..(55854): n is a, c, g, or t
  misc_feature (55863)..(55863): n is a, c, g, or t
  misc_feature (55873)..(55873): n is a, c, g, or t
  misc_feature (55878)..(55878): n is a, c, g, or t
  misc_feature (55883)..(55883): n is a, c, g, or t
  misc_feature (55887)..(55887): n is a, c, g, or t
  misc_feature (55899)..(55899): n is a, c, g, or t
  misc_feature (55905)..(55905): n is a, c, g, or t
  misc_feature (55914)..(55916): n is a, c, g, or t
  misc_feature (55921)..(55923): n is a, c, g, or t
  misc_feature (55932)..(55932): n is a, c, g, or t
  misc_feature (55951)..(55951): n is a, c, g, or t
  misc_feature (56341)..(56341): n is a, c, g, or t
  misc_feature (56346)..(56346): n is a, c, g, or t
  misc_feature (56351)..(56351): n is a, c, g, or t
  misc_feature (56355)..(56355): n is a, c, g, or t
  misc_feature (56367)..(56367): n is a, c, g, or t
  misc_feature (56373)..(56373): n is a, c, g, or t
  misc_feature (56382)..(56384): n is a, c, g, or t
  misc_feature (56389)..(56391): n is a, c, g, or t
  misc_feature (56400)..(56400): n is a, c, g, or t
  misc_feature (56419)..(56419): n is a, c, g, or t
  misc_feature (56450)..(56450): n is a, c, g, or t
  misc_feature (56453)..(56453): n is a, c, g, or t
  misc_feature (56459)..(56459): n is a, c, g, or t
  misc_feature (56494)..(56494): n is a, c, g, or t
  misc_feature (56497)..(56497): n is a, c, g, or t
  misc_feature (56499)..(56499): n is a, c, g, or t
  misc_feature (56502)..(56502): n is a, c, g, or t
  misc_feature (56508)..(56508): n is a, c, g, or t
  misc_feature (56524)..(56524): n is a, c, g, or t
  misc_feature (56530)..(56530): n is a, c, g, or t
  misc_feature (56534)..(56534): n is a, c, g, or t
  misc_feature (56539)..(56539): n is a, c, g, or t
  misc_feature (56541)..(56542): n is a, c, g, or t
  misc_feature (56546)..(56546): n is a, c, g, or t
  misc_feature (56557)..(56557): n is a, c, g, or t
  misc_feature (56559)..(56559): n is a, c, g, or t
  misc_feature (56562)..(56562): n is a, c, g, or t
  misc_feature (56569)..(56569): n is a, c, g, or t
  misc_feature (56577)..(56577): n is a, c, g, or t
  misc_feature (56595)..(56595): n is a, c, g, or t
  misc_feature (56598)..(56598): n is a, c, g, or t
  misc_feature (56600)..(56600): n is a, c, g, or t
  misc_feature (56604)..(56605): n is a, c, g, or t
  misc_feature (56612)..(56613): n is a, c, g, or t
  misc_feature (56615)..(56615): n is a, c, g, or t
  misc_feature (56619)..(56619): n is a, c, g, or t
  misc_feature (56622)..(56622): n is a, c, g, or t
  misc_feature (56643)..(56643): n is a, c, g, or t
  misc_feature (56647)..(56647): n is a, c, g, or t
  misc_feature (56649)..(56649): n is a, c, g, or t
  misc_feature (56652)..(56652): n is a, c, g, or t
  misc_feature (56667)..(56670): n is a, c, g, or t
  misc_feature (56674)..(56674): n is a, c, g, or t
  misc_feature (56676)..(56676): n is a, c, g, or t
  misc_feature (56686)..(56686): n is a, c, g, or t
  misc_feature (56694)..(56694): n is a, c, g, or t
  misc_feature (56699)..(56699): n is a, c, g, or t
  misc_feature (56726)..(56727): n is a, c, g, or t
  misc_feature (56734)..(56734): n is a, c, g, or t
  misc_feature (56736)..(56736): n is a, c, g, or t
  misc_feature (56743)..(56743): n is a, c, g, or t
  misc_feature (56748)..(56748): n is a, c, g, or t
  misc_feature (56761)..(56761): n is a, c, g, or t
  misc_feature (56777)..(56777): n is a, c, g, or t
  misc_feature (56783)..(56784): n is a, c, g, or t
  misc_feature (56786)..(56786): n is a, c, g, or t
  misc_feature (56788)..(56788): n is a, c, g, or t
  misc_feature (56790)..(56790): n is a, c, g, or t
  misc_feature (56799)..(56799): n is a, c, g, or t
  misc_feature (56809)..(56809): n is a, c, g, or t
  misc_feature (56814)..(56814): n is a, c, g, or t
  misc_feature (56819)..(56819): n is a, c, g, or t
  misc_feature (56823)..(56823): n is a, c, g, or t
  misc_feature (56835)..(56835): n is a, c, g, or t
  misc_feature (56841)..(56841): n is a, c, g, or t
  misc_feature (56850)..(56852): n is a, c, g, or t
  misc_feature (56857)..(56859): n is a, c, g, or t
  misc_feature (56868)..(56868): n is a, c, g, or t
  misc_feature (56887)..(56887): n is a, c, g, or t
  misc_feature (57475)..(57475): n is a, c, g, or t
  misc_feature (57477)..(57478): n is a, c, g, or t
  misc_feature (57482)..(57482): n is a, c, g, or t
  misc_feature (57493)..(57493): n is a, c, g, or t
  misc_feature (57495)..(57495): n is a, c, g, or t
  misc_feature (57498)..(57498): n is a, c, g, or t
  misc_feature (57505)..(57505): n is a, c, g, or t
  misc_feature (57513)..(57513): n is a, c, g, or t
  misc_feature (57531)..(57531): n is a, c, g, or t
  misc_feature (57534)..(57534): n is a, c, g, or t
  misc_feature (57536)..(57536): n is a, c, g, or t
  misc_feature (57540)..(57541): n is a, c, g, or t
  misc_feature (57548)..(57549): n is a, c, g, or t
  misc_feature (57551)..(57551): n is a, c, g, or t
  misc_feature (57555)..(57555): n is a, c, g, or t
  misc_feature (57558)..(57558): n is a, c, g, or t
  misc_feature (57579)..(57579): n is a, c, g, or t
  misc_feature (57583)..(57583): n is a, c, g, or t
  misc_feature (57585)..(57585): n is a, c, g, or t
  misc_feature (57588)..(57588): n is a, c, g, or t
  misc_feature (57603)..(57606): n is a, c, g, or t
  misc_feature (57610)..(57610): n is a, c, g, or t
  misc_feature (57612)..(57612): n is a, c, g, or t
  misc_feature (57622)..(57622): n is a, c, g, or t
  misc_feature (57630)..(57630): n is a, c, g, or t
  misc_feature (57635)..(57635): n is a, c, g, or t
  misc_feature (57662)..(57663): n is a, c, g, or t
  misc_feature (57670)..(57670): n is a, c, g, or t
  misc_feature (57672)..(57672): n is a, c, g, or t
  misc_feature (57679)..(57679): n is a, c, g, or t
  misc_feature (57684)..(57684): n is a, c, g, or t
  misc_feature (57697)..(57697): n is a, c, g, or t
  misc_feature (57713)..(57713): n is a, c, g, or t
  misc_feature (57719)..(57720): n is a, c, g, or t
  misc_feature (57722)..(57722): n is a, c, g, or t
  misc_feature (57724)..(57724): n is a, c, g, or t
  misc_feature (57726)..(57726): n is a, c, g, or t
  misc_feature (57735)..(57735): n is a, c, g, or t
  misc_feature (57745)..(57745): n is a, c, g, or t
  misc_feature (57750)..(57750): n is a, c, g, or t
  misc_feature (57755)..(57755): n is a, c, g, or t
  misc_feature (57759)..(57759): n is a, c, g, or t
  misc_feature (57771)..(57771): n is a, c, g, or t
  misc_feature (57777)..(57777): n is a, c, g, or t
  misc_feature (57786)..(57788): n is a, c, g, or t
  misc_feature (57793)..(57795): n is a, c, g, or t
  misc_feature (57804)..(57804): n is a, c, g, or t
  misc_feature (57823)..(57823): n is a, c, g, or t
  misc_feature (58213)..(58213): n is a, c, g, or t
  misc_feature (58218)..(58218): n is a, c, g, or t
  misc_feature (58223)..(58223): n is a, c, g, or t
  misc_feature (58227)..(58227): n is a, c, g, or t
  misc_feature (58239)..(58239): n is a, c, g, or t
  misc_feature (58245)..(58245): n is a, c, g, or t
  misc_feature (58254)..(58256): n is a, c, g, or t
  misc_feature (58261)..(58263): n is a, c, g, or t
  misc_feature (58272)..(58272): n is a, c, g, or t
  misc_feature (58291)..(58291): n is a, c, g, or t
  misc_feature (58322)..(58322): n is a, c, g, or t
  misc_feature (58325)..(58325): n is a, c, g, or t
  misc_feature (58331)..(58331): n is a, c, g, or t
  misc_feature (58366)..(58366): n is a, c, g, or t
  misc_feature (58369)..(58369): n is a, c, g, or t
  misc_feature (58371)..(58371): n is a, c, g, or t
  misc_feature (58374)..(58374): n is a, c, g, or t
  misc_feature (58380)..(58380): n is a, c, g, or t
  misc_feature (58396)..(58396): n is a, c, g, or t
  misc_feature (58402)..(58402): n is a, c, g, or t
  misc_feature (58406)..(58406): n is a, c, g, or t
  misc_feature (58411)..(58411): n is a, c, g, or t
  misc_feature (58413)..(58414): n is a, c, g, or t
  misc_feature (58418)..(58418): n is a, c, g, or t
  misc_feature (58429)..(58429): n is a, c, g, or t
  misc_feature (58431)..(58431): n is a, c, g, or t
  misc_feature (58434)..(58434): n is a, c, g, or t
  misc_feature (58441)..(58441): n is a, c, g, or t
  misc_feature (58449)..(58449): n is a, c, g, or t
  misc_feature (58467)..(58467): n is a, c, g, or t
  misc_feature (58470)..(58470): n is a, c, g, or t
  misc_feature (58472)..(58472): n is a, c, g, or t
  misc_feature (58476)..(58477): n is a, c, g, or t
  misc_feature (58484)..(58485): n is a, c, g, or t
  misc_feature (58487)..(58487): n is a, c, g, or t
  misc_feature (58491)..(58491): n is a, c, g, or t
  misc_feature (58494)..(58494): n is a, c, g, or t
  misc_feature (58515)..(58515): n is a, c, g, or t
  misc_feature (58519)..(58519): n is a, c, g, or t
  misc_feature (58521)..(58521): n is a, c, g, or t
  misc_feature (58524)..(58524): n is a, c, g, or t
  misc_feature (58539)..(58542): n is a, c, g, or t
  misc_feature (58546)..(58546): n is a, c, g, or t
  misc_feature (58548)..(58548): n is a, c, g, or t
  misc_feature (58558)..(58558): n is a, c, g, or t
  misc_feature (58566)..(58566): n is a, c, g, or t
  misc_feature (58571)..(58571): n is a, c, g, or t
  misc_feature (58598)..(58599): n is a, c, g, or t
  misc_feature (58606)..(58606): n is a, c, g, or t
  misc_feature (58608)..(58608): n is a, c, g, or t
  misc_feature (58615)..(58615): n is a, c, g, or t
  misc_feature (58620)..(58620): n is a, c, g, or t
  misc_feature (58633)..(58633): n is a, c, g, or t
  misc_feature (58649)..(58649): n is a, c, g, or t
  misc_feature (58655)..(58656): n is a, c, g, or t
  misc_feature (58658)..(58658): n is a, c, g, or t
  misc_feature (58660)..(58660): n is a, c, g, or t
  misc_feature (58662)..(58662): n is a, c, g, or t
  misc_feature (58671)..(58671): n is a, c, g, or t
  misc_feature (58681)..(58681): n is a, c, g, or t
  misc_feature (58686)..(58686): n is a, c, g, or t
  misc_feature (58691)..(58691): n is a, c, g, or t
  misc_feature (58695)..(58695): n is a, c, g, or t
  misc_feature (58707)..(58707): n is a, c, g, or t
  misc_feature (58713)..(58713): n is a, c, g, or t
  misc_feature (58722)..(58724): n is a, c, g, or t
  misc_feature (58729)..(58731): n is a, c, g, or t
  misc_feature (58740)..(58740): n is a, c, g, or t
  misc_feature (58759)..(58759): n is a, c, g, or t
  misc_feature (59149)..(59149): n is a, c, g, or t
  misc_feature (59154)..(59154): n is a, c, g, or t
  misc_feature (59159)..(59159): n is a, c, g, or t
  misc_feature (59163)..(59163): n is a, c, g, or t
  misc_feature (59175)..(59175): n is a, c, g, or t
  misc_feature (59181)..(59181): n is a, c, g, or t
  misc_feature (59190)..(59192): n is a, c, g, or t
  misc_feature (59197)..(59199): n is a, c, g, or t
  misc_feature (59208)..(59208): n is a, c, g, or t
  misc_feature (59227)..(59227): n is a, c, g, or t
  misc_feature (59258)..(59258): n is a, c, g, or t
  misc_feature (59261)..(59261): n is a, c, g, or t
  misc_feature (59267)..(59267): n is a, c, g, or t
  misc_feature (59302)..(59302): n is a, c, g, or t
  misc_feature (59305)..(59305): n is a, c, g, or t
  misc_feature (59307)..(59307): n is a, c, g, or t
  misc_feature (59310)..(59310): n is a, c, g, or t
  misc_feature (59316)..(59316): n is a, c, g, or t
  misc_feature (59332)..(59332): n is a, c, g, or t
  misc_feature (59338)..(59338): n is a, c, g, or t
  misc_feature (59342)..(59342): n is a, c, g, or t
  misc_feature (59347)..(59347): n is a, c, g, or t
  misc_feature (59349)..(59350): n is a, c, g, or t
  misc_feature (59354)..(59354): n is a, c, g, or t
  misc_feature (59365)..(59365): n is a, c, g, or t
  misc_feature (59367)..(59367): n is a, c, g, or t
  misc_feature (59370)..(59370): n is a, c, g, or t
  misc_feature (59377)..(59377): n is a, c, g, or t
  misc_feature (59385)..(59385): n is a, c, g, or t
  misc_feature (59403)..(59403): n is a, c, g, or t
  misc_feature (59406)..(59406): n is a, c, g, or t
  misc_feature (59408)..(59408): n is a, c, g, or t
  misc_feature (59412)..(59413): n is a, c, g, or t
  misc_feature (59420)..(59421): n is a, c, g, or t
  misc_feature (59423)..(59423): n is a, c, g, or t
  misc_feature (59427)..(59427): n is a, c, g, or t
  misc_feature (59430)..(59430): n is a, c, g, or t
  misc_feature (59451)..(59451): n is a, c, g, or t
  misc_feature (59455)..(59455): n is a, c, g, or t
  misc_feature (59457)..(59457): n is a, c, g, or t
  misc_feature (59460)..(59460): n is a, c, g, or t
  misc_feature (59475)..(59478): n is a, c, g, or t
  misc_feature (59482)..(59482): n is a, c, g, or t
  misc_feature (59484)..(59484): n is a, c, g, or t
  misc_feature (59494)..(59494): n is a, c, g, or t
  misc_feature (59502)..(59502): n is a, c, g, or t
  misc_feature (59507)..(59507): n is a, c, g, or t
  misc_feature (59534)..(59535): n is a, c, g, or t
  misc_feature (59542)..(59542): n is a, c, g, or t
  misc_feature (59544)..(59544): n is a, c, g, or t
  misc_feature (59551)..(59551): n is a, c, g, or t
  misc_feature (59556)..(59556): n is a, c, g, or t
  misc_feature (59569)..(59569): n is a, c, g, or t
  misc_feature (59585)..(59585): n is a, c, g, or t
  misc_feature (59591)..(59592): n is a, c, g, or t
  misc_feature (59594)..(59594): n is a, c, g, or t
  misc_feature (59596)..(59596): n is a, c, g, or t
  misc_feature (59598)..(59598): n is a, c, g, or t
  misc_feature (59607)..(59607): n is a, c, g, or t
  misc_feature (59617)..(59617): n is a, c, g, or t
  misc_feature (59622)..(59622): n is a, c, g, or t
  misc_feature (59627)..(59627): n is a, c, g, or t
  misc_feature (59631)..(59631): n is a, c, g, or t
  misc_feature (59643)..(59643): n is a, c, g, or t
  misc_feature (59649)..(59649): n is a, c, g, or t
  misc_feature (59658)..(59660): n is a, c, g, or t
  misc_feature (59665)..(59667): n is a, c, g, or t
  misc_feature (59676)..(59676): n is a, c, g, or t
  misc_feature (59695)..(59695): n is a, c, g, or t
  misc_feature (60082)..(60082): n is a, c, g, or t
  misc_feature (60087)..(60087): n is a, c, g, or t
  misc_feature (60092)..(60092): n is a, c, g, or t
  misc_feature (60096)..(60096): n is a, c, g, or t
  misc_feature (60108)..(60108): n is a, c, g, or t
  misc_feature (60114)..(60114): n is a, c, g, or t
  misc_feature (60123)..(60125): n is a, c, g, or t
  misc_feature (60130)..(60132): n is a, c, g, or t
  misc_feature (60141)..(60141): n is a, c, g, or t
  misc_feature (60160)..(60160): n is a, c, g, or t
  misc_feature (60191)..(60191): n is a, c, g, or t
  misc_feature (60194)..(60194): n is a, c, g, or t
  misc_feature (60200)..(60200): n is a, c, g, or t
  misc_feature (60235)..(60235): n is a, c, g, or t
  misc_feature (60238)..(60238): n is a, c, g, or t
  misc_feature (60240)..(60240): n is a, c, g, or t
  misc_feature (60243)..(60243): n is a, c, g, or t
  misc_feature (60249)..(60249): n is a, c, g, or t
  misc_feature (60265)..(60265): n is a, c, g, or t
  misc_feature (60271)..(60271): n is a, c, g, or t
  misc_feature (60275)..(60275): n is a, c, g, or t
  misc_feature (60280)..(60280): n is a, c, g, or t
  misc_feature (60282)..(60283): n is a, c, g, or t
  misc_feature (60287)..(60287): n is a, c, g, or t
  misc_feature (60298)..(60298): n is a, c, g, or t
  misc_feature (60300)..(60300): n is a, c, g, or t
  misc_feature (60303)..(60303): n is a, c, g, or t
  misc_feature (60310)..(60310): n is a, c, g, or t
  misc_feature (60318)..(60318): n is a, c, g, or t
  misc_feature (60336)..(60336): n is a, c, g, or t
  misc_feature (60339)..(60339): n is a, c, g, or t
  misc_feature (60341)..(60341): n is a, c, g, or t
  misc_feature (60345)..(60346): n is a, c, g, or t
  misc_feature (60353)..(60354): n is a, c, g, or t
  misc_feature (60356)..(60356): n is a, c, g, or t
  misc_feature (60360)..(60360): n is a, c, g, or t
  misc_feature (60363)..(60363): n is a, c, g, or t
  misc_feature (60384)..(60384): n is a, c, g, or t
  misc_feature (60388)..(60388): n is a, c, g, or t
  misc_feature (60390)..(60390): n is a, c, g, or t
  misc_feature (60393)..(60393): n is a, c, g, or t
  misc_feature (60408)..(60411): n is a, c, g, or t
  misc_feature (60415)..(60415): n is a, c, g, or t
  misc_feature (60417)..(60417): n is a, c, g, or t
  misc_feature (60427)..(60427): n is a, c, g, or t
  misc_feature (60435)..(60435): n is a, c, g, or t
  misc_feature (60440)..(60440): n is a, c, g, or t
  misc_feature (60467)..(60468): n is a, c, g, or t
  misc_feature (60475)..(60475): n is a, c, g, or t
  misc_feature (60477)..(60477): n is a, c, g, or t
  misc_feature (60484)..(60484): n is a, c, g, or t
  misc_feature (60489)..(60489): n is a, c, g, or t
  misc_feature (60502)..(60502): n is a, c, g, or t
  misc_feature (60518)..(60518): n is a, c, g, or t
  misc_feature (60524)..(60525): n is a, c, g, or t
  misc_feature (60527)..(60527): n is a, c, g, or t
  misc_feature (60529)..(60529): n is a, c, g, or t
  misc_feature (60531)..(60531): n is a, c, g, or t
  misc_feature (60540)..(60540): n is a, c, g, or t
  misc_feature (60550)..(60550): n is a, c, g, or t
  misc_feature (60555)..(60555): n is a, c, g, or t
  misc_feature (60560)..(60560): n is a, c, g, or t
  misc_feature (60564)..(60564): n is a, c, g, or t
  misc_feature (60576)..(60576): n is a, c, g, or t
  misc_feature (60582)..(60582): n is a, c, g, or t
  misc_feature (60591)..(60593): n is a, c, g, or t
  misc_feature (60598)..(60600): n is a, c, g, or t
  misc_feature (60609)..(60609): n is a, c, g, or t
  misc_feature (60628)..(60628): n is a, c, g, or t
  misc_feature (61018)..(61018): n is a, c, g, or t
  misc_feature (61023)..(61023): n is a, c, g, or t
  misc_feature (61028)..(61028): n is a, c, g, or t
  misc_feature (61032)..(61032): n is a, c, g, or t
  misc_feature (61044)..(61044): n is a, c, g, or t
  misc_feature (61050)..(61050): n is a, c, g, or t
  misc_feature (61059)..(61061): n is a, c, g, or t
  misc_feature (61066)..(61068): n is a, c, g, or t
  misc_feature (61077)..(61077): n is a, c, g, or t
  misc_feature (61096)..(61096): n is a, c, g, or t
  misc_feature (61127)..(61127): n is a, c, g, or t
  misc_feature (61130)..(61130): n is a, c, g, or t
  misc_feature (61136)..(61136): n is a, c, g, or t
  misc_feature (61171)..(61171): n is a, c, g, or t
  misc_feature (61174)..(61174): n is a, c, g, or t
  misc_feature (61176)..(61176): n is a, c, g, or t
  misc_feature (61179)..(61179): n is a, c, g, or t
  misc_feature (61185)..(61185): n is a, c, g, or t
  misc_feature (61201)..(61201): n is a, c, g, or t
  misc_feature (61207)..(61207): n is a, c, g, or t
  misc_feature (61211)..(61211): n is a, c, g, or t
  misc_feature (62620)..(62620): n is a, c, g, or t
  misc_feature (62622)..(62623): n is a, c, g, or t
  misc_feature (62627)..(62627): n is a, c, g, or t
  misc_feature (62638)..(62638): n is a, c, g, or t
  misc_feature (62640)..(62640): n is a, c, g, or t
  misc_feature (62643)..(62643): n is a, c, g, or t
  misc_feature (62650)..(62650): n is a, c, g, or t
  misc_feature (62658)..(62658): n is a, c, g, or t
  misc_feature (62676)..(62676): n is a, c, g, or t
  misc_feature (62679)..(62679): n is a, c, g, or t
  misc_feature (62681)..(62681): n is a, c, g, or t
  misc_feature (62685)..(62686): n is a, c, g, or t
  misc_feature (62693)..(62694): n is a, c, g, or t
  misc_feature (62696)..(62696): n is a, c, g, or t
  misc_feature (62700)..(62700): n is a, c, g, or t
  misc_feature (62703)..(62703): n is a, c, g, or t
  misc_feature (62724)..(62724): n is a, c, g, or t
aagcgttgcacaattcccccaacctccatacatacggcagctcttctagacacaggttttcccaggtcaaatgcggggaccccagccatatctcccaccctgagaaattttggagtttcagggagctcagaagctctgcagaggccaccctctctgaggggattcttcttagacctccatccagaggcaaatgttgacctgtccatgctgaaaccctcaggccttcctgggtcatcttctcccacccgctccttgatgacagggagcaggagcactaaagccacaccagaaatggattcaggactgacaggagccaccttgtcacctaagacatctacaggtgcaatcgtggtgacagaacatactctgccctttacttccccagataagaccttggccagtcctacatcttcggttgtgggaagaaccacccagtctttgggggtgatgtcctctgctctccctgagtcaacctctagaggaatgacacactccgagcaaagaaccagcccatcgctgagtccccaggtcaatggaactccctctaggaactaccctgctacaagcatggtttcaggattgagttccccaaggaccaggaccagttccacagaaggaaattttaccaaagaagcatctacatacacactcactgtagagaccacaagtggcccagtcactgagaagtacacagtccccactgagacctcaacaactgaaggtgacagcacagagaccccctgggacacaagatatattcctgtaaaaatcacatctccaatgaaaacatttgcagattcaactgcatccaaggaaaatgccccagtgtctatgactccagctgagaccacagttactgactcacatactccaggaaggacaaacccatcatttgggacactttattcttccttccttgacctatcacctaaagggaccccaaattccagaggtgaaacaagcctggaactgattctatcaaccactggatatcccttctcctctcctgaacctggctctgcaggacacagcagaataagtaccagtgcgcctttgtcatcatctgcttcagttctcgataataaaatatcagagaccagcatattctcaggccagagtctcacctcccctctgtctcctggggtgcccgaggccagagccagcacaatgcccaactcagctatccctttttccatgacactaagcaatgcagaaacaagtgccgaaagggtcagaagcacaatttcctctctggggactccatcaatatccacaaagcagacagcagagactatccttaccttccatgccttcgctgagaccatggatatacccagcacccacatagccaagactttggcttcagaatggttgggaagtccaggtacccttggtggcaccagcacttcagcgctgacaaccacatctccatctaccactttagtctcagaggagaccaacacccatcactccacgagtggaaaggaaacagaaggaactttgaatacatctatgactccacttgagacctctgctcctggagaagagtccgaaatgactgccaccttggtccccactctaggttttacaactcttgacagcaagatcagaagtccatctcaggtctcttcatcccacccaacaagagagctcagaaccacaggcagcacctctgggaggcagagttccagcacagctgcccacgggagctctgacatcctgagggcaaccacttccagcacctcaaaagcatcatcatggaccagtgaaagcacagctcagcaatttagtgaaccccagcacacacagtgggtggagacaagtcctagcatgaaaacagagagacccccagcatcaaccagtgtggcagcccctatcaccacttctgttccctcagtggtctctggcttcaccaccctgaagaccagctccacaaaagggatttggcttgaagaaacatctgcagacacactcatcggagaatccacagctggcccaaccacccatcagtttgctgttcccactgggatttcaatgacaggaggcagcagcaccaggggaagccagggcacaacccacctactcaccagagccacagcatcatctgagacatccgcagatttgactctggccacgaacggtgtcccagtctccgtgtctccagcagtgagcaagacggctgctggctcaagtcctccaggagggacaaagccatcatatacaatggtttcttctgtcatccctgagacatcatctctacagtcctcagctttcagggaaggaaccagcctgggactgactccattaaacactagacatcccttctcttcccctgaaccagactctgcaggacacaccaagataagcaccagcattcctctgttgtcatctgcttcagttcttgaggataaagtgtcagcgaccagcacattctcacaccacaaagccacctcatctattaccacagggactcctgaaatctcaacaaagacaaagcccagctcagccgttctttcctccatgaccctaagcaatgcagcaacaagtcctgaaagagtcagaaatgcaacttcccctctgactcatccatctccatcaggggaagagacagcagggagtgtcctcactctcagcacctctgctgagactacagactcacctaacatccacccaactgggacactgacttcagaatcgtcagagagtcctagcactctcagcctcccaagtgtctctggagtcaaaaccacattttcttcatctactccttccactcatctatttactagtggagaagaaacagaggaaacttcgaatccatctgtgtctcaacctgagacttctgtttccagagtaaggaccaccttggccagcacctctgtccctaccccagtattccccaccatggacacctggcctacacgttcagctcagttctcttcatcccacctagtgagtgagctcagagctacgagcagtacctcagttacaaactcaactggttcagctcttcctaaaatatctcacctcactgggacggcaacaatgtcacagaccaatagagacacgtttaatgactctgctgcaccccaaagcacaacttggccagagactagtcccagattcaagacagggttaccttcagcaacaaccactgtttcaacctctgccacttctctctctgctactgtaatggtctctaaattcacttctccagcaactagttccatggaagcaacttctatcagggaaccatcaacaaccatcctcacaacagagaccacgaatggcccaggctctatggctgtggcttctaccaacatcccaattggaaagggctacattactgaaggaagattggacacaagccatctgcccattggaaccacagcttcctctgagacatctatggattttaccatggccaaagaaagtgtctcaatgtcagtatctccatctcagtccatggatgctgctggctcaagcactccaggaaggacaagccaattcgttgacacattttctgatgatgtctatcatttaacatccagagaaattacaatacctagagatggaacaagctcagctctgactccacaaatgactgcaactcaccctccatctcctgatcctggctctgctagaagcacctggcttggcatcttgtcctcatctccttcttctcctactcccaaagtcacaatgagctccacattttcaactcagagagtcaccacaagcatgataatggacacagttgaaactagtcggtggaacatgcccaacttaccttccacgacttccctgacaccaagtaatattccaacaagtggtgccataggaaaaagcaccctggttcccttggacactccatctccagccacatcattggaggcatcagaagggggacttccaaccctcagcacctaccctgaatcaacaaacacacccagcatccacctcggagcacacgctagttcagaaagtccaagcaccatcaaacttaccatggcttcagtagtaaaacctggctcttacacacctctcaccttcccctcaatagagacccacattcatgtatcaacagccagaatggcttactcttctgggtcttcacctgagatgacagctcctggagagactaacactggtagtacctgggaccccaccacctacatcaccactacggatcctaaggatacaagttcagctcaggtctctacaccccactcagtgaggacactcagaaccacagaaaaccatccaaagacagagtccgccaccccagctgcttactctggaagtcctaaaatctcaagttcacccaatctcaccagtccggccacaaaagcatggaccatcacagacacaactgaacactccactcaattacattacacaaaattggcagaaaaatcatctggatttgagacacagtcagctccaggacctgtctctgtagtaatccctacctcccctaccattggaagcagcacattggaactaacttctgatgtcccaggggaacccctggtccttgctcccagtgagcagaccacaatcactctccccatggcaacatggctgagtaccagtttgacagaggaaatggcttcaacagaccttgatatttcaagtccaagttcacccatgagtacatttgctatttttccacctatgtccacaccttctcatgaactttcaaagtcagaggcagataccagtgccattagaaatacagattcaacaacgttggatcagcacctaggaatcaggagtttgggcagaactggggacttaacaactgttcctatcaccccactgacaaccacgtggaccagtgtgattgaacactcaacacaagcacaggacaccctttctgcaacgatgagtcctactcacgtgacacagtcactcaaagatcaaacatctataccagcctcagcatccccttcccatcttactgaagtctaccctgagctcgggacacaagggagaagctcctctgaggcaaccactttttggaaaccatctacagacacactgtccagagagattgagactggcccaacaaacattcaatccactccacccatggacaacacaacaacagggagcagtagtagtggagtcaccctgggcatagcccaccttcccataggaacatcctccccagctgagacatccacaaacatggcactggaaagaagaagttctacagccactgtctctatggctgggacaatgggactccttgttactagtgctccaggaagaagcatcagccagtcattaggaagagtttcctctgtcctttctgagtcaactactgaaggagtcacagattctagtaagggaagcagcccaaggctgaacacacagggaaatacagctctctcctcctctcttgaacccagctatgctgaaggaagccagatgagcacaagcatccctctaacctcatctcctacaactcctgatgtggaattcatagggggcagcacattttggaccaaggaggtcaccacagttatgacctcagacatctccaagtcttcagcaaggacagagtccagctcagctacccttatgtccacagctttgggaagcactgaaaatacaggaaaagaaaaactcagaactgcctctatggatcttccatctccaactccatcaatggaggtgacaccatggatttctctcactctcagtaatgcccccaataccacagattcacttgacctcagccatggggtgcacaccagctctgcagggactttggccactgacaggtcattgaatactggtgtcactagagcctccagattggaaaacggctctgatacctcttctaagtccctgtctatgggaaacagcactcacacttccatgactgacacagagaagagtgaagtgtcttcttcaatccatccccgacctgagacctcagctcctggagcagagaccactttgacttccactcctggaaacagggccataagcttaacattgcctttttcatccattccagtggaagaagtcatttctacaggcataacctcaggaccagacatcaactcagcacccatgacacattctcccatcaccccaccaacaattgtatggaccagtacaggcacaattgaacagtccactcaaccactacatgcagtttcttcagaaaaagtttctgtgcagacacagtcaactccatatgtcaactctgtggcagtgtctgcttcccctacccatgagaattcagtctcttctggaagcagcacatcctctccatattcctcagcctcacttgaatccttggattccacaatcagtaggaggaatgcaatcacttcctggctatgggacctcactacatctctccccactacaacttggccaagtactagtttatctgaggcactgtcctcaggccattctggggtttcaaacccaagttcaactacgactgaatttccactcttttcagctgcatccacatctgctgctaagcaaagaaatccagaaacagagacccatggtccccagaatacagccgcgagtactttgaacactgatgcatcctcggtcacaggtctttctgagactcctgtgggggcaagtatcagctctgaagtccctcttccaatggccataacttctagatcagatgtttctggccttacatctgagagtactgctaacccgagtttaggcacagcctcttcagcagggaccaaattaactaggacaatatccctgcccacttcagagtctttggtttcctttagaatgaacaaggatccatggacagtgtcaatccctttggggtcccatccaactactaatacagaaacaagcatcccagtaaacagcgcaggtccacctggcttgtccacagtagcatcagatgtaattgacacaccttcagatggggctgagagtattcccactgtctccttttccccctcccctgatactgaagtgacaactatctcacatttcccagaaaagacaactcattcatttagaaccatttcatctctcactcatgagttgacttcaagagtgacacctattcctggggattggatgagttcagctatgtctacaaagcccacaggagccagtccctccattacactgggagagagaaggacaatcacctctgctgctccaaccacttcccccatagttctcactgctagtttcacagagaccagcacagtttcactggataatgaaactacagtaaaaacctcagatatccttgacgcacggaaaacaaatgagctcccctcagatagcagttcttcttctgatctgatcaacacctccatagcttcttcaactatggatgtcactaaaacagcctccatcagtcccactagcatctcaggaatgacagcaagttcctccccatctctcttctcttcagatagaccccaggttcccacatctacaacagagacaaatacagccacctctccatctgtttccagtaacacctattctcttgatgggggctccaatgtgggtggcactccatccactttaccaccctttacaatcacccaccctgtcgagacaagctcggccctattagcctggtctagaccagtaagaactttcagcaccatggtcagcactgacactgcctccggagaaaatcctacctctagcaattctgtggtgacttctgttccagcaccaggtacatgggccagtgtaggcagtactactgacttacctgccatgggctttctcaagacaagtcctgcaggagaggcacactcacttctagcatcaactattgaaccagccactgccttcactccccatctctcagcagcagtggtcactggatccagtgctacatcagaagccagtcttctcactacgagtgaaagcaaagccattcattcttcaccacagaccccaactacacccacctctggagcaaactgggaaacttcagctactcctgagagccttttggtagtcactgagacttcagacacaacacttacctcaaagattttggtcacagataccatcttgttttcaactgtgtccacgccaccttctaaatttccaagtacggggactctgtctggagcttccttccctactttactcccggacactccagccatccctctcactgccactgagccaacaagttcattagctacatcctttgattccaccccactggtgactatagcttcggatagtcttggcacagtcccagagactaccctgaccatgtcagagacctcaaatggtgatgcactggttcttaagacagtaagtaacccagataggagcatccctggaatcactatccaaggagtaacagaaagtccactccatccttcttccacttccccctctaagattgttgctccacggaatacaacctatgaaggttcgatcacagtggcactttctactttgcctgcgggaactactggttcccttgtattcagtcagagttctgaaaactcagagacaacggctttggtagactcatcagctgggcttgagagggcatctgtgatgccactaaccacaggaagccagggtatggctagctctggaggaatcagaagtgggtccactcactcaactggaaccaaaacattttcttctctccctctgaccatgaacccaggtgaggttacagccatgtctgaaatcaccacgaacagactgacagctactcaatcaacagcacccaaagggatacctgtgaagcccaccagtgctgagtcaggcctcctaacacctgtctctgcctcctcaagcccatcaaaggcctttgcctcactgactacagctcccccatcaacttgggggatcccacagtctaccttgacatttgagttttctgaggtcccaagtttggatactaagtccgcttctttaccaactcctggacagtccctgaacaccattccagactcagatgcaagcacagcatcttcctcactgtccaagtctccagaaaaaaacccaagggcaaggatgatgacttccacaaaggccataagtgcaagctcatttcaatcaacaggttttactgaaacccctgagggatctgcctccccttctatggcagggcatgaacccagagtccccacttcaggaacaggggaccctagatatgcctcagagagcatgtcttatccagacccaagcaaggcatcatcagctatgacatcgacctctcttgcatcaaaactcacaactctcttcagcacaggtcaagcagcaaggtctggttctagttcctctcccataagcctatccactgagaaagaaacaagcttcctttcccccactgcatccacctccagaaagacttcactatttcttgggccttccatggcaaggcagcccaacatattggtgcatcttcagacttcagctctgacactttctccaacatccactctaaatatgtcccaggaggagcctcctgagttaacctcaagccagaccattgcagaagaagagggaacaacagctgaaacacagacgttaaccttcacaccatctgagaccccaacatccttgttacctgtctcttctcccacagaacccacagccagaagaaagagttctccagaaacatgggcaagctctatttcagttcctgccaagacctccttggttgaaacaactgatggaacgctagtgaccaccataaagatgtcaagccaggcagcacaaggaaattccacgtggcctgccccagcagaggagacggggaccagtccagcaggcacatccccaggaagcccagaagtgtctaccactctcaaaatcatgagctccaaggaacccagcatcagcccagagatcaggtccactgtgcgaaattctccttggaagactccagaaacaactgttcccatggagaccacagtggaaccagtcacccttcagtccacagccctaggaagtggcagcaccagcatctctcacctgcccacaggaaccacatcaccaaccaagtcaccaacagaaaatatgttggctacagaaagggtctccctctccccatccccacctgaggcttggaccaacctttattctggaactccaggagggaccaggcagtcactggccacaatgtcctctgtctccctagagtcaccaactgctagaagcatcacagggactggtcagcaaagcagtccagaactggtttcaaagacaactggaatggaattctctatgtggcatggctctactggagggaccacaggggacacacatgtctctctgagcacatcttccaatatccttgaagaccctgtaaccagcccaaactctgtgagctcattgacagataaatccaaacataaaaccgagacatgggtaagcaccacagccattccctccactgtcctgaataataagataatggcagctgaacaacagacaagtcgatctgtggatgaggcttattcatcaactagttcttggtcagatcagacatctgggagtgacatcacccttggtgcatctcctgatgtcacaaacacattatacatcacctccacagcacaaaccacctcactagtgtctctgccctctggagaccaaggcattacaagcctcaccaatccctcaggaggaaaaacaagctctgcgtcatctgtcacatctccttcaatagggcttgagactctgagggccaatgtaagtgcagtgaaaagtgacattgcccctactgctgggcatctatctcagacttcatctcctgcggaagtgagcatcctggacgtaaccacagctcctactccaggtatctccaccaccatcaccaccatgggaaccaactcaatctcaactaccacacccaacccagaagtgggtatgagtaccatggacagcaccccggccacagagaggcgcacaacttctacagaacacccttccacctggtcttccacagctgcatcagattcctggactgtcacagacatgacttcaaacttgaaagttgcaagatctcctggaacaatttccacaatgcatacaacttcattcttagcctcaagcactgaattagactccatgtctactccccatggccgtataactgtcattggaaccagcctggtcactccatcctctgatgcttcagctgtaaagacagagaccagtacaagtgaaagaacattgagtccttcagacacaactgcatctactcccatctcaactttttctcgtgtccagaggatgagcatctcagttcctgacattttaagtacaagttggactcccagtagtacagaagcagaagatgtgcctgtttcaatggtttctacagatcatgctagtacaaagactgacccaaatacgcccctgtccacttttctgtttgattctctgtccactcttgactgggacactgggagatctctgtcatcagccacagccactacctcagctcctcagggggccacaactccccaggaactcactttggaaaccatgatcagcccagctacctcacagttgcccttctctatagggcacattacaagtgcagtcacaccagctgcaatggcaaggagctctggagttactttttcaagaccagatcccacaagcaaaaaggcagagcagacttccactcagcttcccaccaccacttctgcacatccagggcaggtgcccagatcagcagcaacaactctggatgtgatcccacacacagcaaaaactccagatgcaacttttcagagacaagggcagacagctcttacaacagaggcaagagctacatctgactcctggaatgagaaagaaaaatcaaccccaagtgcaccttggatcactgagatgatgaattctgtctcagaagataccatcaaggaggttaccagctcctccagtgtattaaaggaccctgaatacgctggacataaacttggaatctgggacgacttcatccccaagtttggaaaagcagcccatatgagagagttgccccttctgagtccaccacaggacaaagaggcaattcacccttctacaaacacagtagagaccacaggctgggtcacaagttccgaacatgcttctcattccactatcccagcccactcagcgtcatccaaactcacatctccagtggttacaacctccaccagggaacaagcaatagtttctatgtcaacaaccacatggccagagtctacaagggctagaacagagcctaattccttcttgactattgaactgagggacgtcagcccttacatggacaccagctcaaccacacaaacaagtattatctcttccccaggttccactgcgatcaccaaggggcctagaacagaaattacctcctctaagagaatatccagctcattccttgcccagtctatgaggtcgtcagacagcccctcagaagccatcaccaggctgtctaactttcctgccatgacagaatctggaggaatgatccttgctatgcaaacaagtccacctggcgctacatcactaagtgcacctactttggatacatcagccacagcctcctggacagggactccactggctacgactcagagatttacatactcagagaagaccactctctttagcaaaggtcctgaggatacatcacagccaagccctccctctgtggaagaaaccagctcttcctcttccctggtacctatccatgctacaacctcgccttccaatattttgttgacatcacaagggcacagtccctcctctactccacctgtgacctcagttttcttgtctgagacctctggcctggggaagaccacagacatgtcgaggataagcttggaacctggcacaagtttacctcccaatttgagcagtacagcaggtgaggcgttatccacttatgaagcctccagagatacaaaggcaattcatcattctgcagacacagcagtgacgaatatggaggcaaccagttctgaatattctcctatcccaggccatacaaagccatccaaagccacatctccattggttacctcccacatcatgggggacatcacttcttccacatcagtatttggctcctccgagaccacagagattgagacagtgtcctctgtgaaccagggacttcaggagagaagcacatcccaggtggccagctctgctacagagacaagcactgtcattacccatgtgtctagtggtgatgctactactcatgtcaccaagacacaagccactttctctagcggaacatccatctcaagccctcatcagtttataacttctaccaacacatttacagatgtgagcaccaacccctccacctctctgataatgacagaatcttcaggagtgaccatcaccacccaaacaggtcctactggagctgcaacacagggtccatatctcttggacacatcaaccatgccttacttgacagagactccattagctgtgactccagattttatgcaatcagagaagaccactctcataagcaaaggtcccaaggatgtgacctggacaagccctccctctgtggcagaaaccagctatccctcttccctgacacctttcttggtcacaaccatacctcctgccacttccacgttacaagggcaacatacatcctctcctgtttctgcgacttcagttcttacctctggactggtgaagaccacagatatgttgaacacaagcatggaacctgtgaccaattcacctcaaaatttgaacaatccatcaaatgagatactggccactttggcagccaccacagatatagagactattcatccttccataaacaaagcagtgaccaatatggggactgccagttcagcacatgtactgcattccactctcccagtcagctcagaaccatctacagccacatctccaatggttcctgcctccagcatgggggacgctcttgcttctatatcaatacctggttctgagaccacagacattgagggagagccaacatcctccctgactgctggacgaaaagagaacagcaccctccaggagatgaactcaactacagagtcaaacatcatcctctccaatgtgtctgtgggggctattactgaagccacaaaaatggaagtcccctcttttgatgcaacattcataccaactcctgctcagtcaacaaagttcccagatattttctcagtagccagcagtagactttcaaactctcctcccatgacaatatctacccacatgaccaccacccagacagggtcttctggagctacatcaaagattccacttgccttagacacatcaaccttggaaacctcagcagggactccatcagtggtgactgaggggtttgcccactcaaaaataaccactgcaatgaacaatgatgtcaaggacgtgtcacagacaaaccctccctttcaggatgaagccagctctccctcttctcaagcacctgtccttgtcacaaccttaccttcttctgttgctttcacaccgcaatggcacagtacctcctctcctgtttctatgtcctcagttcttacttcttcactggtaaagaccgcaggcaaggtggatacaagcttagaaacagtgaccagttcacctcaaagtatgagcaacactttggatgacatatcggtcacttcagcagccaccacagatatagagacaacgcatccttccataaacacagtagttaccaatgtggggaccaccggttcagcatttgaatcacattctactgtctcagcttacccagagccatctaaagtcacatctccaaatgttaccacctccaccatggaagacaccacaatttcccgatcaatacctaaatcctctaagactacaagaactgagactgagacaacttcctccctgactcctaaactgagggagaccagcatctcccaggagatcacctcgtccacagagacaagcactgttccttacaaagagctcactggtgccactaccgaggtatccaggacagatgtcacttcctctagcagtacatccttccctggccctgatcagtccacagtgtcactagacatctccacagaaaccaacaccaggctgtctacctccccaataatgacagaatctgcagaaataaccatcaccacccaaacaggtcctcatggggctacatcacaggatacttttaccatggacccatcaaatacaaccccccaggcagggatccactcagctatgactcatggattttcacaattggatgtgaccactcttatgagcagaattccacaggatgtatcatggacaagtcctccctctgtggataaaaccagctccccctcttcctttctgtcctcacctgcaatgaccacaccttccctgatttcttctaccttaccagaggataagctctcctctcctatgacttcacttctcacctctggcctagtgaagattacagacatattacgtacacgcttggaacctgtgaccagctcacttccaaatttcagcagcacctcagataagatactggccacttctaaagacagtaaagacacaaaggaaatttttccttctataaacacagaagagaccaatgtgaaagccaacaactctggacatgaatcccattcccctgcactggctgactcagagacacccaaagccacaactcaaatggttatcaccaccactgtgggagatccagctccttccacatcaatgccagtgcatggttcctctgagactacaaacattaagagagagccaacatatttcttgactcctagactgagagagaccagtacctctcaggagtccagctttcccacggacacaagttttctactttccaaagtccccactggtactattactgaggtctccagtacaggggtcaactcttctagcaaaatttccaccccagaccatgataagtccacagtgccacctgacaccttcacaggagagatccccagggtcttcacctcctctattaagacaaaatctgcagaaatgacgatcaccacccaagcaagtcctcctgagtctgcatcgcacagtacccttcccttggacacatcaaccacactttcccagggagggactcattcaactgtgactcagggattcccatactcagaggtgaccactctcatgggcatgggtcctgggaatgtgtcatggatgacaactccccctgtggaagaaaccagctctgtgtcttccctgatgtcttcacctgccatgacatccccttctcctgtttcctccacatcaccacagagcatcccctcctctcctcttcctgtgactgcacttcctacttctgttctggtgacaaccacagatgtgttgggcacaacaagcccagagtctgtaaccagttcacctccaaatttgagcagcatcactcatgagagaccggccacttacaaagacactgcacacacagaagccgccatgcatcattccacaaacaccgcagtgaccaatgtagggacttccgggtctggacataaatcacaatcctctgtcctagctgactcagagacatcgaaagccacacctctgatgagtaccacctccaccctgggggacacaagtgtttccacatcaactcctaatatctctcagactaaccaaattcaaacagagccaacagcatccctgagccctagactgagggagagcagcacgtctgagaagaccagctcaacaacagagacaaatactgccttttcttatgtgcccacaggtgctattactcaggcctccagaacagaaatctcctctagcagaacatccatctcagaccttgatcggcccacaatagcacccgacatctccacaggaatgatcaccaggctcttcacctcccccatcatgacaaaatctgcagaaatgaccgtcaccactcaaacaactactcctggggctacatcacagggtatccttccttgggacacatcaaccacacttttccagggagggactcattcaaccgtgtctcagggattcccacactcagagataaccactcttcggagcagaacccctggagatgtgtcatggatgacaactccccctgtggaagaaaccagctctgggttttccctgatgtcaccttccatgacatccccttctcctgtttcctccacatcaccagagagcatcccctcctctcctctccctgtgactgcacttcttacttctgttctggtgacaaccaccaatgtattgggcacaacaagcccagagaccgtaacgagttcacctccaaatttaagcagccccacacaggagagactgaccacttacaaagacactgcgcacacagaagccatgcatgcttccatgcatacaaacactgcagtggccaacgtcgggacctccatttctggacatgaatcacaatcttctgtcccagctgattcacacacatccaaagccacatctccaatgggtatcaccttcgccatgggggatacaagtgtttctacatcaactcctgccttctttgagactagaattcagactgaatcaacatcctctttgattcctggattaagggacaccaggacgtctgaggagatcaacactgtgacagagaccagcactgtcctttcagaagtgcccactactactactactgaggtctccaggacagaagttatcacttccagcagaacaaccatctcagggcctgatcattccaaaatgtcaccctacatctccacagaaaccatcaccaggctctccacttttccttttgtaacaggatccacagaaatggccatcaccaaccaaacaggtcctatagggactatctcacaggctacccttaccctggacacatcaagcacagcttcctgggaagggactcactcacctgtgactcagagatttccacactcagaggagaccactactatgagcagaagtactaagggcgtgtcatggcaaagccctccctctgtggaagaaaccagttctccttcttccccagtgcctttacctgcaataacctcacattcatctctttattccgcagtatcaggaagtagccccacttctgctctccctgtgacttcccttctcacctctggcaggaggaagaccatagacatgttggacacacactcagaacttgtgaccagctccttaccaagtgcaagtagcttctcaggtgagatactcacttctgaagcctccacaaatacagagacaattcacttttcagagaacacagcagaaaccaatatggggaccaccaattctatgcataaactacattcctctgtctcaatccactcccagccatccggacacacacctccaaaggttactggatctatgatggaggacgctattgtttccacatcaacacctggttctcctgagactaaaaatgttgacagagactcaacatcccctctgactcctgaactgaaagaggacagcaccgccctggtgatgaactcaactacagagtcaaacactgttttctccagtgtgtccctggatgctgctactgaggtctccagggcagaagtcacctactatgatcctacattcatgccagcttctgctcagtcaacaaagtccccagacatttcacctgaagccagcagcagtcattctaactctcctcccttgacaatatctacacacaagaccatcgccacacaaacaggtccttctggggtgacatctcttggccaactgaccctggacacatcaaccatagccacctcagcaggaactccatcagccagaactcaggattttgtagattcagaaacaaccagtgtcatgaacaatgatctcaatgatgtgttgaagacaagccctttctctgcagaagaagccaactctctctcttctcaggcacctctccttgtgacaacctcaccttctcctgtaacttccacattgcaagagcacagtacctcctctcttgtttctgtgacctcagtacccacccctacactggcgaagatcacagacatggacacaaacttagaacctgtgactcgttcacctcaaaatttaaggaacaccttggccacttcagaagccaccacagatacacacacaatgcatccttctataaacacagcaatggccaatgtggggaccaccagttcaccaaatgaattctattttactgtctcacctgactcagacccatataaagccacatccgcagtagttatcacttccacctcgggggactcaatagtttccacatcaatgcctagatcctctgcgatgaaaaagattgagtctgagacaactttctccctgatatttagactgagggagactagcacctcccagaaaattggctcatcctcagacacaagcacggtctttgacaaagcattcactgctgctactactgaggtctccagaacagaactcacctcctctagcagaacatccatccaaggcactgaaaagcccacaatgtcaccggacacctccacaagatctgtcaccatgctttctacttttgctggcctgacaaaatccgaagaaaggaccattgccacccaaacaggtcctcatagggcgacatcacagggtacccttacctgggacacatcaatcacaacctcacaggcagggacccactcagctatgactcatggattttcacaattagatttgtccactcttacgagtagagttcctgagtacatatcagggacaagcccaccctctgtggaaaaaaccagctcttcctcttcccttctgtctttaccagcaataacctcaccgtcccctgtacctactacattaccagaaagtaggccgtcttctcctgttcatctgacttcactccccacctctggcctagtgaagaccacagatatgctggcatctgtggccagtttacctccaaacttgggcagcacctcacataagataccgactacttcagaagacattaaagatacagagaaaatgtatccttccacaaacatagcagtaaccaatgtggggaccaccacttctgaaaaggaatcttattcgtctgtcccagcctactcagaaccacccaaagtcacctctccaatggttacctctttcaacataagggacaccattgtttccacatccatgcctggctcctctgagattacaaggattgagatggagtcaacattctccgtggctcatgggctgaagggaaccagcacctcccaggaccccatcgtatccacagagaaaagtgctgtccttcacaagttgaccactggtgctactgagacctctaggacagaagttgcctcttctagaagaacatccattccaggccctgatcattccacagagtcaccagacatctccactgaagtgatccccagcctgcctatctcccttggcattacagaatcttcaaatatgaccatcatcactcgaacaggtcctcctcttggctctacatcacagggcacatttaccttggacacaccaactacatcctccagggcaggaacacactcgatggcgactcaggaatttccacactcagaaatgaccactgtcatgaacaaggaccctgagattctatcatggacaatccctccttctatagagaaaaccagcttctcctcttccctgatgccttcaccagccatgacttcacctcctgtttcctcaacattaccaaagaccattcacaccactccttctcctatgacctcactgctcacccctagcctagtgatgaccacagacacattgggcacaagcccagaacctacaaccagttcacctccaaatttgagcagtacctcacatgtgatactgacaacagatgaagacaccacagctatagaagccatgcatccttccacaagcacagcagcgactaatgtggaaaccacctgttctggacatgggtcacaatcctctgtcctaactgactcagaaaaaaccaaggccacagctccaatggataccacctccaccatggggcatacaactgtttccacatcaatgtctgtttcctctgagactacaaaaattaagagagagtcaacatattccttgactcctggactgagagagaccagcatttcccaaaatgccagcttttccactgacacaagtattgttctttcagaagtccccactggtactactgctgaggtctccaggacagaagtcacctcctctggtagaacatccatccctggcccttctcagtccacagttttgccagaaatatccacaagaacaatgacaaggctctttgcctcgcccaccatgacagaatcagcagaaatgaccatccccactcaaacaggtccttctgggtctacctcacaggatacccttaccttggacacatccaccacaaagtcccaggcaaagactcattcaactttgactcagagatttccacactcagagatgaccactctcatgagcagaggtcctggagatatgtcatggcaaagctctccctctctggaaaatcccagctctctcccttccctgctgtctttacctgccacaacctcacctcctcccatttcctccacattaccagtgactatctcctcctctcctcttcctgtgacttcacttctcacctctagcccggtaacgaccacagacatgttacacacaagcccagaacttgtaaccagttcacctccaaagctgagccacacttcagatgagagactgaccactggcaaggacaccacaaatacagaagctgtgcatccttccacaaacacagcagcgtccaatgtggagattcccagctttggacatgaatccccttcctctgccttagctgactcagagacatccaaagccacatcaccaatgtttattacctccacccaggaggatacaactgttgccatatcaacccctcacttcttggagactagcagaattcagaaagagtcaatttcctccctgagccctaaattgagggagacaggcagttctgtggagacaagctcagccatagagacaagtgctgtcctttctgaagtgtccattggtgctactactgagatctccaggacagaagtcacctcctctagcagaacatccatctctggttctgctgagtccacaatgttgccagaaatatccaccacaagaaaaatcattaagttccctacttcccccatcctggcagaatcatcagaaatgaccatcaagacccaaacaagtcctcctgggtctacatcagagagtacctttacattagacacatcaaccactccctccttggtaataacccattcgactatgactcagagattgccacactcagagataaccactcttgtgagtagaggtgctggggatgtgccacggcccagctctctccctgtggaagaaacaagccctccatcttcccagctgtctttatctgccatgatctcaccttctcctgtttcttccacattaccagcaagtagccactcctcttctgcttctgtgacttcacctctcacaccaggccaagtgaagactactgaggtgttggacgcaagtgcagaacctgaaaccagttcacctccaagtttgagcagcacctcagttgaaatactggccacctctgaagtcaccacagatacggagaaaattcatcctttcccaaacacggcagtaaccaaagttggaacttccagttctggacatgaatccccttcctctgtcctacctgactcagagacaaccaaagccacatcggcaatgggtaccatctccattatgggggatacaagtgtttctacattaactcctgccttatctaacactaggaaaattcagtcagagccagcttcctcactgaccaccagattgagggagaccagcacctctgaagagaccagcttagccacagaagcaaacactgttctttctaaagtgtccactggtgctactactgaggtctccaggacagaagccatctcctttagcagaacatccatgtcaggccctgagcagtccacaatgtcacaagacatctccataggaaccatccccaggatttctgcctcctctgtcctgacagaatctgcaaaaatgaccatcacaacccaaacaggtccttcggagtctacactagaaagtacccttaatttgaacacagcaaccacaccctcttgggtggaaacccactctatagtaattcagggatttccacacccagagatgaccacttccatgggcagaggtcctggaggtgtgtcatggcctagccctccctttgtgaaagaaaccagccctccatcctccccgctgtctttacctgccgtgacctcacctcatcctgtttccaccacattcctagcacatatccccccctctccccttcctgtgacttcacttctcacctctggcccggcgacaaccacagatatcttgggtacaagcacagaacctggaaccagttcatcttcaagtttgagcaccacctcccatgagagactgaccacttacaaagacactgcacatacagaagccgtgcatccttccacaaacacaggagggaccaatgtggcaaccaccagctctggatataaatcacagtcctctgtcctagctgactcatctccaatgtgtaccacctccaccatgggggatacaagtgttctcacatcaactcctgccttccttgagactaggaggattcagacagagctagcttcctccctgacccctggattgagggagtccagtggctctgaagggaccagctcaggcaccaagatgagcactgtcctctctaaagtgcccactggtgctactactgagatctccaaggaagacgtcacctccatcccaggtcccgctcaatccacaatatcaccagacatctccacaagaaccgtcagctggttctctacatcccctgtcatgacagaatcagcagaaataaccatgaacacccatacaagtcctttaggggccacaacacaaggcaccagtactttggccacgtcaagcacaacctctttgacaatgacacactcaactatatctcaaggattttcacactcacagatgagcactcttatgaggaggggtcctgaggatgtatcatggatgagccctccccttctggaaaaaactagaccttccttttctctgatgtcttcaccagccacaacttcaccttctcctgtttcctccacattaccagagagcatctcttcctctcctcttcctgtgacttcactcctcacgtctggcttggcaaaaactacagatatgttgcacaaaagctcagaacctgtaaccaactcacctgcaaatttgagcagcacctcagttgaaatactggccacctctgaagtcaccacagatacagagaaaactcatccttcttcaaacagaacagtgaccgatgtggggacctccagttctggacatgaatccacttcctttgtcctagctgactcacagacatccaaagtcacatctccaatggttattacctccaccatggaggatacgagtgtctccacatcaactcctggcttttttgagactagcagaattcagacagaaccaacatcctccctgacccttggactgagaaagaccagcagctctgaggggaccagcttagccacagagatgagcactgtcctttctggagtgcccactggtgccactgctgaagtctccaggacagaagtcacctcctctagcagaacatccatctcaggctttgctcagctcacagtgtcaccagagacttccacagaaaccatcaccagactccctacctccagcataatgacagaatcagcagaaatgatgatcaagacacaaacagatcctcctgggtctacaccagagagtactcatactgtggacatatcaacaacacccaactgggtagaaacccactcgactgtgactcagagattttcacactcagagatgaccactcttgtgagcagaagccctggtgatatgttatggcctagtcaatcctctgtggaagaaaccagctctgcctcttccctgctgtctctgcctgccacgacctcaccttctcctgtttcctctacattagtagaggatttcccttccgcttctcttcctgtgacttctcttctcacccctggcctggtgataaccacagacaggatgggcataagcagagaacctggaaccagttccacttcaaatttgagcagcacctcccatgagagactgaccactttggaagacactgtagatacagaagacatgcagccttccacacacacagcagtgaccaacgtgaggacctccatttctggacatgaatcacaatcttctgtcctatctgactcagagacacccaaagccacatctccaatgggtaccacctacaccatgggggaaacgagtgtttccatatccacttctgacttctttgagaccagcagaattcagatagaaccaacatcctccctgacttctggattgagggagaccagcagctctgagaggatcagctcagccacagagggaagcactgtcctttctgaagtgcccagtggtgctaccactgaggtctccaggacagaagtgatatcctctaggggaacatccatgtcagggcctgatcagttcaccatatcaccagacatctctactgaagcgatcaccaggctttctacttcccccattatgacagaatcagcagaaagtgccatcactattgagacaggttctcctggggctacatcagagggtaccctcaccttggacacctcaacaacaaccttttggtcagggacccactcaactgcatctccaggattttcacactcagagatgaccactcttatgagtagaactcctggagatgtgccatggccgagccttccctctgtggaagaagccagctctgtctcttcctcactgtcttcacctgccatgacctcaacttcttttttctccgcattaccagagagcatctcctcctctcctcatcctgtgactgcacttctcacccttggcccagtgaagaccacagacatgttgcgcacaagctcagaacctgaaaccagttcacctccaaatttgagcagcacctcagctgaaatattagccacgtctgaagtcaccaaagatagagagaaaattcatccctcctcaaacacacctgtagtcaatgtagggactgtgatttataaacatctatccccttcctctgttttggctgacttagtgacaacaaaacccacatctccaatggctaccacctccactctggggaatacaagtgtttccacatcaactcctgccttcccagaaactatgatgacacagccaacttcctccctgacttctggattaagggagatcagtacctctcaagagaccagctcagcaacagagagaagtgcttctctttctggaatgcccactggtgctactactaaggtctccagaacagaagccctctccttaggcagaacatccaccccaggtcctgctcaatccacaatatcaccagaaatctccacggaaaccatcactagaatttctactcccctcaccacgacaggatcagcagaaatgaccatcacccccaaaacaggtcattctggggcatcctcacaaggtacctttaccttggacacatcaagcagagcctcctggccaggaactcactcagctgcaactcacagatctccacactcagggatgaccactcctatgagcagaggtcctgaggatgtgtcatggccaagccgcccatcagtggaaaaaactagccctccatcttccctggtgtctttatctgcagtaacctcaccttcgccactttattccacaccatctgagagtagccactcatctcctctccgggtgacttctcttttcacccctgtcatgatgaagaccacagacatgttggacacaagcttggaacctgtgaccacttcacctcccagtatgaatatcacctcagatgagagtctggccacttctaaagccaccatggagacagaggcaattcagctttcagaaaacacagctgtgactcagatgggcaccatcagcgctagacaagaattctattcctcttatccaggcctcccagagccatccaaagtgacatctccagtggtcacctcttccaccataaaagacattgtttctacaaccatacctgcttcctctgagataacaagaattgagatggagtcaacatccaccctgacccccacaccaagggagaccagcacctcccaggagatccactcagccacaaagccaagcactgttccttacaaggcactcactagtgccacgattgaggactccatgacacaagtcatgtcctctagcagaggacctagccctgatcagtccacaatgtcacaagacatatccagtgaagtgatcaccaggctctctacctcccccatcaaggcagaatctacagaaatgaccattaccacccaaacaggttctcctggggctacatcaaggggtacccttaccttggacacttcaacaacttttatgtcagggacccactcaactgcatctcaaggattttcacactcacagatgaccgctcttatgagtagaactcctggagatgtgccatggctaagccatccctctgtggaagaagccagctctgcctctttctcactgtcttcacctgtcatgacctcatcttctcccgtttcttccacattaccagacagcatccactcttcttcgcttcctgtgacatcacttctcacctcagggctggtgaagaccacagagctgttgggcacaagctcagaacctgaaaccagttcacccccaaatttgagcagcacctcagctgaaatactggccaccactgaagtcactacagatacagagaaactggagatgaccaatgtggtaacctcaggttatacacatgaatctccttcctctgtcctagctgactcagtgacaacaaaggccacatcttcaatgggtatcacctaccccacaggagatacaaatgttctcacatcaacccctgccttctctgacaccagtaggattcaaacaaagtcaaagctctcactgactcctgggttgatggagaccagcatctctgaagagaccagctctgccacagaaaaaagcactgtcctttctagtgtgcccactggtgctactactgaggtctccaggacagaagccatctcttctagcagaacatccatcccaggccctgctcaatccacaatgtcatcagacacctccatggaaaccatcactagaatttctacccccctcacaaggaaagaatcaacagacatggccatcacccccaaaacaggtccttctggggctacctcgcagggtacctttaccttggactcatcaagcacagcctcctggccaggaactcactcagctacaactcagagatttccacagtcagtggtgacaactcctatgagcagaggtcctgaggatgtgtcatggccaagcccgctgtctgtggaaaaaaacagccctccatcttccctggtatcttcatcttcagtaacctcaccttcgccactttattccacaccatctgggagtagccactcctctcctgtccctgtcacttctcttttcacctctatcatgatgaaggccacagacatgttggatgcaagtttggaacctgagaccacttcagctcccaatatgaatatcacctcagatgagagtctggccacttctaaagccaccacggagacagaggcaattcacgtttttgaaaatacagcagcgtcccatgtggaaaccaccagtgctacagaggaactctattcctcttccccaggcttctcagagccaacaaaagtgatatctccagtggtcacctcttcctctataagagacaacatggtttccacaacaatgcctggctcctctggcattacaaggattgagatagagtcaatgtcatctctgacccctggactgagggagaccagaacctcccaggacatcacctcatccacagagacaagcactgtcctttacaagatgtcctctggtgccactcctgaggtctccaggacagaagttatgccctctagcagaacatccattcctggccctgctcagtccacaatgtcactagacatctccgatgaagttgtcaccaggctgtctacctctcccatcatgacagaatctgcagaaataaccatcaccacccaaacaggttattctctggctacatcccaggttacccttcccttgggcacctcaatgacctttttgtcagggacccactcaactatgtctcaaggactttcacactcagagatgaccaatcttatgagcaggggtcctgaaagtctgtcatggacgagccctcgctttgtggaaacaactagatcttcctcttctctgacatcattacctctcacgacctcactttctcctgtgtcctccacattactagacagtagcccctcctctcctcttcctgtgacttcacttatcctcccaggcctggtgaagactacagaagtgttggatacaagctcagagcctaaaaccagttcatctccaaatttgagcagcacctcagttgaaataccggccacctctgaaatcatgacagatacagagaaaattcatccttcctcaaacacagcggtggccaaagtgaggacctccagttctgttcatgaatctcattcctctgtcctagctgactcagaaacaaccataaccataccttcaatgggtatcacctccgctgtggacgataccactgttttcacatcaaatcctgccttctctgagactaggaggattccgacagagccaacattctcattgactcctggattcagggagactagcacctctgaagagaccacctcaatcacagaaacaagtgcagtcctttatggagtgcccactagtgctactactgaagtctccatgacagaaatcatgtcctctaatagaacacacatccctgactctgatcagtccacgatgtctccagacatcatcactgaagtgatcaccaggctctcttcctcatccatgatgtcagaatcaacacaaatgaccatcaccacccaaaaaagttctcctggggctacagcacagagtactcttaccttggccacaacaacagcccccttggcaaggacccactcaactgttcctcctagatttttacactcagagatgacaactcttatgagtaggagtcctgaaaatccatcatggaagagctctccctttgtggaaaaaactagctcttcatcttctctgttgtccttacctgtcacgacctcaccttctgtttcttccacattaccgcagagtatcccttcctcctctttttctgtgacttcactcctcaccccaggcatggtgaagactacagacacaagcacagaacctggaaccagtttatctccaaatctgagtggcacctcagttgaaatactggctgcctctgaagtcaccacagatacagagaaaattcatccttcttcaagcatggcagtgaccaatgtgggaaccaccagttctggacatgaactatattcctctgtttcaatccactcggagccatccaaggctacatacccagtgggtactccctcttccatggctgaaacctctatttccacatcaatgcctgctaattttgagaccacaggatttgaggctgagccattttctcatttgacttctggatttaggaagacaaacatgtccctggacaccagctcagtcacaccaacaaatacaccttcttctcctgggtccactcaccttttacagagttccaagactgatttcacctcttctgcaaaaacatcatccccagactggcctccagcctcacagtatactgaaattccagtggacataatcaccccctttaatgcttctccatctattacggagtccactgggataacctccttcccagaatccaggtttactatgtctgtaacagaaagtactcatcatctgagtacagatttgctgccttcagctgagactatttccactggcacagtgatgccttctctatcagaggccatgacttcatttgccaccactggagttccacgagccatctcaggttcaggtagtccattctctaggacagagtcaggccctggggatgctactctgtccaccattgcagagagcctgccttcatccactcctgtgccattctcctcttcaaccttcactaccactgattcttcaaccatcccagccctccatgagataacttcctcttcagctaccccatatagagtggacaccagtcttgggacagagagcagcactactgaaggacgcttggttatggtcagtactttggacacttcaagccaaccaggcaggacatcttcaacacccattttggataccagaatgacagagagcgttgagctgggaacagtgacaagtgcttatcaagttccttcactctcaacacggttgacaagaactgatggcattatggaacacatcacaaaaatacccaatgaagcagcacacagaggtaccataagaccagtcaaaggccctcagacatccacttcgcctgccagtcctaaaggactacacacaggagggacaaaaagaatggagaccaccaccacagctttgaagaccaccaccacagctttgaagaccacttccagagccaccttgaccaccagtgtctatactcccactttgggaacactgactcccctcaatgcatcaaggcaaatggccagcacaatcctcacagaaatgatgatcacaaccccatatgttttccctgatgttccagaaacgacatcctcattggctaccagcctgggagcagaaaccagcacagctcttcccaggacaaccccatctgttctcaatagagaatcagagaccacagcctcactggtctctcgttctggggcagagagaagtccggttattcaaactctagatgtttcttctagtgagccagatacaacagcttcatgggttatccatcctgcagagaccatcccaactgtttccaagacaacccccaattttttccacagtgaattagacactgtatcttccacagccaccagtcatggggcagacgtcagctcagccattccaacaaatatctcacctagtgaactagatgcactgaccccactggtcactatttcggggacagatactagtacaacattcccaacactgactaagtccccacatgaaacagagacaagaaccacatggctcactcatcctgcagagaccagctcaactattcccagaacaatccccaatttttctcatcatgaatcagatgccacaccttcaatagccaccagtcctggggcagaaaccagttcagctattccaattatgactgtctcacctggtgcagaagatctggtgacctcacaggtcactagttctgggacagacagaaatatgactattccaactttgactctttctcctggtgaaccaaagacgatagcctcattagtcacccatcctgaagcacagacaagttcggccattccaacttcaactatctcgcctgctgtatcacggttggtgacctcaatggtcaccagtttggcggcaaagacaagtacaactaatcgagctctgacaaactcccctggtgaaccagctacaacagtttcattggtcacgcatcctgcacagaccagcccaacagttccctggacaacttccatttttttccatagtaaatcagacaccacaccttcaatgaccaccagtcatggggcagaatccagttcagctgttccaactccaactgtttcaactgaggtaccaggagtagtgacccctttggtcaccagttctagggcagtgatcagtacaactattccaattctgactctttctcctggtgaaccagagaccacaccttcaatggccaccagtcatggggaagaagccagttctgctattccaactccaactgtttcacctggggtaccaggagtggtgacctctctggtcactagttctagggcagtgactagtacaactattccaattctgactttttctcttggtgaaccagagaccacaccttcaatggccaccagtcatgggacagaagctggctcagctgttccaactgttttacctgaggtaccaggaatggtgacctctctggttgctagttctagggcagtaaccagtacaactcttccaactctgactctttctcctggtgaaccagagaccacaccttcaatggccaccagtcatggggcagaagccagctcaactgttccaactgtttcacctgaggtaccaggagtggtgacctctctggtcactagttctagtggagtaaacagtacaagtattccaactctgattctttctcctggtgaactagaaaccacaccttcaatggccaccagtcatggggcagaagccagctcagctgttccaactccaactgtttcacctggggtatcaggagtggtgacccctctggtcactagttccagggcagtgaccagtacaactattccaattctaactctttcttctagtgagccagagaccacaccttcaatggccaccagtcatggggtagaagccagctcagctgttctaactgtttcacctgaggtaccaggaatggtgacctctctggtcactagttctagagcagtaaccagtacaactattccaactctgactatttcttctgatgaaccagagaccacaacttcattggtcacccattctgaggcaaagatgatttcagccattccaactttagctgtctcccctactgtacaagggctggtgacttcactggtcactagttctgggtcagagaccagtgcgttttcaaatctaactgttgcctcaagtcaaccagagaccatagactcatgggtcgctcatcctgggacagaagcaagttctgttgttccaactttgactgtctccactggtgagccgtttacaaatatctcattggtcacccatcctgcagagagtagctcaactcttcccaggacaacctcaaggttttcccacagtgaattagacactatgccttctacagtcaccagtcctgaggcagaatccagctcagccatttcaactactatttcacctggtataccaggtgtgctgacatcactggtcactagctctgggagagacatcagtgcaacttttccaacagtgcctgagtccccacatgaatcagaggcaacagcctcatgggttactcatcctgcagtcaccagcacaacagttcccaggacaacccctaattattctcatagtgaaccagacaccacaccatcaatagccaccagtcctggggcagaagccacttcagattttccaacaataactgtctcacctgatgtaccagatatggtaacctcacaggtcactagttctgggacagacaccagtataactattccaactctgactctttcttctggtgagccagagaccacaacctcatttatcacctattctgagacacacacaagttcagccattccaactctccctgtctcccctggtgcatcaaagatgctgacctcactggtcatcagttctgggacagacagcactacaactttcccaacactgacggagaccccatatgaaccagagacaacagccatacagctcattcatcctgcagagaccaacacaatggttcccaagacaactcccaagttttcccatagtaagtcagacaccacactcccagtagccatcaccagtcctgggccagaagccagttcagctgtttcaacgacaactatctcacctgatatgtcagatctggtgacctcactggtccctagttctgggacagacaccagtacaaccttcccaacattgagtgagaccccatatgaaccagagactacagtcacgtggctcactcatcctgcagaaaccagcacaacggtttctgggacaattcccaacttttcccataggggatcagacactgcaccctcaatggtcaccagtcctggagtagacacgaggtcaggtgttccaactacaaccatcccacccagtataccaggggtagtgacctcacaggtcactagttctgcaacagacactagtacagctattccaactttgactccttctcctggtgaaccagagaccacagcctcatcagctacccatcctgggacacagactggcttcactgttccaattcggactgttccctctagtgagccagatacaatggcttcctgggtcactcatcctccacagaccagcacacctgtttccagaacaacctccagtttttcccatagtagtccagatgccacacctgtaatggccaccagtcctaggacagaagccagttcagctgtactgacaacaatctcacctggtgcaccagagatggtgacttcacagatcactagttctggggcagcaaccagtacaactgttccaactttgactcattctcctggtatgccagagaccacagccttattgagcacccatcccagaacagggacaagtaaaacatttcctgcttcaactgtgtttcctcaagtatcagagaccacagcctcactcaccattagacctggtgcagagactagcacagctctcccaactcagacaacatcctctctcttcaccctacttgtaactggaaccagcagagttgatctaagtccaactgcttcacctggtgtttctgcaaaaacagccccactttccacccatccagggacagagaccagcacaatgattccaacttcaactctttcccttggtttactagagactacaggcttactggccaccagctcttcagcagagaccagcacgagtactctaactctgactgtttcccctgctgtctctgggctttccagtgcctctataacaactgataagccccaaactgtgacctcctggaacacagaaacctcaccatctgtaacttcagttggacccccagaattttccaggactgtcacaggcaccactatgaccttgataccatcagagatgccaacaccacctaaaaccagtcatggagaaggagtgagtccaaccactatcttgagaactacaatggttgaagccactaatttagctaccacaggttccagtcccactgtggccaagacaacaaccaccttcaatacactggctggaagcctctttactcctctgaccacacctgggatgtccaccttggcctctgagagtgtgacctcaagaacaagttataaccatcggtcctggatctccaccaccagcagttataaccgtcggtactggacccctgccaccagcactccagtgacttctacattctccccagggatttccacatcctccatccccagctccacagcagccacagtcccattcatggtgccattcaccctcaacttcaccatcaccaacctgcagtacgaggaggacatgcggcaccctggttccaggaagttcaacgccacagagagagaactgcagggtctgctcaaacccttgttcaggaatagcagtctggaatacctctattcaggctgcagactagcctcactcaggccagagaaggatagctcagccatggcagtggatgccatctgcacacatcgccctgaccctgaagacctcggactggacagagagcgactgtactgggagctgagcaatctgacaaatggcatccaggagctgggcccctacaccctggaccggaacagtctctatgtcaatggtttcacccatcgaagctctatgcccaccaccagcactcctgggacctccacagtggatgtgggaacctcagggactccatcctccagccccagccccacggctgctggccctctcctgatgccgttcaccctcaacttcaccatcaccaacctgcagtacgaggaggacatgcgtcgcactggctccaggaagttcaacaccatggagagtgtcctgcagggtctgctcaagcccttgttcaagaacaccagtgttggccctctgtactctggctgcagattgaccttgctcaggcccgagaaagatggggcagccactggagtggatgccatctgcacccaccgccttgaccccaaaagccctggactcaacagggagcagctgtactgggagctaagcaaactgaccaatgacattgaagagctgggcccctacaccctggacaggaacagtctctatgtcaatggtttcacccatcagagctctgtgtccaccaccagcactcctgggacctccacagtggatctcagaacctcagggactccatcctccctctccagccccacaattatggctgctggccctctcctggtaccattcaccctcaacttcaccatcaccaacctgcagtatggggaggacatgggtcaccctggctccaggaagttcaacaccacagagagggtcctgcagggtctgcttggtcccatattcaagaacaccagtgttggccctctgtactctggctgcagactgacctctctcaggtctgagaaggatggagcagccactggagtggatgccatctgcatccatcatcttgaccccaaaagccctggactcaacagagagcggctgtactgggagctgagccaactgaccaatggcatcaaagagctgggcccctacaccctggacaggaacagtctctatgtcaatggtttcacccatcggacctctgtgcccaccaccagcactcctgggacctccacagtggaccttggaacctcagggactccattctccctcccaagccccgcaactgctggccctctcctggtgctgttcaccctcaacttcaccatcaccaacctgaagtatgaggaggacatgcatcgccctggctccaggaagttcaacaccactgagagggtcctgcagactctgcttggtcctatgttcaagaacaccagtgttggccttctgtactctggctgcagactgaccttgctcaggtccgagaaggatggagcagccactggagtggatgccatctgcacccaccgtcttgaccccaaaagccctggactggacagagagcagctatactgggagctgagccagctgaccaatggcatcaaagagctgggcccctacaccctggacaggaacagtctctatgtcaatggtttcacccattggatccctgtgcccaccagcagcactcctgggacctccacagtggaccttgggtcagggactccatcctccctccccagccccacagctgctggccctctcctggtgccattcaccctcaacttcaccatcaccaacctgcagtacgaggaggacatgcatcacccaggctccaggaagttcaacaccacggagcgggtcctgcagggtctgcttggtcccatgttcaagaacaccagtgtcggccttctgtactctggctgcagactgaccttgctcaggtccgagaaggatggagcagccactggagtggatgccatctgcacccaccgtcttgaccccaaaagccctggagtggacagggagcagctatactgggagctgagccagctgaccaatggcatcaaagagctgggtccctacaccctggacagaaacagtctctatgtcaatggtttcacccatcagacctctgcgcccaacaccagcactcctgggacctccacagtggaccttgggacctcagggactccatcctccctccccagccctacatcngctggccctctcctggtnccnttcaccctcaacttcaccatcaccaacctgcagtacgaggaggacatgcggcacccnggntccaggaagttcaacaccacngagagggtnctgcagggtctgctnaagcccctnttcaagagcaccagtgttggccctctgtactctggctgcagactgaccttgctcaggtccgagaaggatggagcagccactggagtggatgccatctgcacccaccgtcttgaccccaaaagccctggagtggacagggagcagctatactgggagctgagccagctgaccaatggcatcaaagagctgggtccctacaccctggacagaaacagtctctatgtcaatggtttcacccatcagacctctgcgcccaacaccagcactcctgggacctccacagtggaccttgggacctcagggactccatcctccctccccagccctacatctgctggccctctcctggtgccattcaccctcaacttcaccatcaccaacctgcagtacgaggaggacatgcatcacccaggctccaggaagttcaacaccacggagcgggtcctgcagggtctgcttggtcccatgttcaagaacaccagtgtcggccttctgtactctggctgcagactgaccttgctcaggcctgagaagaatggggcagccactggaatggatgccatctgcagccaccgtcttgaccccaaaagccctggactcaacagagagcagctgtactgggagctgagccagctgacccatggcatcaaagagctgggcccctacaccctggacaggaacagtctctatgtcaatggtttcacccatcggagctctgtggcccccaccagcactcctgggacctccacagtggaccttgggacctcagggactccatcctccctccccagccccacaacagctgttcctctcctggtgccgttcaccctcaactttaccatcaccaatctgcagtatggggaggacatgcgtcaccctggctccaggaagttcaacaccacagagagggtcctgcagggtctgcttggtcccttgttcaagaactccagtgtcggccctctgtactctggctgcagactgatctctctcaggtctgagaaggatggggcagccactggagtggatgccatctgcacccaccaccttaaccctcaaagccctggactggacagggagcagctgtactggcagctgagccagatgaccaatggcatcaaagagctgggcccctacaccctggaccggaacagtctctacgtcaatggtttcacccatcggagctctgggctcaccaccagcactccttggacttccacagttgaccttggaacctcagggactccatcccccgtccccagccccacaactgctggccctctcctggtgccattcaccctcaacttcaccatcaccaacctgcagtatgaggaggacatgcatcgccctggatctaggaagttcaacaccacagagagggtcctgcagggtctgcttagtcccattttcaagaactccagtgttggccctctgtactctggctgcagactgacctctctcaggcccgagaaggatggggcagcaactggaatggatgctgtctgcctctaccaccctaatcccaaaagacctggactggacagagagcagctgtactgggagctaagccagctgacccacaacatcactgagctgggcccctacagcctggacagggacagtctctatgtcaatggtttcacccatcagaactctgtgcccaccaccagtactcctgggacctccacagtgtactgggcaaccactgggactccatcctccttccccggccacacagagcctggccctctcctgataccattcactttcaactttaccatcaccaacctgcattatgaggaaaacatgcaacaccctggttccaggaagttcaacaccacggagagggttctgcagggtctgctcaagcccttgttcaagaacaccagtgttggccctctgtactctggctgcagactgacctctctcaggcccgagaaggatggggcagcaactggaatggatgctgtctgcctctaccaccctaatcccaaaagacctgggctggacagagagcagctgtactgggagctaagccagctgacccacaacatcactgagctgggcccctacagcctggacagggacagtctctatgtcaatggtttcacccatcagaactctgtgcccaccaccagtactcctgggacctccacagtgtactgggcaaccactgggactccatcctccttccccggccacacagagcctggccctctcctgataccattcactttcaactttaccatcaccaacctgcattatgaggaaaacatgcaacaccctggttccaggaagttcaacaccacggagagggttctgcagggtctgctcaagcccttgttcaagaacaccagtgttggccctctgtactctggctgcagactgaccttgctcagacctgagaagcatgaggcagccactggagtggacaccatctgtacccaccgcgttgatcccatcggacctggactggacagggagcggctatactgggagctgagccagctgaccaacagcattaccgaactgggaccctacaccctggacagggacagtctctatgtcaatggcttcaaccctcggagctctgtgccaaccaccagcactcctgggacctccacagtgcacctggcaacctctgggactccatcctccctgcctggccacacagcccctgtccctctcttgataccattcaccctcaactttaccatcaccaacctgcattatgaggaaaacatgcaacaccctggttccaggaagttcaacaccacggagagggttctgcagggtctgctcaagcccttgttcaagaacaccagtgttggccctctgtactctggctgcagactgaccttgctcagacctgagaagcatgaggcagccactggagtggacaccatctgtacccaccgcgttgatcccatcggacctggactgnacagngagcngctntactgggagctnagccanctgaccaannncatcnnngagctgggnccctacaccctggacaggnacagtctctatgtcaatggtttcacccatcnganctctgngcccaccaccagcactcctgggacctccacagtgnacntnggnacctcngggactccatcctccntccccngccncacatctgctggccctctcctggtgccattcaccctcaacttcaccatcaccaacctgcagtacgaggaggacatgcatcacccaggctccaggaagttcaacaccacggagcgggtcctgcagggtctgcttggtcccatgttcaagaacaccagtgtcggccttctgtactctggctgcagactgaccttgctcaggcctgagaagaatggggcagccactggaatggatgccatctgcagccaccgtcttgaccccaaaagccctggactcgacagagagcagctgtactgggagctgagccagctgacccatggcatcaaagagctgggcccctacaccctggacaggaacagtctctatgtcaatggtttcacccatcggagctctgtggcccccaccagcactcctgggacctccacagtggaccttgggacctcagggactccatcctccctccccagccccacaacagctgttcctctcctggtgccgttcaccctcaactttaccatcaccaatctgcagtatggggaggacatgcgtcaccctggctccaggaagttcaacaccacagagagggtcctgcagggtctgcttggtcccttgttcaagaactccagtgtcggccctctgtactctggctgcagactgatctctctcaggtctgagaaggatggggcagccactggagtggatgccatctgcacccaccaccttaaccctcaaagccctggactggacagggagcagctgtactggcagctgagccagatgaccaatggcatcaaagagctgggcccctacaccctggaccggaacagtctctacgtcaatggtttcacccatcggagctctgggctcaccaccagcactccttggacttccacagttgaccttggaacctcagggactccatcccccgtccccagccccacaactgctggccctctcctggtgccattcaccctaaacttcaccatcaccaacctgcagtatgaggaggacatgcatcgccctggatctaggaagttcaacgccacagagagggtcctgcagggtctgcttagtcccatattcaagaactccagtgttggccctctgtactctggctgcagactgacctctctcaggcccgagaaggatggggcagcaactggaatggatgctgtctgcctctaccaccctaatcccaaaagacctggactggacagagagcagctgtactgggagctaagccagctgacccacaacatcactgagctgggcccctacagcctggacagggacagtctctatgtcaatggtttcacccatcagagctctatgacgaccaccagaactcctgatacctccacaatgcacctggcaacctcgagaactccagcctccctgtctggacctacgaccgccagccctctcctggtgctattcacaatcaactgcaccatcaccaacctgcagtacgaggaggacatgcgtcgcactggctccaggaagttcaacaccatggagagtgtcctgcagggtctgctcaagcccttgttcaagaacaccagtgttggccctctgtactctggctgcagattgaccttgctcaggcccaagaaagatggggcagccactggagtggatgccatctgcacccaccgccttgaccccaaaagccctggactcaacagggagcagctgtactgggagctaagcaaactgaccaatgacattgaagagctgggcccctacaccctggacaggaacagtctctatgtcaatggtttcacccatcagagctctgtgtccaccaccagcactcctgggacctccacagtggatctcagaacctcagggactccatcctccctctccagccccacaattatgncnnctgnccctctcctgntnccnttcaccntcaacttnaccatcaccaacctgcantangnggannacatgcnncncccnggntccaggaagttcaacaccacngagagggtcctacagggtctgctcaggcccttgttcaagaacaccagtgtcagctctctgtactctggttgcagactgaccttgctcaggcctgagaaggatggggcagccaccagagtggatgctgcctgcacctaccgccctgatcccaaaagccctggactggacagagagcaactatactgggagctgagccagctaacccacagcatcactgagctgggaccctacaccctggacagggtcagtctctatgtcaatggcttcaaccctcggagctctgtgccaaccaccagcactcctgggacctccacagtgcacctggcaacctctgggactccatcctccctgcctggccacacancnnctgnccctctcctgntnccnttcaccntcaacttnaccatcaccaacctgcantangnggannacatgcnncncccnggntccaggaagttcaacaccacngagagggttctgcagggtctgctcaaacccttgttcaggaatagcagtctggaatacctctattcaggctgcagactagcctcactcaggccagagaaggatagctcagccatggcagtggatgccatctgcacacatcgccctgaccctgaagacctcggactggacagagagcgactgtactgggagctgagcaatctgacaaatggcatccaggagctgggcccctacaccctggaccggaacagtctctacgtcaatggtttcacccatcggagctctgggctcaccaccagcactccttggacttccacagttgaccttggaacctcagggactccatcccccgtccccagccccacaactgctggccctctcctggtgccattcaccctcaacttcaccatcaccaacctgcagtatgaggaggacatgcatcgccctggttccaggaggttcaacaccacggagagggttctgcagggtctgctcacgcccttgttcaagaacaccagtgttggccctctgtactctggctgcagactgaccttgctcagacctgagaagcaagaggcagccactggagtggacaccatctgtacccaccgcgttgatcccatcggacctggactggacagagagcggctatactgggagctgagccagctgaccaacagcatcacagagctgggaccctacaccctggatagggacagtctctatgtcaatggcttcaacccttggagctctgtgccaaccaccagcactcctgggacctccacagtgcacctggcaacctctgggactccatcctccctgcctggccacacagcccctgtccctctcttgataccattcaccctcaactttaccatcaccgacctgcattatgaagaaaacatgcaacaccctggttccaggaagttcaacaccacggagagggttctgcagggtctgctcaagcccttgttcaagagcaccagcgttggccctctgtactctggctgcagactgaccttgctcagacctgagaaacatggggcagccactggagtggacgccatctgcaccctccgccttgatcccactggtcctggactggacagagagcggctatactgggagctgagccagctgaccaacagcgttacagagctgggcccctacaccctggacagggacagtctctatgtcaatggcttcacccatcggagctctgtgccaaccaccagtattcctgggacctctgcagtgcacctggaaacctctgggactccagcctccctccctggccacacagcccctggccctctcctggtgccattcaccctcaacttcactatcaccaacctgcagtatgaggaggacatgcgtcaccctggttccaggaagttcagcaccacggagagagtcctgcagggtctgctcaagcccttgttcaagaacaccagtgtcagctctctgtactctggttgcagactgaccttgctcaggcctgagaaggatggggcagccaccagagtggatgctgtctgcacccatcgtcctgaccccaaaagccctggactggacagagagcggctgtactggaagctgagccagctgacccacggcatcactgagctgggcccctacaccctggacaggcacagtctctatgtcaatggtttcacccatcagagctctatgacgaccaccagaactcctgatacctccacaatgcacctggcaacctcgagaactccagcctccctgtctggacctacgaccgccagccctctcctggtgctattcacaattaacttcaccatcactaacctgcggtatgaggagaacatgcatcaccctggctctagaaagtttaacaccacggagagagtccttcagggtctgctcaggcctgtgttcaagaacaccagtgttggccctctgtactctggctgcagactgaccacgctcaggcccaagaaggatggggcagccaccaaagtggatgccatctgcacctaccgccctgatcccaaaagccctggactggacagagagcagctatactgggagctgagccagctaacccacagcatcactgagctgggcccctacacccaggacagggacagtctctatgtcaatggcttcacccatcggagctctgtgccaaccaccagtattcctgggacctctgcagtgcacctggaaacctctgggactccagcctccctccctggccacacagcccctggccctctcctggtgccattcaccctcaacttcactatcaccaacctgcagtatgaggaggacatgcgtcaccctggttccaggaagttcaacaccacggagagagtcctgcagggtctgctcaagcccttgttcaagagcaccagtgttggccctctgtactctggctgcagactgaccttgctcaggcctgaaaaacgtggggcagccaccggcgtggacaccatctgcactcaccgccttgaccctctaaacccaggactggacagagagcagctatactgggagctgagcaaactgacccgtggcatcatcgagctgggcccctacctcctggacagaggcagtctctatgtcaatggtttcacccatcggacctctgtgcccaccaccagcactcctgggacctccacagtggaccttggaacctcagggactccattctccctcccaagccccgcancnnctgnccctctcctgntnccnttcaccntcaacttnaccatcaccaacctgcantangnggannacatgcnncncccnggntccaggaagttcaacaccacngagagggtcctgcagactctgcttggtcctatgttcaagaacaccagtgttggccttctgtactctggctgcagactgaccttgctcaggtccgagaaggatggagcagccactggagtggatgccatctgcacccaccgtcttgaccccaaaagccctggagtggacagggagcaactatactgggagctgagccagctgaccaatggcattaaagaactgggcccctacaccctggacaggaacagtctctatgtcaatgggttcacccattggatccctgtgcccaccagcagcactcctgggacctccacagtggaccttgggtcagggactccatcctccctccccagccccacaactgctggccctctcctggtgccgttcaccctcaacttcaccatcaccaacctgaagtacgaggaggacatgcattgccctggctccaggaagttcaacaccacagagagagtcctgcagagtctgcttggtcccatgttcaagaacaccagtgttggccctctgtactctggctgcagactgaccttgctcaggtccgagaaggatggagcagccactggagtggatgccatctgcacccaccgtcttgaccccaaaagccctggagtggacagggagcagctatactgggagctgagccagctgaccaatggcatcaaagagctgggtccctacaccctggacagaaacagtctctatgtcaatggtttcacccatcagacctctgcgcccaacaccagcactcctgggacctccacagtggaccttgggacctcagggactccatcctccctccccagccctacancnnctgnccctctcctgntnccnttcaccntcaacttnaccatcaccaacctgcantangnggannacatgcnncncccnggntccaggaagttcaacaccacngagngngtnctgcagggtctgctnnnncccntnttcaagaacnccagtgtnggccntctgtactctggctgcagactgacctnnctcaggncngagaagnatggngcagccactggantggatgccatctgcanccaccnncntnancccaaaagncctggactgnacagngagcngctntactgggagctnagccanctgaccaannncatcnnngagctgggnccctacaccctggacaggnacagtctctatgtcaatggtttcacccattggatccctgtgcccaccagcagcactcctgggacctccacagtggaccttgggtcagggactccatcctccctccccagccccacaactgctggccctctcctggtgccgttcaccctcaacttcaccatcaccaacctgaagtacgaggaggacatgcattgccctggctccaggaagttcaacaccacagagagagtcctgcagagtctgcttggtcccatgttcaagaacaccagtgttggccctctgtactctggctgcagactgacctcgctcaggtccgagaaggatggagcagccactggagtggatgccatctgcacccaccgtgttgaccccaaaagccctggagtggacagggagcagctatactgggagctgagccagctgaccaatggcatcaaagagctgggtccctacaccctggacagaaacagtctctatgtcaatggtttcacccatcagacctctgcgcccaacaccagcactcctgggacctccacagtgnacntnggnacctcngggactccatcctccntccccngccncacatctgctggccctctcctggtgccattcaccctcaacttcaccatcaccaacctgcagtacgaggaggacatgcatcacccaggctccaggaagttcaacaccacggagcgggtcctgcagggtctgcttggtcccatgttcaagaacaccagtgtcggccttctgtactctggctgcagactgaccttgctcaggcctgagaagaatggggcaaccactggaatggatgccatctgcacccaccgtcttgaccccaaaagccctggactgnacagngagcngctntactgggagctnagccanctgaccaannncatcnnngagctgggnccctacaccctggacaggnacagtctctatgtcaatggtttcacccatcnganctctgngcccaccaccagcactcctgggacctccacagtgnacntnggnacctcngggactccatcctccntccccngccncacancnnctgnccctctcctgntnccnttcaccntcaacttnaccatcaccaacctgcantangnggannacatgcnncncccnggntccaggaagttcaacaccacngagagggttctgcagggtctgctcaaacccttgttcaggaatagcagtctggaatacctctattcaggctgcagactagcctcactcaggccagagaaggatagctcagccatggcagtggatgccatctgcacacatcgccctgaccctgaagacctcggactggacagagagcgactgtactgggagctgagcaatctgacaaatggcatccaggagctgggcccctacaccctggaccggaacagtctctatgtcaatggtttcacccatcgaagctctatgcccaccaccagcactcctgggacctccacagtggatgtgggaacctcagggactccatcctccagccccagccccacgactgctggccctctcctgataccattcaccctcaacttcaccatcaccaacctgcagtatggggaggacatgggtcaccctggctccaggaagttcaacaccacagagagggtcctgcagggtctgcttggtcccatattcaagaacaccagtgttggccctctgtactctggctgcagactgacctctctcaggtctgagaaggatggagcagccactggagtggatgccatctgcatccatcatcttgaccccaaaagccctggactcaacagagagcggctgtactgggagctgagccaactgaccaatggcatcaaagagctgggcccctacaccctggacaggaacagtctctatgtcaatggtttcacccatcggacctctgtgcccaccaccagcactcctgggacctccacagtggaccttggaacctcagggactccattctccctcccaagccccgcaactgctggccctctcctggtgctgttcaccctcaacttcaccatcaccaacctgaagtatgaggaggacatgcatcgccctggctccaggaagttcaacaccactgagagggtcctgcagactctgcttggtcctatgttcaagaacaccagtgttggccttctgtactctggctgcagactgaccttgctcaggtccgagaaggatggagcagccactggagtggatgccatctgcacccaccgtcttgaccccaaaagccctggactgnacagngagcngctntactgggagctnagccanctgaccaannncatcnnngagctgggnccctacaccctggacaggnacagtctctatgtcaatggtttcacccatcnganctctgngcccaccaccagcactcctgggacctccacagtgnacntnggnacctcngggactccatcctccntccccngccncacancnnctgnccctctcctgntnccnttcaccntcaacttnaccatcaccaacctgcantangnggannacatgcnncncccnggntccaggaagttcaacaccacngagagagtccttcagggtctgctcaggcctgtgttcaagaacaccagtgttggccctctgtactctggctgcagactgaccttgctcaggcccaagaaggatggggcagccaccaaagtggatgccatctgcacctaccgccctgatcccaaaagccctggactggacagagagcagctatactgggagctgagccagctaacccacagcatcactgagctgggcccctacacccaggacagggacagtctctatgtcaatggcttcacccatcggagctctgtgccaaccaccagtattcctgggacctctgcagtgcacctggaaaccactgggactccatcctccttccccggccacacagagcctggccctctcctgataccattcactttcaactttaccatcaccaacctgcgttatgaggaaaacatgcaacaccctggttccaggaagttcaacaccacggagagggttctgcagggtctgctcacgcccttgttcaagaacaccagtgttggccctctgtactctggctgcagactgaccttgctcagacctgagaagcaggaggcagccactggagtggacaccatctgtacccaccgcgttgatcccatcggacctggactggacagagagcggctatactgggagctgagccagctgaccaacagcatcacagagctgggaccctacaccctggatagggacagtctctatgtcgatggcttcaacccttggagctctgtgccaaccaccagcactcctgggacctccacagtgcacctggcaacctctgggactccatcccccctgcctggccacacagcccctgtccctctcttgataccattcaccctcaactttaccatcaccgacctgcattatgaagaaaacatgcaacaccctggttccaggaagttcaacaccacggagagggttctgcagggtctgctcaagcccttgttcaagagcaccagcgttggccctctgtactctggctgcagactgaccttgctcagacctgagaaacatggggcagccactggagtggacgccatctgcaccctccgccttgatcccactggtcctggactggacagagagcggctatactgggagctgagccagctgaccaacagcatcacagagctgggaccctacaccctggatagggacagtctctatgtcaatggcttcaacccttggagctctgtgccaaccaccagcactcctgggacctccacagtgcacctggcaacctctgggactccatcctccctgcctggccacacaactgctggccctctcctggtgccgttcaccctcaacttcaccatcaccaacctgaagtacgaggaggacatgcattgccctggctccaggaagttcaacaccacagagagagtcctgcagagtctgcatggtcccatgttcaagaacaccagtgttggccctctgtactctggctgcagactgaccttgctcaggtccgagaaggatggagcagccactggagtggatgccatctgcacccaccgtcttgaccccaaaagccctggactgnacagngagcngctntactgggagctnagccanctgaccaannncatcnnngagctgggnccctacaccctggacaggnacagtctctatgtcaatggtttcacccatcnganctctgngcccaccaccagcactcctgggacctccacagtgnacntnggnacctcngggactccatcctccntccccngccncacancnnctgnccctctcctgntnccnttcaccntcaacttnaccatcaccaacctgcantangnggannacatgcnncncccnggntccaggaagttcaacaccacngagngngtnctgcagggtctgctnnnncccntnttcaagaacnccagtgtnggccntctgtactctggctgcagactgacctnnctcaggncngagaagnatggngcagccactggantggatgccatctgcanccaccnncntnancccaaaagncctggactgnacagngagcngctntactgggagctnagccanctgaccaacagcatcacagagctgggaccctacaccctggatagggacagtctctatgtcaatggtttcacccatcgaagctctatgcccaccaccagtattcctgggacctctgcagtgcacctggaaacctctgggactccagcctccctccctggccacacagcccctggccctctcctggtgccattcaccctcaacttcactatcaccaacctgcagtatgaggaggacatgcgtcaccctggttccaggaagttcaacaccacggagagagtcctgcagggtctgctcaagcccttgttcaagagcaccagtgttggccctctgtactctggctgcagactgaccttgctcaggcctgaaaaacgtggggcagccaccggcgtggacaccatctgcactcaccgccttgaccctctaaaccctggactgnacagngagcngctntactgggagctnagccanctgaccaannncatcnnngagctgggnccctacaccctggacaggnacagtctctatgtcaatggtttcacccatcnganctctgngcccaccaccagcactcctgggacctccacagtgnacntnggnacctcngggactccatcctccntccccngccncacancnnctgnccctctcctgntnccnttcaccntcaacttnaccatcaccaacctgcantangnggannacatgcnncncccnggntccaggaagttcaacaccacngagngngtnctgcagggtctgctnnnncccntnttcaagaacnccagtgtnggccntctgtactctggctgcagactgacctnnctcaggncngagaagnatggngcagccactggantggatgccatctgcanccaccnncntnancccaaaagncctggactgnacagngagcngctntactgggagctnagccanctgaccaannncatcnnngagctgggnccctacaccctggacaggnacagtctctatgtcaatggttttcaccctcggagctctgtgccaaccaccagcactcctgggacctccacagtgcacctggcaacctctgggactccatcctccctgcctggccacacagcccctgtccctctcttgataccattcaccctcaactttaccatcaccaacctgcattatgaagaaaacatgcaacaccctggttccaggaagttcaacaccacggagcgggtcctgcagggtctgcttggtcccatgttcaagaacacaagtgtcggccttctgtactctggctgcagactgaccttgctcaggcctgagaagaatggggcagccactggaatggatgccatctgcagccaccgtcttgaccccaaaagccctggactgnacagngagcngctntactgggagctnagccanctgaccaannncatcnnngagctgggnccctacaccctggacaggnacagtctctatgtcaatggtttcacccatcnganctctgngcccaccaccagcactcctgggacctccacagtgnacntnggnacctcngggactccatcctccntccccngccncacancnnctgnccctctcctgntnccnttcaccntcaacttnaccatcaccaacctgcantangnggannacatgcnncncccnggntccaggaagttcaacaccacngagngngtnctgcagggtctgctnnnncccntnttcaagaacnccagtgtnggccntctgtactctggctgcagactgacctnnctcaggncngagaagnatggngcagccactggantggatgccatctgcanccaccnncntnancccaaaagncctggactgnacagngagcngctntactgggagctnagccanctgaccaannncatcnnngagctgggnccctacaccctggacaggnacagtctctatgtcaatggtttcacccatcagaactctgtgcccaccaccagtactcctgggacctccacagtgtactgggcaaccactgggactccatcctccttccccggccacacagagcctggccctctcctgataccattcactttcaactttaccatcaccaacctgcattatgaggaaaacatgcaacaccctggttccaggaagttcaacaccacggagagggttctgcagggtctgctcacgcccttgttcaagaacaccagtgttggccctctgtactctggctgcagactgaccttgctcagacctgagaagcaggaggcagccactggagtggacaccatctgtacccaccgcgttgatcccatcggacctggactgnacagngagcngctntactgggagctnagccanctgaccaannncatcnnngagctgggnccctacaccctggacaggnacagtctctatgtcaatggtttcacccatcnganctctgngcccaccaccagcactcctgggacctccacagtgnacntnggnacctcngggactccatcctccntccccngccncacancnnctgnccctctcctgntnccnttcaccntcaacttnaccatcaccaacctgcantangnggannacatgcnncncccnggntccaggaagttcaacaccacngagngngtnctgcagggtctgctnnnncccntnttcaagaacnccagtgtnggccntctgtactctggctgcagactgacctnnctcaggncngagaagnatggngcagccactggantggatgccatctgcanccaccnncntnancccaaaagncctggactgnacagngagcngctntactgggagctnagccanctgaccaannncatcnnngagctgggnccctacaccctggacaggnacagtctctatgtcaatggtttcacccatcggagctctgtgccaaccaccagcagtcctgggacctccacagtgcacctggcaacctctgggactccatcctccctgcctggccacacagcccctgtccctctcttgataccattcaccctcaactttaccatcaccaacctgcattatgaagaaaacatgcaacaccctggttccaggaagttcaacaccacggagagggttctgcagggtctgctcaagcccttgttcaagagcaccagtgttggccctctgtactctggctgcagactgaccttgctcagacctgagaaacatggggcagccactggagtggacgccatctgcaccctccgccttgatcccactggtcctggactgnacagngagcngctntactgggagctnagccanctgaccaannncatcnnngagctgggnccctacaccctggacaggnacagtctctatgtcaatggtttcacccatcnganctctgngcccaccaccagcactcctgggacctccacagtgnacntnggnacctcngggactccatcctccntccccngccncacancnnctgnccctctcctgntnccnttcaccntcaacttnaccatcaccaacctgcantangnggannacatgcnncncccnggntccaggaagttcaacaccacngagngngtnctgcagggtctgctnnnncccntnttcaagaacnccagtgtnggccntctgtactctggctgcagactgacctnnctcaggncngagaagnatggngcagccactggantggatgccatctgcanccaccnncntnancccaaaagncctggactgnacagngagcngctntactgggagctnagccanctgaccaannncatcnnngagctgggnccctacaccctggacaggnacagtctctatgtcaatggtttcacccatcggacctctgtgcccaccaccagcactcctgggacctccacagtgcacctggcaacctctgggactccatcctccctgcctggccacacagcccctgtccctctcttgataccattcaccctcaactttaccatcaccaacctgcagtatgaggaggacatgcatcgccctggatctaggaagttcaacaccacagagagggtcctgcagggtctgcttagtcccattttcaagaactccagtgttggccctctgtactctggctgcagactgacctctctcaggcccgagaaggatggggcagcaactggaatggatgctgtctgcctctaccaccctaatcccaaaagacctgggctggacagagagcagctgtactgcgagctaagccagctgacccacaacatcactgagctgggcccctacagcctggacagggacagtctctatgtcaatggtttcacccatcagaactctgtgcccaccaccagtactcctgggacctccacagtgtactgggcaaccactgggactccatcctccttccccggccacacancnnctgnccctctcctgntnccnttcaccntcaacttnaccatcaccaacctgcantangnggannacatgcnncncccnggntccaggaagttcaacaccacngagngngtnctgcagggtctgctnnnncccntnttcaagaacnccagtgtnggccntctgtactctggctgcagactgacctnnctcaggncngagaagnatggngcagccactggantggatgccatctgcanccaccnncntnancccaaaagncctggactgnacagngagcngctntactgggagctnagccanctgaccaannncatcnnngagctgggnccctacaccctggacaggnacagtctctatgtcaatggtttcacccattggagctctgggctcaccaccagcactccttggacttccacagttgaccttggaacctcagggactccatcccccgtccccagccccacaactgctggccctctcctggtgccattcaccctaaacttcaccatcaccaacctgcagtatgaggaggacatgcatcgccctggatctaggaagttcaacgccacagagagggtcctgcagggtctgcttagtcccatattcaagaacaccagtgttggccctctgtactctggctgcagactgaccttgctcagacctgagaagcaggaggcagccactggagtggacaccatctgtacccaccgcgttgatcccatcggacctggactgnacagngagcngctntactgggagctnagccanctgaccaannncatcnnngagctgggnccctacaccctggacaggnacagtctctatgtcaatggtttcacccatcnganctctgngcccaccaccagcactcctgggacctccacagtgnacntnggnacctcngggactccatcctccntccccngccncacancnnctgnccctctcctgntnccnttcaccntcaacttnaccatcaccaacctgcantangnggannacatgcnncncccnggntccaggaagttcaacaccacngagngngtnctgcagggtctgctnnnncccntnttcaagaacnccagtgtnggccntctgtactctggctgcagactgacctnnctcaggncngagaagnatggngcagccactggantggatgccatctgcanccaccnncntnancccaaaagncctggactgnacagngagcngctntactgggagctnagccanctgaccaannncatcnnngagctgggnccctacaccctggacaggnacagtctctatgtcaatggtttcacccatcggagctttgggctcaccaccagcactccttggacttccacagttgaccttggaacctcagggactccatcccccgtccccagccccacaactgctggccctctcctggtgccattcaccctaaacttcaccatcaccaacctgcagtatgaggaggacatgcatcgccctggctccaggaagttcaacaccacggagagggtccttcagggtctgcttacgcccttgttcaggaacaccagtgtcagctctctgtactctggttgcagactgaccttgctcaggcctgagaaggatggggcagccaccagagtggatgctgtctgcacccatcgtcctgaccccaaaagccctggactgnacagngagcngctntactgggagctnagccanctgaccaannncatcnnngagctgggnccctacaccctggacaggnacagtctctatgtcaatggtttcacccatcnganctctgngcccaccaccagcactcctgggacctccacagtgnacntnggnacctcngggactccatcctccntccccngccncacancnnctgnccctctcctgntnccnttcaccntcaacttnaccatcaccaacctgcantangnggannacatgcnncncccnggntccaggaagttcaacaccacngagngngtnctgcagggtctgctnnnncccntnttcaagaacnccagtgtnggccntctgtactctggctgcagactgacctnnctcaggncngagaagnatggngcagccactggantggatgccatctgcanccaccnncntnancccaaaagncctggactgnacagngagcngctntactgggagctnagccanctgaccaannncatcnnngagctgggnccctacaccctggacaggnacagtctctatgtcaatggtttcacccattggatccctgtgcccaccagcagcactcctgggacctccacagtggaccttgggtcagggactccatcctccctccccagccccacaactgctggccctctcctggtaccattcaccctcaacttcaccatcaccaacctgcagtatggggaggacatgggtcaccctggctccaggaagttcaacaccacagagagggtcctgcagggtctgcttggtcccatattcaagaacaccagtgttggccctctgtactctggctgcagactgacctctctcaggtccgagaaggatggagcagccactggagtggatgccatctgcatccatcatcttgaccccaaaagccctggactgnacagngagcngctntactgggagctnagccanctgaccaannncatcnnngagctgggnccctacaccctggacaggnacagtctctatgtcaatggtttcacccatcnganctctgngcccaccaccagcactcctgggacctccacagtgnacntnggnacctcngggactccatcctccntccccngccncacancnnctgnccctctcctgntnccnttcaccntcaacttnaccatcaccaacctgcantangnggannacatgcnncncccnggntccaggaagttcaacaccacngagngngtnctgcagggtctgctnnnncccntnttcaagaacnccagtgtnggccntctgtactctggctgcagactgacctnnctcaggncngagaagnatggngcagccactggantggatgccatctgcanccaccnncntnancccaaaagncctggactgnacagngagcngctntactgggagctnagccanctgaccaannncatcnnngagctgggnccctacaccctggacaggnacagtctctatgtcaatggtttcacccatcagacctttgcgcccaacaccagcactcctgggacctccacagtggaccttgggacctcagggactccatcctccctccccagccctacatctgctggccctctcctggtgccattcaccctcaacttcaccatcaccaacctgcagtacgaggaggacatgcatcacccaggctccaggaagttcaacaccacggagcgggtcctgcagggtctgcttggtcccatgttcaagaacaccagtgtcggccttctgtactctggctgcagactgaccttgctcaggcctgagaagaatggggcagccaccagagtggatgctgtctgcacccatcgtcctgaccccaaaagccctggactgnacagngagcngctntactgggagctnagccanctgaccaannncatcnnngagctgggnccctacaccctggacaggnacagtctctatgtcaatggtttcacccatcnganctctgngcccaccaccagcactcctgggacctccacagtgnacntnggnacctcngggactccatcctccntccccngccncacagcccctgtccctctcttgataccattcaccctcaactttaccatcaccaacctgcattatgaagaaaacatgcaacaccctggttccaggaagttcaacaccacggagagggttctgcagggtctgctcaagcccttgttcaagagcaccagcgttggccctctgtactctggctgcagactgaccttgctcagacctgagaaacatggggcagccactggagtggacgccatctgcaccctccgccttgatcccactggtcctggactggacagagagcggctatactgggagctgagccagctgaccaacagcgttacagagctgggcccctacaccctggacagggacagtctctatgtcaatggcttcacccagcggagctctgtgccaaccaccagtattcctgggacctctgcagtgcacctggaaacctctgggactccagcctccctccctggccacacagcccctggccctctcctggtgccattcaccctcaacttcactatcaccaacctgcagtatgaggtggacatgcgtcaccctggttccaggaagttcaacaccacggagagagtcctgcagggtctgctcaagcccttgttcaagagcaccagtgttggccctctgtactctggctgcagactgaccttgctcaggcctgaaaaacgtggggcagccaccggcgtggacaccatctgcactcaccgccttgaccctctaaaccctggactggacagagagcagctatactgggagctgagcaaactgacccgtggcatcatcgagctgggcccctacctcctggacagaggcagtctctatgtcaatggtttcacccatcggaactttgtgcccatcaccagcactcctgggacctccacagtacacctaggaacctctgaaactccatcctccctacctagacccatagtgcctggccctctcctggtgccattcaccctcaacttcaccatcaccaacttgcagtatgaggaggccatgcgacaccctggctccaggaagttcaataccacggagagggtcctacagggtctgctcaggcccttgttcaagaataccagtatcggccctctgtactccagctgcagactgaccttgctcaggccagagaaggacaaggcagccaccagagtggatgccatctgtacccaccaccctgaccctcaaagccctggactgaacagagagcagctgtactgggagctgagccagctgacccacggcatcactgagctgggcccctacaccctggacagggacagtctctatgtcgatggtttcactcattggagccccataccgaccaccagcactcctgggacctccatagtgaacctgggaacctctgggatcccaccttccctccctgaaactacancnnctgnccctctcctgntnccnttcaccntcaacttnaccatcaccaacctgcantangnggannacatgcnncncccnggntccaggaagttcaacaccacngagagggttctgcagggtctgctcaagcccttgttcaagagcaccagtgttggccctctgtattctggctgcagactgaccttgctcaggcctgagaaggacggagtagccaccagagtggacgccatctgcacccaccgccctgaccccaaaatccctgggctagacagacagcagctatactgggagctgagccagctgacccacagcatcactgagctgggaccctacaccctggatagggacagtctctatgtcaatggtttcacccagcggagctctgtgcccaccaccagcactcctgggactttcacagtacagccggaaacctctgagactccatcatccctccctggccccacagccactggccctgtcctgctgccattcaccctcaattttaccatcactaacctgcagtatgaggaggacatgcatcgccctggctccaggaagttcaacaccacggagagggtccttcagggtctgcttatgcccttgttcaagaacaccagtgtcagctctctgtactctggttgcagactgaccttgctcaggcctgagaaggatggggcagccaccagagtggatgctgtctgcacccatcgtcctgaccccaaaagccctggactggacagagagcggctgtactggaagctgagccagctgacccacggcatcactgagctgggcccctacaccctggacaggcacagtctctatgtcaatggtttcacccatcagagctctatgacgaccaccagaactcctgatacctccacaatgcacctggcaacctcgagaactccagcctccctgtctggacctacgaccgccagccctctcctggtgctattcacaattaacttcaccatcactaacctgcggtatgaggagaacatgcatcaccctggctctagaaagtttaacaccacggagagagtccttcagggtctgctcaggcctgtgttcaagaacaccagtgttggccctctgtactctggctgcagactgaccttgctcaggcccaagaaggatggggcagccaccaaagtggatgccatctgcacctaccgccctgatcccaaaagccctggactggacagagagcagctatactgggagctgagccagctaacccacagcatcactgagctgggcccctacaccctggacagggacagtctctatgtcaatggtttcacacagcggagctctgtgcccaccactagcattcctgggacccccacagtggacctgggaacatctgggactccagtttctaaacctggtccctcggctgccagccctctcctggtgctattcactctcaacttcaccatcaccaacctgcggtatgaggagaacatgcagcaccctggctccaggaagttcaacaccacggagagggtccttcagggcctgctcaggtccctgttcaagagcaccagtgttggccctctgtactctggctgcagactgactttgctcaggcctgaaaaggatgggacagccactggagtggatgccatctgcacccaccaccctgaccccaaaagccctaggctggacagagagcagctgtattgggagctgagccagctgacccacaatatcactgagctgggccactatgccctggacaacgacagcctctttgtcaatggtttcactcatcggagctctgtgtccaccaccagcactcctgggacccccacagtgtatctgggagcatctaagactccagcctcgatatttggcccttcagctgccagccatctcctgatactattcaccctcaacttcaccatcactaacctgcggtatgaggagaacatgtggcctggctccaggaagttcaacactacagagagggtccttcagggcctgctaaggcccttgttcaagaacaccagtgttggccctctgtactctggctccaggctgaccttgctcaggccagagaaagatggggaagccaccggagtggatgccatctgcacccaccgccctgaccccacaggccctgggctggacagagagcagctgtatttggagctgagccagctgacccacagcatcactgagctgggcccctacacactggacagggacagtctctatgtcaatggtttcacccatcggagctctgtacccaccaccagcaccggggtggtcagcgaggagccattcacactgaacttcaccatcaacaacctgcgctacatggcggacatgggccaacccggctccctcaagttcaacatcacagacaacgtcatgaagcacctgctcagtcctttgttccagaggagcagcctgggtgcacggtacacaggctgcagggtcatcgcactaaggtctgtgaagaacggtgctgagacacgggtggacctcctctgcacctacctgcagcccctcagcggcccaggtctgcctatcaagcaggtgttccatgagctgagccagcagacccatggcatcacccggctgggcccctactctctggacaaagacagcctctaccttaacggttacaatgaacctggtctagatgagcctcctacaactcccaagccagccaccacattcctgcctcctctgtcagaagccacaacagccatggggtaccacctgaagaccctcacactcaacttcaccatctccaatctccagtattcaccagatatgggcaagggctcagctacattcaactccaccgagggggtccttcagcacctgctcagacccttgttccagaagagcagcatgggccccttctacttgggttgccaactgatctccctcaggcctgagaaggatggggcagccactggtgtggacaccacctgcacctaccaccctgaccctgtgggccccgggctggacatacagcagctttactgggagctgagtcagctgacccatggtgtcacccaactgggcttctatgtcctggacagggatagcctcttcatcaatggctatgcaccccagaatttatcaatccggggcgagtaccagataaatttccacattgtcaactggaacctcagtaatccagaccccacatcctcagagtacatcaccctgctgagggacatccaggacaaggtcaccacactctacaaaggcagtcaactacatgacacattccgcttctgcctggtcaccaacttgacgatggactccgtgttggtcactgtcaaggcattgttctcctccaatttggaccccagcctggtggagcaagtctttctagataagaccctgaatgcctcattccattggctgggctccacctaccagttggtggacatccatgtgacagaaatggagtcatcagtttatcaaccaacaagcagctccagcacccagcacttctacctgaatttcaccatcaccaacctaccatattcccaggacaaagcccagccaggcaccaccaattaccagaggaacaaaaggaatattgaggatgcgctcaaccaactcttccgaaacagcagcatcaagagttatttttctgactgtcaagtttcaacattcaggtctgtccccaacaggcaccacaccggggtggactccctgtgtaacttctcgccactggctcggagagtagacagagttgccatctatgaggaatttctgcggatgacccggaatggtacccagctgcagaacttcaccctggacaggagcagtgtccttgtggatgggtattctcccaacagaaatgagcccttaactgggaattctgaccttcccttctgggctgtcatcctcatcggcttggcaggactcctgggactcatcacatgcctgatctgcggtgtcctggtgaccacccgccggcggaagaaggaaggagaatacaacgtccagcaacagtgcccaggctactaccagtcacacctagacctggaggatctgcaatgactggaacttgccggtgcctggggtgcctttcccccagccagggtccaaagaagcttggctggggcagaaataaaccatattggtcggaaaaaaaaaaaaaaa

SEQ ID NO: 23730 - DNA, 1818 bp, Homo Sapiens
gtggaattgccctttgcatcaaatgatccagaatgtcggaaatcacctgcgacggggcttggcctctgtgttctccaaccgcacatcccggaagtcagccttacgtgcggggaacgacagtgccatggcagacggcgagggataccggaaccccacggaggtgcagatgagccagctggtgctgccctgccacaccaaccaacgtggtgagctgagcgtcgggcagctgctcaagtggattgacaccacggcttgcctgtccgcggagaggcacgctggctgcccctgtgtcacagcttccatggatgacatctattttgagcacaccattagtgttggacaagtggtgaatatcaaggccaaggtgaaccgggccttcaactccagcatggaggtgggcatccaggtggcctcggaggacctgtgctctgagaagcagtggaatgtgtgcaaggccttggccaccttcgtggcccgccgagagatcaccaaggtgaagctgaagcagatcacgccgcggacagaagaggagaagatggagcacagtgtggcggctgagcgccggcgcatgcgccttgtctatgcagacaccatcaaggacctcctggccaactgcgccattcagggcgatctggagagcagagactgtagccgcatggtgccggctgagaagacccgtgtggagagtgtggagctggtcctgcctccccacgccaatcaccagggcaacacctttgggggccagatcatggcctggatggagaatgtggccaccattgcagccagccggctctgccgtgcccaccctacgctgaaggccattgaaatgttccacttccgaggcccgtcccaggtcggcgaccgtctggtgctcaaagccatcgtgaacaatgccttcaaacatagcatggaggtgggcgtgtgcgtggaggcctatcgccaggaggctgagacccaccggcgccacatcaacagtgcctttatgacctttgtggtcctggacgcagatgaccagccccagttgctgccctggattcggccccagcccggcgatggtgagcggcggtaccgagaggccagtgccagaaagaagatccgcctggacaggaagtacatcgtgtcctgtaagcagacagaggtgcccctctccgtcccctgggaccctagcaaccaggtgtacctgagctacaataacgtctcctccttgaagatgcttgtggccaaggacaactgggtgctgtcctcggagatcagtcaggtccgcctgtacactctggaggatgacaagttcctctccttccacatggagatggtggtgcatgtggatgcagcccaggccttcctgctgctctcggacctgcgtcagaggccagagtgggacaagcactaccggagcgtggagctagtgcagcaggtagacgaggacgacgccatctaccacgtcaccagccctgccctcggaggtcacacaaagccccaggacttcgtgatcctggcctcgaggcggaagccttgtgacaatggggacccctatgtcatcgcgctgaggtcggtcacgctgcccacacaccgagagacgccagagtacagacgcggagagaccctctgctcaggcttctgcctctggcgcgagggggaccagctgaccaaggtatcctactacaaccaggccaccccaggtgttctcaactatgtgaccaccaacgtggccggcctctcctctgagttctacaccaccttcaaggcttgtgagcagtttctcttggacaaccggaatgatctggcccccagcctccagaccctctagatgccctcagc

SEQ ID NO: 23731 - DNA, 18891 bp, Homo Sapiens
ctgacacccttagatggtgaaacctggcttcacctactgtctgtggatgtctgcaggcagagtgggcactcgggagcacatacaaagcacgtgtgccgtgaacacgtatgtgcacacaccttgatcctagcatggcttgttggacaagccaatggacagagtccctgcctgccacctccacccctgctctcccttctcttccattcactgtcctgcagacacagcaaacacatacgcacatacaccctcaatatccttttggcagtaacatgacccccaaatctggggacttctatgtaggatggagacccttctcctttcctcatacctggtttattatgaaccataaaaatagtgcctgacagttactgtgtgtcaggcattgttctaagccttcagatgttttactgcattttattctcacattatgggttaagacttatttgctccattttacagatgacgagaatgaatcacagagtaaattgctcagggttgtgtggttagcagcattagcaggatttgaacccaagcagcctgtatccacagtccagtcttttaactgctatattttgctgtgttcaaaccctctgctgcctggctgggtccacacacgtgcactcatgcacagacctgcggggtagcaagggatggaggaggaggagctggttctggaaatcaattcaggcaccagggggcagcataggcctagctttggcccctcagcccagcccctgctatgggagggaggaggggagtagaaacttcctcccaccgcccctcagacaccacctcttccacacaccggggctctcaggtgtccgggagtaaaggcctctctggatcccttggtctcctccagctcctcccccagcaaaaactgcagaaccctccactagttatgttgatgactcagaagttgagcaagactgtgtgtgtgtgtgtgtgtgtgtgtgtgtgtgtgtgtgtgtgtgtgtgtgtggtgttgtgattgcaatgggctctgtttgtgagcctgcctgcacgtgtgtgtgtgtgtgtgtgtgtgtgtgtgtgtgtgtgtagtcttgtggtcagggaagttgtgcatgtgtgtgtttgtttcttggcgtgtctcagtgtttaccccagaaacatataggaacttggcagataggaacacagcagattcgtattcaaacttgccccttgtgaatctgcaggcagcagctccggcttgtgctggttcccaccacagtctcaggaggggtgccctgtgaggagagagcaaagaccagcttcagtccaagggactcctagagtcttccagaattctgagctgagggttcccctcccccactccctcccgtcagtggtcacgagaccgacctctaaggcgttccctgccggaagggagggggacctaggagttggctggcatcgagctccctggcggctttttagggtcctccactggagggagcgcagagtccagagggatttacttttcctgaggccctggggagcccagtcccttgtgggtccaaaccccagcccttggcagagtttgagtttgggagccaggcagttaggggtggcaaatctctgtttgatattgggtgactttctggagaaaagctgatgcttttgagggggacagagtaagtgggggtcagcctccccccaagcctggctccaaggcctggaccccagtcctgatcccccacgtgttcccccactcggcacaggaggcacacatattcaccccactttcttcctcttcctcctccagcccactttctcttctctgtgtcgtcagagctccagggagggacctgggtagaaggagaagccggaaacagcgggctggggcagccactgcttacactgaagagggaggacgggagaggagtgtgtgtgtgtgtgtgtgtgtgtgtatgtatgtgtgtgctttatcttatttttctttttggtggtggtggtggtggaaggggggaggtgctagcagggccagccttgaactcgctggacagagctacagacctatggggcctggaagtgcccgctgagaaagggagaagacagcagaggggttgccgaggtgaggggttgcctccgaggtgggtgcgggggcctctatgagtgcatgggggtggattcgtggggggagctctcgggatcctcccctggctgggtggatggtccccaagagatggtttcagctagtgttggtggctggtggcactgggttttagcagtttcgaactcctggaggaatctgggagggtccaggcctcagtactcccctcccccatgggtcacgttttcacagcctcacccctgcacccccagggccatggaaagtcagggaaaggaggtgaaggagtgcccctctgccctgagtcgggggaagtggccgcccctccctggaaggttgatgccagagggcagtggatccttgttaaacccctatcctgccctccactaaaggttcctgttcaagggtgtggctggggcgtgagcaagccccagatgtagacctcatggtggcccagacgagggggaatttccccctcaaaactgctccacgcttggctgctgtagacgctgagatttcccagcggcggcgccgagttaaccctcctcgtgctgaactggctccacctccccgcctgcccccaccgccacattcacgcattgggcaactcagagaagctgttttaactttcgatcctgtggtcccacaatcagaggactcgggcagataggggttgagataagcgagtttaggccaccaagcgggcggacgaggatcccagaccttgcgcttcccttctgagtttgggaggtaacactggccccgcccctcacgccgtggctcctccctcccttccccttcaaggggctgaagacaaaaggtgcccctgtcctggtcaagccaatcgacccagccttgttatgggttggggtggggagaaatgtgtcctcctgatggctggggaagaagaggggttggatatttctagccagggccatgccaggaggctggtcactctgcaaggggatgcagaggaaagcggtgcccactcactccagaggacctttctctcttgggctagagaaaggcctattggaggaacctgagcaggaggggtaaggattctgccttgaggagaaaagagctggggtaagtgggcactggaggaaagaggggcatgaaggtcttggagcagaaacgtccagagaagggacctctccattttccatccctctgagaggcctgggagaggtgagaggctgaacgtgcaacaggaggacttggggttactgggtttggggagacctggggagttgtcatcccatcctctccctcatctctgggagagggatattatgagaaacgtgaactgagaggcccctgggaaaccactggttacccagtcctccctgaacctggaaatggggatgcaaccccctcttctacttccctgtcccctcctctcctttctacctgttttcgtctctcatctttgccttctagccctccagcttcctctctcttctaggctctttcctcctagcttactaaacccgccttttttccagtctcttccatcctcttccttagttctctctactttccttttccacctctcctccttcaagtctcctcccaccttcccccacttcttaggatgatcagatttgcccctggaagggatcctaacaacacagtgcgatggttaatccccactcagattcaaagcctgctttccaaactcacttactgagtggccttgggcagagtagagaaactccttaagcctcagtttcttcatctataaaatgggatattatatattttaaaaagtgtcgtgaggcctgaaggagataatacactgagtgtaatgcctcatacacagtaagtgcttaacaaatagtagctgttattactctcccatcctcttcatcatctagccttgtggttttcatttttattttatttcatttatttatttatttattttgaggcagagtctctctctgtcgcccaggctggagtgcagtggctcgatctctgctcactgcaagctccgccccccaggttcacgccattctgtcacctcagcctccccagtagctgggactacaggcgctcgccaccacgccctgctaattttgtttttgtatttttagtagagatggggtttcactgtgttagccaggatggtcttgatctcctgacctcgtgatctgcccgcctcggcctcccaaagcgctgggattacaggcatgagccactgcgcctggccgagccttgtggttttcaaattatctcatggagtcctagaattttgagaggtttgtctagggatgcctttggcgtcaggaggtggggagagggaagtagaagcagtcgagtttcaggctttccatgcttgctttcaacagggcatcttcggtttcgtaccttttatgtaattgagattccacagattaaaagctgacattgcctaccgctttaaaaagtttggaaagttttccactcatctaacactcatattttatagatgagaagatcgaagcccacaaagggaaggctctttgcccacagaaccagagccaggtctagagctgcaactaaatcctctgccactctaagagagctctcgctctactgccctgtctccctttgcctccccttgcctccccatccctctggctacagctcagctcttcccacccctgtgtctatcactgaaggagttacccccatctcaggcattgactcaggatgcccctggtttaaggtggtctggccatgagtggtggtggggacggtccctaggagggctatctatgggaggtccctggctgccccaggagataggccaagtttcttgggcacccctcagagtggccttatttttctcctccaggcaacctccaagtcccagatcatgtctctgtggggtctggtctccaagatgcccccagaaaaagtgcagcggctctatgtcgactttccccaacacctgcggcatcttctgggtgactggctggagagccagccctggtgagtcctggctgctccctgctggtcccccaagtcttccctaactcatcttccttctccttagatttttctcccctcacccatggattcagaacttgagacctgttattccatgtgtagtgacctagatttagcagggagtctgtgccccatcaagaccaggctatgaatgttgacagatggagaccccatctcttaggaggctgagccgaagaggaggggggtttgggctgggacaaaggcacttctcataacagctagaagactgggaaacaaggcgcatgggtgaaagctacagagggcctagatggagaataaggagcgagaaaggaactgctgagcttttggctgtggggtaaagggtcaggagagctgaggaagccctggcctgaggtagcctcatcctgatcttcctgcagggagttcctggtcggctccgacgccttctgctgcaacttggctagtgccctactttcagacactgtccagcaccttcaggcctcggtgggagagcagggggaggggagcaccatcttgcaacacatcagcacccttgaggtggggcaggaggggaggggacaaggctgggtggggctgaggttgaactgggttgagcattgggccctggaagaaaattggttggatgctggaagcaaattggtgttcctgtggttaactgctagctagcaggcaaattagattttaaaagcatgcaaatgcacaaaaacttctggagtctacagttgtgcttccttatagtatatgtgtgaatgcaggcctggggattggagggattgaaggacatgggtaagagcaaagctcactgtttaccaccctcatttctgtagagcatatatcagagggaccccctgaagctggtggccactttcagacaaatacttcaaggagagaaaaaagctgttatggaacaggtattgtgatattccacctcccaccccaactcaatcccctgagactttggcctgagccatgacaaactagaaagaatttgaacctcagtaaaggctcagtgttctaggcccaggaatgaccaaaggaggttcctagggtcagagtgaaccccaagtcaagctcagggaatctttctatgagggactgaaggtaagaggccggggagaacagagcaagggataaggagctgattctgctaggagcaaggtcttatctccacgatattccaaaaggtcaggaagaactgccaaaggggagaggggaacaagaaaacgctatctgcagagcagagagtggaggccaggtatagagggatgagcagagtgtttcacttcttggcatctgtccttcctgtgtagttccgccacttgccaatgcctttccactggaagcaggaagaactcaagtttaagacaggcttgcggaggctgcagcaccgagtaggggagatccaccttctccgagaagccctgcagaagggggctgaggctggccaaggtgggggccagggtggttctggggagtgtgtaggagtggttgcctcttggatctcaaccttatctgaacctctaatctgtctgcacccttgatttctgcccccaaccctcagtgtctctgcacagcttgatagaaactcctgctaatgggactgggccaagtgaggtgagtaatgggctgacaggtggagaccttggtcaaagtgcagctggagggatggaagctagacctcagaaagacacaggctgaagtagggcaagggaatgccagaggagtgagaaaaagagccgtatcccaggagctgggtgtggaggcagcgtgaggccctggctcaggcccctctctgcccataggccctggccatgctactgcaggagaccactggagagctagaggcagccaaagccctagtgctgaagaggatccagatttggaaacggcagcagcagctggcagggaatggcgcaccgtttgaggagagcctggccccactccaggagaggttgggctagggctgatggggaagagggggcaagctgggggtgggcagctgaccctgctgaaggccctacaggtgagagaaagaagccaggcgggagggccttggagtggaccaagatgcataaaagccagttccagcggggctgtgcacactgtcgttcaggtcgcatcctgtacaagtgggcctagtggaggggcacaagcggggactcatccaacccaggcttctctcctcaagccccatgcctagaggaataggagggcttttccatttggtttattgggtgggaacactttccaatttgccacaaagcactgtaagtggtggcagttgtcctgggtgcaagagccgtcgggggagaggcagctgggtttccacagggggtgtaggcactgagaatgaacctcccacccagaccctaggccaacagatcacagaacccccttcagcccaggtgccttgcagccacacccactacccaccccacttctccacacatgatagcctttctccctgggtataggggaagggggtctgggccggagcaagcagccttaatcctgtgccccctgaccactgtcctggccccaggtgtgaaagcctggtggacatttattcccagctacagcaggaggtaggggcggctggtggggagcttgagcccaagacccgggcatcgctgactggccggctggatgaagtcctgagaaccctcgtcaccaggtattccccgggagctcccagtctggcctagaacagacctcgggaagaaaagaagggggctagagctgtggggagggcaccagcagggacctagcccccaactccccttgtgtcctcctcactcccagttgcttcctggtggagaagcagcccccccaggtactgaagactcagaccaagttccaggctggagttcgattcctgttgggcttgaggttcctgggggccccagccaagcctccgctggtcagggccgacatggtgacagagaagcaggcgcgggagctgagtgtgcctcagggtcctggggctggagcgtaagctgggattggacctggggttggagaagggctgttagggtgatggaggcagcctggagggctggcactgaaaagagcaagggatggggagggagggccatgggatgtggagaccctgaatggtcaaggcagaggaaagggagggacccatttagggctggaatggggtgggggcatcatgatttggccaagatggggactcctcccttaagaacccaaacagagacatggagatttagggctggtgacagtgggtagtctacactcacccatgcactcgccacacctgacgacagtgagatgagctcgttcacactctgacctcccctggcagagaaagcactggagaaatcatcaacaacactgtgcccttggagaacagcattcctgggaactgctgctctgccctgttcaagaacctggtgaggggctttggggtgcagtgaggggggcaccactaggagactgtgggactctccttggagaggatgtcaggaagcccaggaggagcggtctctgtcctcatgacctcgcccttgctctccctcaccccacccacagcttctcaagaagatcaagcggtgtgagcggaagggcactgagtctgtcacagaggagaagtgcgctgtgctcttctctgccagcttcacacttggccccggcaaactccccatccagctccaggtgaaccgtggcccagccctgccccaatctgggaccccgagtcctcctccaatgccacacacaagggccctggaccctcacctcttgtgactgccccataccccatgtgtctgggattcatgcacactggggcccgggtgagtgggggtgagcaagagcatggagtgcacagggcagggaatggtagtggatagcagcaaacacttcggaagcacttcctatagaccagggcactctattaaatgatacatacgcacatgcgtgccagcacacacacgtctggttttcacaataacattatgaggtaggcagtattatcagcctcattttatagataaggacattgagacagagagtttaagtagtttgtcccagtcacacagctaagtgttggagctggtatttgaaacctggaggtctggttccatagcgatgactaataaccacttctctacggtgaggccctgattgagcttcagaacgcatttaataacatggcatgagctttttgattatgatgtgtgagtccaataacttctctgagtgctcagagccagtcccctgaggaaacttcttgcttcactaagaaacccctgtccggctgggcatggtggctcaagcctgtaatcccagcactttgggaggccgaggtgggtagatcacaaggtcaggagttcaagaccagcctggccaatatggtgaaaccccgtctccactaaaaatacaaaaattagctgggcgtggtggtgcaggcctgtagtcccagctgctcgggaggctaagcaggagaatcgcttgaacccaggaggcggaggttgcagtgagccaagattgcgccactgcccttcagcctgggcgacagagcaagactatgtctcaaaaacaaaacaaaacaactcagcactttgggaggccaaggtaggaggatcgcttgagcctgcaagtttaagaccagcctgggctacatagggagatccaatctctacaaaaaataaaaaattggccgggcatggtggctcacgcctgtaatcccagcactttgggaggccaaggcgggcggatcatgaggtcaggaaatcgagaccatcctggctaacacggtgaaacctcgtatctactaaaaatacaaaaaattagccaggcatggtggcgggcgcctgagtcccagctactcgggaggctgaagcaggagaatggcgtgaacctgggagggagagcttgcagtgagccaagatcgcgccactgcactccagcctgagtgacagagcgagactctgtctcaaaaataaataaataaataattagctggattaggtggtacatttctgtagttccagctattcaggaggctgaggtggaaggatcacttgagccctgaaggctgaggctgcagtgagctgagattgcactactgcactccagcctgggcaacagagtgagatactatctaaaaaaaaaaaaaaaaaaaaaaaaaaaaaaaaaaaaaaaaaaaaaaaaaggaaagaaagaaagaaaagaaacccctgtcctcaccctcttcaggccctgtctctgcccctggtggtcatcgtccatggcaaccaagacaacaatgccaaagccactatcctgtgggacaatgccttctctgagatggtgaggaaagtcctggagttggagggaacaggggcagggtgggttctaacatgggcagtggtgcaggcctgctgatggggtggtgggcatgtttaaatgggtgtgaccttaacactttctcatgggcctgctttcgtgcttctgacctcttttcaccccagtcttaacaactatcaggccacagcactgtaacctagaaaaaacagcatgtttgtgagcgatatcaggggctgtggaggggtaggccacaggcaggtgggagggatgaaggccggcccgaggaataacaagacggtagcctgcagtgctctcttcttcccccttctccccaggaccgcgtgccctttgtggtggctgagcgggtgccctgggagaagatgtgtgaaactctgaacctgaagttcatggctgaggtggggaccaaccgggggctgctcccagagcacttcctcttcctggcccagaagatcttcaatgacaacagcctcagtatggaggccttccagcaccgttctgtgtcctggtcgcagttcaacaaggtcattctcctgccctttggacctcccacccccaagctcttcatccctggggcactcagggcctgctcagcctccatgcagggaccttccactggattctccacagtgccccctcaggtcctttaggaaggcctgtcatggaccagggaggaaaaaccccaggcctgggggttggctctggagatgcgttctctgacatccctgaggttttggtctgggggccatctgtccttcctctttaccagtgacttgcatgactcacccaggttgtgtgtaaacagagctctgattcaaagtgactttgacctgttggaaaaatagttcctggccgggcacagcggctcatgcctgtaatcccagtctttgacatgccggggtgggtggatcacctgaggtcaggagtttgagaccagcctggccaacatggtgaaactccatctctactaaaaatacaaaaattagccagttgcggtggcacatgcctgtaatcccagctacatgggaggctgacgcaggagaattgcttgaacccaggaggtggaggttgcagtgagctgagatcataccactgcactcaagcctgggtgacagagcaagactctgtctcaaaaaaaaaaaaaaaaaaaggccaggcatggtggttcatgcctgtaatcccagcactttgggaggccgagacggatagatcacctgaggtcaggagttcgagaccagcctggccaacatggcaaaaccccgtctctactaaaaacaaaaaaatagccaggagtggtcgtttgcgtctgtaatcccagctactcggctgaggcaggaggtgaacccaggaggtagaggctgcagggaagatgaaaccattgcactccagcctgggcaagactctgtatcaaaaaaaaaaaaaaaaaaggctaggtgtggtggctcacacctgtaatcccagcactttgggaggctgaggcgggcggatcacaaggtcaagagatcgagaccatcctgaccaacatggtgaaaccccgtctctactaaaaatacaaaaattacctgggcatggtggcgcatgcctgtagtcccaactactcgggaggctgaggcaggagaatcacttgaacctgggaggcagaggttgcagcgagccaagattgtgccactgcactccagcctgccaacagaatgagattctgtctaaaaaaaaaaagaaagaaagaaagaaagaaaaagaattcctgttgcaaaaactgaacaaaatcccacagggacatgtgcagtaataccagctaccacgtgttgacagcttatatgccaggcgctgtgcttaacaccttatgtatgttatctcacttaatcctcccaacatctctttgaggtagatactattattatccccattttacagatgaggaatctgatgctcagagggttatgtagtttgttcaagttcccaaagcaggtgagtgccatggctaggagagaaccacatatttctgactcttgctcttttattttatgttatattatgttattttatgttttggtttttttttcttttctttctttctttctttctttctttctttctttctttctttctttctctttctttctttctttctttctttctttctttctttctttctttctttctttctttctttctctttctctttctctctttttctttcttttgtgtgagacagaatctttaaagagaagaaagaaatgctcatgtgaccagagggtgtgttagctaaagggagcaagacagtcacacccagcaggttaccttcctttgggcgtcacctctgccacacctccttagggagagggtgtagcatagtagttaagaggggctccagggccagaatgcctgggtttaaatcctagctctgcctcttaccagctatgtagacctgggcaagtcattcgacgtttttggacttccatttcttcatctgtaagatggaattattataatccctacttccatagcctggtaaagagcaaataaatatatggaaaggcttgaaatagtggctggcacgtgtaagcattaggattggtcgttgtcattgatggagtctcaggttcggtctgatcctcagccctgtgattctgtcgtgagggcactcacagctcactgcctgccctaaacaggctccagctctggccctccctcggctcacacctttccccctctccccctaggagatcctgctgggccgtggcttcaccttttggcagtggtttgatggtgtcctggacctcaccaaacgctgtctccggagctactggtctgaccggtgagtccccaccctgggtagtctgagcagccatacaccagtcacctccatactcactgcccatgccccatcctctccttcatcccggccaggctgatcattggcttcatcagcaaacagtacgttactagccttcttctcaatgagcccgacggaacctttctcctccgcttcagcgactcagagattgggggcatcaccattgcccatgtcatccggggccaggatggtgaggccaccccagccagtcctctgtctctgtgcctgtgccctctggggtttcttctgggaatgaaatgtcctgaccttcctgatgccgatcctgatcttcaggaagttcttccagcttctcttcttccttctgtggtctaaatgttcaccttctcactgtgagctctgtgggaacggagactagtgggtctctctccctcaggagccccaccctaggtcctctctcccttgccttggtggagtgagaacaggtcttatggtaggggttggggaaggggaagaaagtccggacagagggatctcagggtctccttcctaccataggctctccacagatagagaacatccagccattctctgccaaagacctgtccattcgctcactgggggaccgaatccgggatcttgctcagctcaaaaatctctatcccaagaagcccaaggatgaggctttccggagccactacaagcgtgagctggaactggcagctctgattccttcctgtcacccacttcctccctgctccccgctgccctcctctccctgcccgcgtgtcatcctgatgtcactccctatttcatagctgtgcttctcttacttccccatgatccatgcccaccttttccacctcccttcctccctaaccccagagcactccatggctgtcttttccttctcacaacagctgaacagatgggtaaggatggcaggggttatgtcccagctaccatcaagatgaccgtggaaaggtgagtgtggtggtatggacagtgggtaggtcaggggcttagtgcttatctgcaggaaggaggggtggcatcaacccttggtcagtcacatgtacctccttccctcctccagggaccaaccacttcctaccccagagctccagatgcctaccatggtgccttcttatgaccttggaatggcccctgattcctccatgagcatgcagcttggcccagatatggtgtaaggagctggaaagacaggaatgggagtggtctgtgcagatgggctaatcttagcatgggcagctgggagagctggcactgggggctgaacagggaatcttcctttccatgagagggacacctgttcaaaagcagggtgtggtggtgtccaggagaagggctggcatcagggggtctgttttctttccccaggccccaggtgtacccaccacactctcactccatccccccgtatcaaggcctctccccagaagaatcagtcaacgtgttgtcagccttccaggagtaagtgaaaaacctcatggggataccatcccactctaagggggtgggcatttgaattgttagaagaggctcttctgtgagaaaggagcagcaaatgctaacagcctgtcttcttctcttctgtccactctaatgagggggtagtagttaagatctggactgcctaggtttgaattctagctccaccacttactggtttggggcaaattacttagcctttggtgccttatctgcacaatgggggataataatgctaataataataacctacctcactgcattattgtggagattaaatgagttcataacacttaaaaagctgagcatagtgcatggctcatagcaaaagctgtgtaagtccagtcgtggatcacttaatgaaggagcattttctgtctttggcagtttcataattatgcgaataccattgagtataattacacaaacctagatggtatagactactatacactgaggctatattgtgtagcctattgatcctagctttaaacccgagcagcatgatactgttctgaatagtataaggaaatagtaacataatggtaaatatttgtgtgataggaattttcagcttgattataattttttttttttgagacagggtctcactcactggagtgcagtggtgcgatcttagctccctgcaacctccgcctcttgggctcgagcaatcctcctgctgtagtgcaccacgacactcggctaattcttttttaagatttttctgcagacaaggtctcacttactgcccaagctggtctcaaactcctgggcttaagtgatcctcccacctcggcctcccaaagcgttaggattacaggcgtgagtcactctgcctggccttgattataatcttatgggaccactgtggtctgtagttgacagaaatgtcgttaatgtggtgcatgactgttattattattttctgtcctgcccctgagagccactgtcacttctctgctgtattggtttttgtttactcatctgttttggccttgaaatggcctagacatttttcttcccgaagtatgacactcgggtgcttattaacttagtcaagacacaacatctcccttcccagaaggtgaggcgggagtgaggacttggggacttaagaactaccaaagttcagagtccaaagaaacattagaaattggctaatccacccccataacacgcacattttacagatgagaagactgagctcagagcatagaaatagcttgcccaggccatgactaagtcaggataaggagctggagcttgtttcctcactcagtggtcctgactttgcaccactctgcatttgcctagcctgccttcctctaactgtgctctccctacttccaggcctcacctgcagatgccccccagcctgggccagatgagcctgccctttgaccagcctcacccccagtgagtgacaaagcccctcctgaccccatgtgcctcttctttcctggccttgccccgctctccttatttccattgctggttcctggcaggggcctgctgccgtgccagcctcaggagcatgctgtgtccagccctgaccccctgctctgctcagatgtgaccatggtggaagacagctgcctgagccagccagtgacagcgtttcctcagggcacttggtgagtggcagcttgggagtggaggctgggtggcatctaggggagtgggcgccatgcctactccactgcttctcccatctccttgcaggattggtgaagacatattccctcctctgctgcctcccactgaacaggacctcactaagcttctcctggaggggcaaggggagtcggggggagggtccttgggggcacagcccctcctgcagccctcccactatgggcaatctgggatctcaatgtcccacatggacctaagggccaaccccagttggtgatcccagctggagggagaacccaaagagacagctcttctactacccccacagacctgctctggacacttgctcatgccctgccaagcagcagatggggagggtgccctcctatccccacctactcctgggtcaggaggaaaagactaacaggagaatgcacagtgggtggagccaatccactccttcctttctatcattcccctgcccacctccttccagcactgactggaagggaagttcaggctctgagacacgccccaacatgcctgcacctgcagcgcgcacacgcacgcacacacacatacagagctctctgagggtgatggggctgagcaggaggggggctgggtaagagcacaggttagggcatggaaggcttctccgcccattctgacccagggcctaggacggataggcaggaacatacagacacatttacactagaggccagggatagaggatattgggtctcagccctaggggaatgggaagcagctcaagggaccctgggtgggagcataggaggggtctggacatgtggttactagtacaggttttgccctgattaaaaaatctcccaaagccccaaattcctgttagccaggtggaggcttctgatacgtgtatgagactatgcaaaagtacaagggctgagattcttcgtgtatagctgtgtgaacgtgtatgtacctaggatatgttaaatatatagctggcaccttagttgcatgaccacatagaacatgtgtctatctgcttttgcctacgtgacaacacaaatttgggagggtgagacactgcacagaagacagcagcaagtgtgctggcctctctgacatatgctaacccccaaatactctgaatttggagtctgactgtgcccaagtgggtccaagtggctgtgacatctacgtatggctccacacctccaatgctgcctgggagccagggtgagagtctgggtccaggcctggccatgtggccctccagtgtatgagagggccctgcctgctgcatcttttctgttgccccatccaccgccagcttcccttcactcccctatcccattctccctctcaaggcaggggtcatagatcctaagccataaaataaattttattccaaaataacaaaataaataatctactgtacacaatctgaaaagaaagacgctctaactgctcagataggtgctgcggtccagcccccagctggaggagaccctgagtccaacccaggcctcccgagggggccagtgaagggatcccacacccaccgcccctatgtagggcagggaagaaattgcaaaggacttgggggatagatgggaatgggagggcaaactgcagcacttgttaaattaattaaagaaacaaaccagaagcacaaaaacggggaaggagaggggagaaggagcaggtccagtgttcccaggcccccaattctgggggcaaatgttgccacttttagctggaccttcccagggaagtccccctttcccccttgtccaaactgagtccaactgctcacaccactggtgcaaacctaaagagaatgggagtgtgttgtgtgagggaggggaaaaccccagatgccctggaggcagagtccttgccccctcgctctgggcaggggtgagggcaccacgcaccctccttgtgtcctctctccaggcctctgcttgttattgcttgaagccccacagtcttatgcccatggagcaggtggggaggcaggagaagggcagaggaaggatccagggttgtgactagattccggggatggagagcgtgggggtctgtgtgagccagaagtctgaggtcctgggtctgaagacaccagtccaaccctcactgccggctggcctcagcctccactttcacgctgctcctgcgaccctccaccagcgcgggatggggtcctggggcaggacatctgtccagcagcccttcctcgaactctgcagggaaaagggggcagttaggagactgcagggtgactggctgcagacagaggtggttgggaacagaagcaggggcaaagaaagctgtgaagatgggctcagtttaggtttattgaattactgcctcctgcccactgcatgtgtatggggggttccattcccatgtgtgtgagccccctcccctccctggctgtgcgtagctctgtctctgtctgtctctctctctttctctcccgcctcctcggttgcgctggaatttctggttctgtcaggagctgcgg

SEQ ID NO: 23732 - DNA, 178952 bp, Homo Sapiens
gagacctcaaattgtatggatgctgagggaaagagcagtgctagaggcagggtccagcttgtataggccttgtcagtttcagcttgcaatttatccaaaaagcaaagagaagtagccatataagggctttgtgcaaataatttgatttcggattttagccctgaaatgctcattctgactgcactgtagagaatggactggaaaggggtacatacacgggtagattcaagggctgtttaagaggtaggatagcaaatatttgctcaaggatcggatttgatgattgagggagagaaacaaggaagcctgaagaatgatgcccatgtgtctggtgtaccacctgcgtgcaaagtgatggtattcattgaggtagggaactcctgagatgcaccaggttttccaggaaagtgatacatctcatgttagacatgatgagcgtgtgttgtcactgggatgtgacaaatgaggatagccagtaggcacttagatacgggaatctgcaattctggaaaagatcttggctaaagacccagatttgggaggtgtcaggatatagatggaatttgaaaactatgggagttcctcagacaatcaaggaatattgcgctgcactggaggaaaccacagagtgttcaatgtcaaggaggcctaggaaaaataccttcaaagacagagttcaatgcttccaaaaggtcaggtaaataagaactgaatcctgtcttttggcctgagcacaggccttggagaccgtgacctccactttcagtagaatgatgaggcggaagccagatggcagatacttagtgatgaaggggaggagaggaggagtaacagcaggagtggggacataggttgggggaggtttttaaaaaaatactgaagagacctgaaattgcatgaatgctgagaagacccactattagcaagcaggagcttgaagctgcaagaggaagagtacgtaagagtcacagcaaagccccggagaacaaggcaacgcagaagcctggtttggagatgcagagggaggagggacctttccaacttcagtaacaagaagaaagaggaaaagatagataaggttgcaggcaggttcatagattggtagcagaaaattgagagaatttctaaccaatggcatctttttttttcttctttataacattgggagattgagtggcagggtcagaaatttgaagacagtaaagaaggttagaaatagccatgtttgactgggtgcggtggctcacgcctgtaatcccaacactttgggaagccaaggagggtggatcacctgaggtcagaagttcgagaccagcctggccaacatggtaaagccccatctctactaaaaatacaaaaattaggcgggcatggtggcatgcacctgtagttccagctacttgggaggctgaggcagaagaaccacttgaacccgggaggtggaggttgcactccagcctttgcaacagagcaagacttcatctgaaagatagaaagatgaaagaaagaaagaaagaaagaaagaaagaaagaaagaaagaaagaaagagtaaaagaaaaaaattaaaattttagggggaaaattttctaatttttgaacatgcactaaaatgattttcagagaaaaccaagtgttattttctaatctgcatggcattattaaagatgtttactcatcttccttggggctaggcatcccattcctgcaggaagtcttgtggttaggcggtggctgtggctctgggatgattcaggaatgcagaccatgccttatttgcacaggagggacacgttgctctcactgcatgcatggtcacaactgtctgtgtgacctgtctgtgggagggcagacccccctcctgccaagccacagtagcagctgacctgccaggcaaaagcattcctttgtaaaggaaaccctcccagaccctctgaccaaaggggacgggtggggacttcctggcactgcagggccccttgcctggtactcccagcaactggttgcggtggggagggcagatctaggggtggggatggggaggagaagtgggaatgggaaattgggagtcagaggggcaagtgggagagaagggcgcacctgccgggataacaggccagatgaagtaaatagaaaatcctctgagctcccctactggctccagctgtggagaagggggaggagaaaaccctgtgggacaggggaggagggtgagggctcctcttaggaagttatttaagagccaactgtcttgtctttcccgagtccgtttgaggaagtccccgaggcgcacagagcaagcccacgcgagggcacctctggaggggagcgcctgcaggtaagccaccgcccctgcaccctatgagccagggcccgctgcgtccaccttctgcacctcggtttcctggttgaaccagcaagcggcttgctctgggccctgtggcgccggtcacaggcagctccacttgcccaatcctggcttcccgcccccaactccgcacctgcccagcccagcttctaagcgggacttctctcaggctctcgaggcagctctcccgaagccgttgcttgcttagaatgccaccaaatggggatgggggagttggaggtgcttccccaagggacgagccccctttcctcagggagcagattatggagctggaacacaaaaggtggagggagtggggccaagtgagaacagcctgctagactggaaccccgccggcttggctccccactcctgcgcgcctccccactcctgcgcatcgcctgcctccgtcccaatttggagctgaactcgagccacttctcctccttagacccgcccagaagcgagggctcctgcccgccgcactcacccagccaggcgtgcacctggggctccccccttctcccccttagcactgtgtctcccgacagcgcgccacactgttctgcacccctggcaatgccgcagcctaccttcggtatttctcactagaggatggctctcgcagccttctccctatcattaaccctttttcgctcttctccctcccttcccccgtcagctcaccaatgactgtaaatatatttatctatacttatggatacccattcacaccttatgcatccaaacactcctgtctccttctcagaccagacaccttaggcgtggttgaccttaggcgtggttgtcttttctccagcatgttgttagtgctccacatgtctctggaaccatctctctactctggtggcctctataatggggactcttcacctcttgggggtgtgcctggtttttgaaaatagccaagtctccaggagtcatgactgggtaatccaggggatcaagggggaaccttcactgggcccagaaacaaagtcccccttcatttggtcatttggtcaacaagtacttactgggcactgaccgtcaggtgtgtgttgtttaaactggctcagtgcctgcacaagctccaagggaaggggaagcaggcttggggaatgggaaatgttggcaaccctgacttcttaagcctattgatagccctattgaaaattgcatgcccaacctctccacctccttatcctcctccatgtggctcaatttccaaagcagttcctacctcctcacccctaagtggatttacttatggctcttcttgggctccaccctaaccctatcagactataatctatcagagcaaacattctgttttgttctctgatgtatcccatgtacctagatcacagcctggcatgtcataggccctcaataaatattggttgaattaaattgcaaatgtaaacgctttagaagacaacatttgtctggacatggttgtgtgcgtttattcttaaaagtgacttataatctcataaatctgtatgaaatgaacatagatacagcacatgcatataacaggaaacatttcttgcgaagatgctgctgtaggattatggagggtgggggaatctgggtctccaaaaatcttttaatttttaaatttctttgaataagccccttttcttctgctttccatatgttttgacacatacaaaaatctccccaagatccttggggaactgtattccatcattagactaatccttgctgccacttctcagtttttatttatgcaaacggcaaaatgtgttgctcaagtgctatcacacacagatatatctgtttctctattttggaatccttgtctcaaatgttactcactttacatgccttttctgttgtcttcttttttttttttttctgaaggaccttgtaaagtcaaaaatgtcagaaacttccaggaccgcctttggaggcagaagagcagttccacccaataactctaatgcagcggaagatgacctgcccacagtggagcttcagggcgtggtgccccggggcgtcaacctgcaaggtatgagcataccccccttccccaccactctgggtccaggcacagccgggccctggcccctcttccctgcaggtaaacatcctctgtctccactggggttcccacaaaaggaagccccctgccaatctctggttttataaaggaagaaagcaaaagctttcttttaagtggtgaaagcaccgaagacccagagccttgtcccagttctgccccttactgaccttgtaacctcagagaagttgctttgtctttctgcctctcaactatttcctctacaaaaccagagtgctggattagctagggcctcttccagccctactgctcaatgctttagagaattttctctagctggaatattccacttccaaaatattgtggctgttttgattgtctggcttgcacctccttccttctccctcctccctcctccatccattgctgtgaatttcagagccggggagaagtgccagactctgacagtaatagagatagaagccctctatttctctccagagcagcctggtgagctggcaaggcaagctgcttccccagcctcttgcctctgcctgatccctagaaacctgttccgggtacagcagccggcagctgacctcctctcagccctgtcagtggtgacaaggtccaggtgccagcactggtttggtgatacagacatcattcccctgggccatggcagggacattcagactcatgtccccgagtggcattgagcagggagtcttttttgtcaataacattcatgcaccaaaatctaattttactcctaagggtgttctgtgctgggtttcactggggataaacacctatttgctgggataggtgagcatggtcatgctggagctgtgtggtcgattcccctcattagaaggagaccaatgcctgaaagcccagattgatgcagctctccatatagcaaagggaaaggggaagtgcagtttatccagcaagccagacacttgcccaggtgttgtggactggtgtcattgtgttactgtcacactagatgatttgatatcaaatagtgaaatcagggaggtatccagtaccatccaagtttgggaaaagaagttcacagaacagaagggcatcttcagtcaggtggtagagtttgaggggctaagacgaacttgtagttctgaaatctgtctcccagctggatgccactctctaaaaccccaccttgacagccacagaactgagtttaagaggacttgctaatcaatgaatcctcatccccatgttatatgttaggaaatagaggctgaaggtaagcagttgatattcactgcttacccagtctacgagtctttttctttaagaatgcaaataaaatgcaaaagcctacagatatcaaattattaagcaggttgcctttgtgtattccatcttctagcaaaattcccctgtggcccaaaagactctgggcccccggaaagggggtgtaggcactggaagaagtgggcagtaagaacaggaggagtaatgacacaaccgtccttgccacgaggagtcaggacacagccacccttgccaggattgggaaaaacgggaacctctacaaaggcagtgcagggaagcagggaagcagagagcagaggcagaagacctggcttcctgttccacatctgccacttcttgctcactctggggaaagtcatattggtgcccaagcctcagtttctccatcagcaaaatggaagcaatgcctacttcacagattgtcgtgagcatctagtgagcagtgtctgtgatcaagtctgacccacagcacgtgaccaataagtgttcattgactgggaatgtgcaacttatcatatcccagcaaggtcaggaaagcactccagggaatacttgttcctatgaggaatatgtacgacctgtagcccccataaatctgacatctgaacaaaatgctgctagtaagacattaaaactgtcagagaacatgtgcaggtaggccaattaagaaaaataaaatctgggattactgcttttgttgatttctggaggcacaggtggggagcagcataactgaattactctgaaaaaatcagtcattatttacttggcagacatatgtgtccacaacccaagtgacattctgggatatccattagaggcactggcataggaatatgaatgtccagtgactgtagaatgaatgaacgaacagtcaatcacttgtgaattgaatgactcatagctctagtggcattataatttattattaataacaagctacagatttcatacatatgcattcatttaatatttttcacagacaagataagtgttacatgctctggggatacggtttctgaagcccagaatcatgacagcaagtcccagatgagaaggacaggaaaaaaactatatatatatatatatatatatatatatatatatatatatatatatatatatatatatatatatgcacacacacatagcagcacacaaaccatctgaacaaggaggtctatctcctggttaccttttgcatttcagatttatatttaattgttctaaaagcaggttttctggcactatatatcaagttttctccaagtcactaagggacgaaatttgctaagcgactaaaccttggaaagaacactcatttttaaaatgccatcttcatgcagttcacccagtggccactagtggcctctaagaggccttgtatccgcggttaccaatctgcggatgatgactttggctccaggaacaccagccccaagttaaactcttgtctccatttttttcagtggccactcttccagttagcaagctgctcttgtaatactgactgagaaatgcagagaggcaagaagaggaaaaggggggaaatggcgggtttttcatttctaatagttctgtagcagtgagtcctgcccatcactgtgtgtgatatatacagtgttctaaggtatactgagtgtatataacgcccttaagtcatggctttggtaacatttggttaagaattattttggtaaaatctgtattttaaaatgtataaactcatgtaagtttcctctcatacacaccatgatattcaagaaaaaaaaaatgaaatatttgaggtaggcacggaaatcccagaggtgggaccagccattcagtggtagcgtttgacatctttgcatgattttaggcatctttaatgtcaccctttgaattcagttgtagccaggaaaggtactgagacgatctcctcagatttggatttgtatcaatttctaatagactgttctgcaggcttagttggtgtttctgaaaaatctctccactgccttcctggtctgaaaggttatgtgtagctggaaatgtaatattccagaagaaaccttatgttgttggtctgctttggctctatattgttaacaataggcgaccatttgtagcagtaattggaatcatttaacagttctattgtattgaattaaaactggaaagcaagcctggccctatttaaaaactgggttctagtagtttttcaggctaatggggtcttatacctttctaagaatctcctccatcccaccactccttgtcagaattaaatcaaccaattaatgataaacctcctctttgtgcagagtaaacctctctggattgaaggttactgagagactaagaggcattcagtgtatgactgagaaatgctattgtccagcagcagttcctcctttcattcagttcctggaaaaatatacactggttttcacatatgtgtcaggagctgctccaggctgtcccttgggacatgaagttgagtaagttagtccctggcctcaagaaactctcagtgtagaagacaaaataaataaaagatcattgcaattcagtgtaataaagactgtgactgtgatttatgcaaattgcagtgaaataacagaaatcaatgtctagcggtgtggtggagtggggaagaggatgaggagggcttcctgatgcaaggatattggagccgagacttagaggatgagtatgagtgttcctgacaggcaagcgcatggaaaagtgtttgcagtagagggaacagtatattgcaagtgaggagggactaaaagatgaaagagaagatataagcctgggaaaagatggcaggcatcacaccataccaggccttggggatcttgctttcctcctgcagataatgggggacttgagaaggattctaattagcagaaatacataatcagaattatgctttacaaagtggtagggagggctgggcacggtggctcatgcttgtaaccccagcactttgggaggccgaggtgggcagatcaccagatcaggagttcgagaccagcctggccaacatggtgaaaccctgtctctactaaaaatacaaaaattagcctggtgtggtggtgggcgcctgtaatcccagctactcgggaggctgaggcaggagaatcgcttgaacctgggaggtggaggttgcagtgagccgagattgtgccattgcactccagcctgggcgacaagaccaagactctgtttcaaaaaaaaaaaagagtaaggagaaaatggagaacaggagatatgtttggaagctgtagagatactccaggctagaagaggaatagaccagaggggttttagcccctggaggtatggggctcatttctcttgttccagcttcctctgagcacctgagcaatccttcaacattataggttccaggatgtattaataacaacactttataaattaagccacttaagaaaatgcttttaatcattctaattaaggacatgttaaaattctgggtacccaaaagaaatgtgagaaagagttatttttcctgtttttttttaaataaataaaccagtttctcatggatagcatttatgcttatagttcaataacaatattaccaaaaattgcatggagaattcagttcactagggaattcctagtatataaacctaaacatttaacttatttcaagatcccatctgtgacaggtataatcattctctgaagaatattttacaacctagggagacaataatttacattttgttcatattagagaaaaagcaggaggacagggaggcagttgctcctccggagatttttttcttttctttaacagtccattttccgatatgtttggaattaggctaaattgtgttaggtagacagtttgaaagctgtcactttgaaagagcgagctgccaagtttctagctaccgtatttaaaaaaaaaaaaaaaaaaaaggcggcttagcaatgagctgttccattttgccaggaactaggcttggacaggggaagcaaattcatttcctgtttgtggcaaacggagtctggatgatgataagactttttccatctaaactgccttgttaacccagtaaacaaagcaaaaatcaatatgctagattcatcaatgcttgctggaacacactccatggcaagggacatttcctaggcaaaatggacaatggaatgaacaatgatatttttatgtctatgttcatattttatacagtcatcttcagagtctttgatactatcagctgttataagaaccaaatacttggttgacctgtgtgtggctgactcatgggcaatgaaataaattttgttgaatcagtggtattggggacctcacctctatccccaatactttggacaacccattaagcttgctcatgtcttttccatttgactacagtctggaacattatttctttaaactctcaacctctctgtgtagcttttaatcttccccttcttagccaagttttattttattttttatgaaatgtctttctttgtttaaatcattttaagacagactttttttgtttttgttttgagacggagtcttgctctgtcacccaggctggagtgcagtggcgcgatctcggctcactgcaagctccacctcccgggttcaagcggttctcctgcctcagcctcccgagtagctgggactacaggcacgtgccaccacgaccagctaacttttctttttttttttttttagtagagactgggtttcaccatattggccaagatggtctccatctcttgacctcgtgatccgcccccctcagccttccaaagtactggaattacaggcatgagccaccgcgcccggcccccaagacgcacttttaagagattatacaggaaagttttacttatcactgccttagtttttccccacttatagtaccactgtgattttatgtttttcctgaggcattggcttgttgaagtgatattgcaacagagaatcaaaagatcacttagaaaaagtaacatgttagaaaacatcatgcttagaattaaatgtctaaagtataccagtatagatgatataatttaaaacaattgatactatcagctgtcataagaaccaaatacttggttgacctgtgggtggctgactcatgggcaatgaaataaattttgttttatacgtataactttatatatatgtaactttatatatatataaaaagtttgcttatatataatatatatacacatatcatatataaatatattgtttataatatgtaaacaatatatacataaataatatataaaaactatatattatatatgtaaacaatatatttttaaaaaccaaactcatgggtttatagttttttcatagtgaaaacaaacaaatatataaacaaatatatagtttgcttatatctattatatataaacaatatataatatataaagatataaataatatataatatataaatatatatttgtaatatataatatataaataatatatatttgtaatatattatttgtttatatccattatataatataaacatatgtaatatatataatttatatgaacaatatataatatataaacaatatatgtttttatatattatatataaacatatatattcatgatatatatgtatgtttgtttacactatggaaaaactataaacccatgagctggggttttgtctttttttttttgacttaggttttctattctcaaaggcattaatcagcaccctttttctcaccctttgttatcaacatataagcaggctagaaagacagtattttattccaatgtgaaacaaaactgctgatctggaggtcttatgttataaattcccacatcataccttcaactatatatatgtcctgaaactagcatattttgagaataaaatggtaaatgacatttaaaggacacctatggttaatcctacagtaaatgagataatttattttgaaatgaatgatcaactctacgctccaaattttcacgtaaaaggtgttcaggtgaaaggaggcatatttgctgtggcatttctgcacactgccccaggcactatagcaagataattaagacatggtccagtcttcaaggggattacaatcccatggctaaaaaatcacctatataaagataatacaaagagacaatgatacttttttttaaaaaaaaaaagacagatgtttcctgcgaatcaagaggagaaatgctttctatttacctgtggaaattcaaagcaagcctgtctgctcagaagataaggagtataaaatggcatgcttccctgggaaggctggaaggccactgctaaaaagcttcccagggaccttctttaccttgtgacttccattgctcagattccagcctcacaccatgccttctcagatacctgactacttaatgattggtcctaagggccaatccaaatgctcagtgctattatgattattattgccatcaatttctgagcatttaccatgtaccaggccctaggatagagcactcggtgcattttctcatttaatcctcacaccaacttcattttgcagatgagaaaactgaggcacaggacatttatgtaacttgccaaggtcacaaagacagtacgtgagagttgggatttgggttcaggcagcctagctccacagtctatgctcttactatgctcttctacttctcttaataataataacaacaacaataataataaacatttattaagaatgtacttggtgtcagccactctataagataggtacttcattcccatattaaagataagaaaactgaggctcagatagattaaataacttttctgaggctgcacaataagtaagtagtgaagcatttccaaaaacatattctgaaaaatgcagatctccaaagaaaaaagtttccatagtcatttacatttggaaaccattgcccctctgagatatctgtggtatacatcagcatattaaagtctcacatgaatgcttcagtaaagaatcctgatcagctttggttaggccagcattttccacactggtttaaacatggagctctaattcttccaatacctgtcaatatcccataaaactagcactatgccatgatggactgactctaaccagtctcactagacattaaccaggtacactaggctaggaggtaaagctggaaagccaggttttcatttgcaatgagaactaggatggatgagacataccaatgataccaaagaaatactcgaatatttctccgtctccagccttactttgccttgtaggtagagctgcttgggaagccaaggcaggactcatttcagggacacattatcatgcagggagggagggtaggaatagagaaggcaaatccaggagtaccagaggagcagtgccttgaacccctacatgcaggctaaactcacgtggcccctcacccagaacactgcaacagcttcttaactgggttcagcttccagctttgccccttccaatcccttttccactctgccaccagaagcagtttcaatatatatataaatctaatcatgtcagtttgctgtttcagattcttcactggatccaccatgcaattaaaacccaaactccttcgcatggtctccaaggctcgtgtgatgagcaggctcctccttactcttccaccgtggctcccactagtacatttcagccaaccatcatctttcaatttcttaagcaactatgcactctcttgcctcagtcttcacctatccttctttctccgcctgaagcattcctctccacccccctttccacatggacaactgactcctcttttgctcactgcttatgtctcacttccttcagagaaattccttattttctaccccctaaatgtgggttaggggctcctccctgatactcccctcagttctctttacttcctttgtcagagatgtctgacactgtgtcataattatctgtccacattttagcatctactgctgtgcgtttacttagttagtagttattagacagttgcctaatcaacatttatacccatgtcttgagtggcaacataaaatagcacacttataacattcccagaggacaagaagctagggagaatattaaatatattaaatgcatacttaggggttaaaatgatcttaagagcatgggacagtgagccaaattcaataagaagaaatttaacccatgcaaagtcttaatatcgaactaaacagaagaaaacaattgcacaaataaatatagccaaatagcaacatgagtgggtgacttgtaggggcctcaactgaattttgatccattgttgctagaaataacattagaatgtgttttaagggaggctgaggcagggggattacctgaggtcaggagttcaagaccagcctgaccaatatagtgaaaccccatctctactaaaacaaaaacaaaaacaaacaaattagccaggcatggtggtgtgagcctgtagtcttagcaacttgagaggctgagacatgagaattgcttgaacccgggaggcagaagttgcagtgagctgaaattgcaccactgaactccagcctgagcaacagagcaggactctgcctcaaaaaaaaaaaaaaaaaaaaaaaagaatgtgttttaagggttttgctttatcagatgcataatataaatcaacagtgagttaagagtatccaagacactgacaatatcttgatttgaaataatagactgtttattttaaaagatgtaatggtctcttttttttttttttacagaaaaaccacaactagagtaatgtacttaattccagaaaataacacttcaaaagagaaattgacaaagtggaaaatattccaaaacagagcgttggataaaagttctagaaataacttcttaaaaacagttaaataggctggatgtgatggctcacgcctataatcttagcactttggaaagccaagccggcggatcacctgaggtcaggagttcaagaccagcctggccaacatggtgaaaccccgtctctattaaattttttaaaaatacaaaaattagcggggcatggtggtgagtgcctgcaatcccagctactcaggaggatgaggtggggaggattgcttgaacccaggaggcagaggttgcagtgagccgagatcgcgccactgcactccagtctgggtaacagagcaagactctgtttcaaacaagcaaacagttaaataaatgaagaatgttttactcagaaaaaaaaaaaatcctatgagcagtctttaaatacctagagagtgccagctaaaatgaataagaggacttattctatatttatctagaagtcagaacgaggacccatggttagaaaaattacaaggaagcagatgtcagtttatcttaagagaagttttcaaataattagagttgtttaaaaatggactgtttgccctatgaaaaaatgagttccctgttcaaatggaagctagaagcccaagtagtagggctctcatgaaaatgtttcatgcagggtatagtagttctaccagatggctgagaaaatgctattgctgttctgtgagattctgtaaggatgtaatatcagtatattccttccattggtgctggtaaacggagaactgatgaaacccatttctaaggactttggtgtttagctatttttaaaaaaaaaactttaaagcccctgtgctaagaaagaggaccagaggagttgattgctaagctccttttcaacaggaacatttgtgctcctccagctcattcttgggctggtttatcacggggattgtggtcttaataagaccagaggacttaggagaaaggcagcttggaatagagaggtctagagaattaaacatctttagctcacagcataatggaaagaaagtgcccttcaggggaacatgtatacaacagggttctgagaagaggtaaaaataaaactgcatcctgcactttctgcttgccgtaatgctgcagtcagggtaacccggggagcaccacgccctgtgaaatggctgtcacagtttaggggcagtgagccacagtaagcctaggacccactatgtgccaggcatagtgccagacccactgcaccgttatctcattgagccttcatagaccttctcagggtattagtatcctcattttaaaataagaaaattcagattctgaaaggtaaagtaccttaacgcagtaattttgacacctgagattcaaactcaggattgcctgaactttgaattgctcagcagtgtttcaggaactcctggactttaggaccgaagaggatcttaaagagcccaacttcttggttttgactatggaacacaatggggtccaaagggaccaggcatcctgcacaggatttatgtgtggaggtaaaggaagccattcgactatggcaggagatgccccggcatgggtacaagctcagcaactgtgctttctgcgcacatggtgcttatagccatgaaggcaaatcatgcatcaggcaggggcagggagggggagggcaagaggccagggcacccctgccgacccttctaccctcccaccccaccttctccccaataactctttacaatgccaaatgcacatgcagaaaccagtctctagactagatcttctaaagtacagtgaggacagggagttaggatgacccccactttcagtcatcattcatagaggggaaggggaaaagggcaggaagagagctgactttcatgtgtcagaccctttgctaaatgcttgcatacgtgtcatctcatgccgtctcctgtcacattcctgtaagaagtggaacatgttaggctatgaaatgaatattagtgtctccattctatgatgaagaaatgaatttaagtcacacatacaaagttagacaactaagaaacatgtgatttacgtttacactcctgatgccacaaatcaaaagaaaaacctgtgaatgttggcatcagacagtccaggttttgacttttgaactggcccattagtagctaaggaaagctgaggatagtttctgtgtcactgaaaacaatcacacttatctcatggaaatcttagtgtcctttctccagacctgctccctctctttcctgcatttgagggatgagatctacttttagaattacagagggaggaggcatttgaccctttttgaggtaaaaggagaattttagattaatggctaactttgtccttcgaatgtccccttgaggctttgtcagatttgattccttcctttggaaagataagaaaattgaagtggctattccctgcttctgcctggttagtcacagagtgaggcagtgacatgatgggaagcttctaacataacgaaaactagcgtgagactgagaacctgaagacttcaactctggccctagcttctctgtatttggatctcccagacaggcatccatctatcccacagtgagtgccttgtggtctgaaacgagatcaaaggtggaaaaagctttaaaaagctctcttcaaaaacaagaatgtcacaagaggctgactctcgagactgtgttcccctacccctgcctcctacagagtttcattcagcagaccttgctacctgccttcttcagggaaaataatcttgtttttgagtttatgtttaaactaaagttagttgattattttcttcaacccttgtttttcttgttcatagagtttcttaatgtcacgagcgttcacctgttcaaggagagatgggacactaacaaggtggaccaccacactgacaagtatgaaaacaacaagctgattgtccgcagagggcagtctttctatgtgcagattgacttcagtcgtccatatgaccccagaagggatctcttcagggtggaatacgtcattggtgagtgccatgtgcaagctccagtcttgacaccatgggttgcattgtagagagaggtgggtacaggcacagttgtgtgatttcctagtgtcatatgtcaacagtggcaggagctggaatgacatccagcccctgaattaccctgtgctctaagactggtctgtatagtgccaaatattgataacttgggcccacccaaggagaaaatctcatataaataaaagtaaaactggtataatgtgttgcttaactaaattattcttcctcaaacaaatggttttggcatcctatgattctaacttttatctccatgatttaattggtctcgtgctgaaaatgtttgtaaatcttagcatgcaatccaagtatgcattccgaaagttgattctgctctgatctagtcccatgggatggcccgtgaaaaatatagtccaataaacttcactaaacactttgtactttaatcacccttttttttttttttttttttgagacagagtcttgctctgttgcccaggctggaacagtggtgtgatctcagctcactgcaacctcttcctcctaggttcaagcgattctggtgcctcagcctccagagtagctgggaccacagttgcacaccattacgcccagctaattttatgtatttttggtagaggcagagtttcaccatgttgtccaggctggtttcgcactcctaacctcaagttatccacccacctcagcttcccaaagtgctgggattgcaggcatgagacaccatgcccagcctttaacctcctcttgaagattaacgatgcacattagcttcaaaggtctggggaaggaccatttaactttggtctggtgcttcttaaattaatttgatcatggaacccttttattaagttatagctattaacttttgacacattttggtaaacatttctataggaatttataagattatcaaggaaatacatgcacagagaagcaggggtggcacaacataggaaatctgcccatataatcctatgcacaaattaaaggaaaaaattaggcaatcaaatcagcagtcacagaaaggtacatggtaaaattcagcatccagttttaggaagagtttaaggggaaaaatttagaaaaaaaacacctcaatgataataaagattgcttacatcaaaacaacaacttttgatatctaagtggaaaaaagttaacaaatttcactgtaatcagaaattagaaagaaatgcctgctatcatcattccctttttaaaaagaagtactttaaaggttttagtaaatgaacaatgtaagagatacatctgctataaatgctggaaactaagaagtaaaactatatatttgctaatactatgattgtgtatgtagaaaacccaacagattcaagggaaaaaagcactgtattaataaaactttgtaagttggctagatagaagataaatatataaaaatcaataacttttatcttccccagcactaagcacccagaaatagacataaaaaaatttcacatgaccaaaactataaaatgtaggactaaaacctgaacacgcaacctatataaaccagctattaaatcttaataaaaaacatgagaaaccaatgaaaagtcaaacatgttcttgagtgggaagtctttctgtatacatttttagtctcccaaggggttggtcaaagaatacaaaatttcagttagatggaaggaatgagttttagtgacctattccacagcatggtgactatagttaataataatgtatatttccaaattactaaaagagtagattttaaatattctcaccacaaagaaatggtatgtgaaggaatgaatatgttaattagcttgaattaatcaatccacaatgtatattttgatcaaaacatcacatattgatcaaaacatcacatcccaaaaccccataaacatatacaattatgattgtcaatttttaaaagcctcccaaaattaatatgtaaatttaatgcatttccaattagaatcccagtggagttttgagttgtctttggctttggttttggttttttggacttgtataaaataatcttaaagttcatttgaaataataattacctggtgataaccaaggaaatcatacaaagaaataataagtaagagtattttctttctgaagcggctatcagaacatactatgaaaaatatttagtaggacataatagagaatccagaaatggatttcagtatatgagttaatatgattgttggtttcatgaagtaagaagaccatatgagattttatctgtttgcttgtttgtttttacataaatgatgcagaaataactgactctccaactggaagaaagtttaaaaattgaccctcatcttgtcccatatacagtagtaaatctcagatggaatgagtattaatgtaaaaaagacaattttttgaggaaatttaacagacttaactaaaaactggaaactctgacactgtagaagaaagcaagaaccatgtacagttatgtgccacatagcaacatttcagtcaatgacagatcatgcataggtgatcttatgagattctgatggagctgaaaaattcctgttacatagtgatgtcatagctatcataatagaatagtgagattacttattttttttaaatgtactgtagcctaagtttatagtgtttataaagtctacagtagcatgcagtaatgacctaggccttcgcattcactcaccactcacccagggctacttctggtcctgcacgttccattcatggtaagtgtcctatgcaggtgtaccattttttactttttatattgtatttttactgtactttttctatgtttatatataaatgtttctatgtttatatataaatacttaccattgtgttacaattgcctgcagtgctgtattcagtacagtaaaacacactatgagtctgtaacctaacagcagtaggctctgccatatagcctaggtgtgtagtgggctgtaccatctttgtttctatgatgttcacacaatgacaaaatcacctgcctaacaacatattacatcccgtgcatgacaacaaattcacgtttgaagctctggaccacagttctgctgcaattatgagggaagttttatctccatctttaaagccaaatatttagggtggggagaagaggagagggaagcttcaattctgaattggacttgtctgaggtttgaaacactctcataggccgttcagaaaataattatgataatggaagtcttagaaaaactggtaagatgaatgtcttagatcgggttactaggaaataaactctgagaagaagacttgtgcgcagaaagtttactggggagatctctcaggatcaacatctgcaagggagtggaggaatcactgttggacagagggaggagttgaactgcagtgcagacagggcccccgtggatctcaaggtgaactctagctatgggttggatcttcagagttgtctcgccttgagccaagggcatgggcctgttataccttttataccttgactggggttacagccttggtgtaattggttctctgtggctgagggtaacccctgaaagcaactaaatgaatgagaattgtcagccaccaacactcccaacaatgggaaaggtccaggcagcccaccacagcatccattacagtgaacattttaagtcctcttttcttttttacacaagaaatactattacttttgttccctcaataaaagagggggaaaagcatagctaatttgtttttgagataaaatctgtatatttttaaaccaacatgtattctaaacctttcagaacccatgatgtgtgcgttcagagttaagctgtattctagtatgtgtgggccattacagggccacatgtatttgaagattttctattataggtcacacacatttgaagatgtttcattgcccaacctgttgtagatacaagaaaggcaagtgacaaaattccacactctactatttagtgtagaaattaagcacacttcgaggggcgtggaaggacccatggtagaggatttatcttgatcagagtcatttctgcatctcacatcattcaggaagttacatgagagcctcaacttcatggctgccatagttgtaagacaggaagaaaaaagaacattgctggggaaataattctcttaaaattcagtgcctgtttcaataggactgaataaagccaaggaaattagattttaaggctaattgctataatgagaagagacaagtatagaacgtgaactagaaatgaaattaagtgcaaaggtttctatatacaggtgcacctcaatttccagaaactcagaaggtaaaagtgatggtttaaaaacgaaaaagaatataatttctattcatttttaaaaatctggcaacaccatttcaagagaagatccattttagctaacgttttacaatcagctaaatgtctaaacatttgagatatcatttactattaaaagtgaaccaaaatgtaacataaattaaaaaaaaaaacagacgagaataaatactttgttaaaaataaagggcacttaaaagaatctcggggggaggagccaagatggccgaataggaacagctcaggtctacagctcccagcctgagcgacccagaagacagtgatttctgcatttccatctgaggtatggggttcatctcactagggagtgccgcacagtgggcacaagtcagtgggtgcgtgcactgtgcgcgagccgaagcagggcgaggcattgcctcactcaggaagtgcaaggggtcagggagttccctttccgagtcaaagaaaggggtgacggacggcacctggaaaatggggtcactcccaccccaatactgcacttttccgacaggcttaaaaaacggcgcatcaggagattatatcccgcacctggatcagagggtcctacgcccacggagtctcgctgattgctggcacagcagtctgagatcaaactgcaaggcggcagagaggctgggggaggggcgcccgccattgcccaggcttgcttactgaaacaaagcagcctggaagctcgaactgggtggagcccaccacagctcaaggaggccagcctgcctctgtaggctccacctcagggcacagacaaacaaaaagacagcagtaacctctgcacacttaaatgtccctgtctgacagctttgaagagagcagtggttctcccagcacacagctggagatctgagaacaggcagactgcctcctcaagtgggtccctgacccctgacccccaagcagcctaactgggaggcaccccccagcaggggcacactgacacttcacacggcagggtactccaacagacctgcagctgagtgtcctgtctgttagaaggaaaactgacaaacagaaaggacatccacaccaaaaacccatctgtacatcaccatcatcaaagaccaaaagtagataaaaccacaaagatggggaaaaaacagaacagaaaaactggaaactctaaaaagcagaccgcctctcctcctccaaagaaatgaagttcctcaccagcaacggaacaaagctggatggagaatgactttgacgagctgagagaagaaggcttcagacgatcaaattactctgagctacgggaggacattcaaaccaaaggcaaagaagttgaaaactttgaaaaaaatttagaagaatgtataactagaataaccaatacagagaagtgcttaaaggagctgatggagctgaaaagcaaggctcgagaactacgtgaagaatgcagaagcctcaggagccgatgcgatcaactggaagaaagggtatcagcgatggaagatgaaatgaacgaaatgaagtgagaagggaagtttagagaaaaaagaataaaaagaaatgagcaaagcctctaagaaatatgggactatgtgaaaagaccaaatctacgtctgattggtgtacctgaaagtgatggggagaatggaaccaagttggaaaacactctgcaggatattatccaggagaacttccccaatctagcaaggcaggccaacgttcagattcaggaaatacagagaacgccacaaagatactcctcgagaagagcaactccaagacacataattgtcagattcaccaaagttgaaatgaaggaaaaaatgttaagggcagccagagagaaaggttgggttaccctcaaagggaagcccatcagactaacagcggatctctcggcagaaaccctacaagccagaagagagtgggggccaatattcaacattcttaaagaaaagaattttcaaccccgaatttcatatccagccaaactaagcttcataagtgaaggagaaataaaatacgttacagacaagcaaatgctaagagattttgtcaccaccaggcctgccctaaaagagctcctgaaggaagcgctaaacatggaaaggaacaaccagtaccagccactgcaaaatcatgccaaaatgtaaagaccatcaagactaggaagaaactccatcaactaatgagcaaaatcaccagctaacatcataatgacaggatcaaattcacacataacaatattaactttgaatgtaaatggactaaatgctccaattaaaagacacagactggcaaattggataaagagtcaagacccatcagtgtgctgtattcaggaaacccatctcacatgcagagacacacataggctcaagataaaaggatggaggaagatctaccaagcaaatggaaaacaaaaaaaagcaggggttgcaatcctagtctctgataaaacagacttcaaaccaacaaagatcaaaagagacaaagaaggccattacataatggtaaagggatcaattcaacaagaagagctaactctcctaaatttatatgcacccaatacaggagcaccaagattcataaagcaagtcctgagtgacctacaaagagacttagactcccacacattaataatgggaggctttaacaccccactgtcaacattagacagatcaacgagacagaaagtcaacaaggatacccaggaattgaactcagctctgcaccaagcggacctaatagacatctacagaactctccaccccaaatcaacagaatatacatttttttcagcaccacaccacacctattccaaaattgaccacatactgggaagtaaagctctcctcagcaaatgtaaaagaacagaaattataacaaactatctctcagaccacagtgcaatcaaactagaactcaggattaagaatctcactcaaaacggctcaactacatggaaactgaacaacttgcccctgaatgactactggatacataatgaaatgaaggcagaaataaagatgttctttgaaaccaacgagaacaaagacacaacacaccagaatctcagggacgcattcaaagcagtgtgtagagggaaatttatagcactaaatgcccacaagagaaagcaggaaagatccaaaattgacaccctaacatcacaattaaaggaactagaaaagcaagagcaaacacattcaaaagctagcagaaggcaagaaataactaaaatcagagcagaactgaaggaaatagagacacaaaaaacccttcaaaaaattaatgaatccaggagctggttttttgaaaggatcaacaaaattgatagaccgctaacaagactaataaagaaaaaaagagagaagaatcaaatagacacaataaaaaatgataaaggggatatcaccaccgatcccacagaaatacaaactaccatcagagaatactacaaacacctctatgcaaataaactagaaaatctagaagaaatggataaatttctggacacatacactctcccaagactaaaccaggaagaagttgaatctctgaatagaccaataacaggatctgaaattgtggcaatgatcaatagcttaccaaccaaaaagagtccaggaccagatggattcacagccaaattctaccagaggtacaaggaggaactggtaccattccttctgaaactattccaatcaatagaaaaagagggaatcctccctaagtcatttcatgaggccagcatcatcctgataccaaagccgggcagagacacaaccaaaaaagagaattttagaccaatatctttgatgaacattgatgcaaaaatcctcagtaaaatactggcaaaccgaatccagcagcacatcaaaaagcttatccaccatgatcaagtgggcttcatccctgggatgcaaggctggttcaatatacgcaaatcaataaatgtaatccagcatataaacagaaccaaagacaaaaaccacatgattatctcaatagatgcagaaaaggcctttgacaaaattcaacaacccttcatgctaaaaactctcaataaattaggtattgatgggatgtatttcaaaataataagagctatctatgacaaacccacagccaatatcatactgaatgggccaaaactggaagcattccctttgaaaactggcacaagacagggatgccctctctcaccactcctattcaacatagtgttggaagttctggccagggcaattaggcaggagaaggaaataaagggtattcaattaggagaagaggaagtcaaattgtccctgtttgcagacgacatgattgtatatctagaaaaccccattgtctcagcccaaaagctccttaagctgataagcaacttcagcaaagtctcaggatacaaaatcaatgtacaaaaatcacaagcattcttatacaccagcaacagacaaacagagagccaaatcatgagtgaattcccattcacaattgcttcaaagagaataaaatacctaggaatccaacttacaagggatgtgaaggacctcttcaaggagaactacaaaccactgctcaaggaaataaaagaggatacaaacaaatggaagaacattccatgctcatgggtaggaagaatcaatatcgtgaaaatggccatactgcccaaggtaatttacagattcaatgccatccccatcaagctaccagtgactttcttcacagaattggaaaaaactactttaaagttcacatggaaccaaaaaagagcccgcattgccaaatcaatcctaagccaaaagaacaaagctggaggcatcacactacctgacttcaaactatactacaaggctacagtaaccaaaacagcatagtactggtaccaaaacagagatatagatcaatggaacagaacagagccctcagaaataatgccacatatctacaactatctgatctttgacaaacctgagaaaaacaagcaatggggaaaggattccctatttaataaatggtgctgggaaaactggctagccatatgtagaaagctgaaattggatcccttccttacagcttatacaaaaatcaattcaagatggattaaagacttaaacgttagacctaaaaccataaaaaccctagaagaaaacctaggcattaccattcaggacataggcatgggcaaggacttcatgtctaaaacaccaaaagcaatggcaacaaaagccaaaattgacaaatgggatctaattaaactcaagagcttctgcacagcaaaagaaactaccatcagagtgaacaggcaacctacagaatgggagaaaatttttgcaacctactcatctgacaaagggctaatatccagaatctacaatgaactcaaacaaatttacaagaaaaaaacaaacaaccccatcaaaaagtgggcgaaggatatgaacagacacttctcaaaagaagacatttatgcagccaaaaaacacatgaaaaaatgctcaccatcactggccatcagagaaatgcaaatcaaaaccacaatgagatgccatctcacaccagttagaatggcaatcattaaaaagtcaggaaacaacaggtgctggagaggatgtggagaaataggaacaattttacactgttggtgggactgtaaactagttcaaccattgtggaagtcagtgtggcaattcctcagagatctagaactagaaataccatttgacccagccatcccattactgggtatatacccaaaggactataaatcatgctgctataaagacacatgcacacgtatgtttattgcggcattattcacaatagcaaagacttggaaccaacccaaatatccaacaatgatagactggattaagaaaatgtggcacatatacaccatggaatactatgcagccataaaaaaggatgagttcatgtcctttgtagggacatggatgaaattggaaatcatcattctcagtaaactatcgcaagaacaaaaaaccaaacaccgcatattctcactcacaggtgggaattgaacaatgagaacacatggacacaggaaggggaacatcacactctggggcctgttgtggggtggggggaggggggagggatagcattgggagatatacctaatgctggatgacgagttagtgggtgcagcgcaccaccatggcacatgtatacacatgtaactaacctgcacattgtgcacatgtaccctaaaacttaaagtattataataataaataaataaatttttaaaaaaagactaaaaaaaaaagaatctctaccagtacatctttaagagtgtttataacaagagacttaccaacaaagattgacttactgtcactcactatattagtcagtgttctcttgagggacagacctaataggatatatatatgtgtgtgtgtgtgtttgtacatatacgtgtgtgtatatatatatatgtgtgtgtgtgtgtgtgagtgttgtgtgtatatacatataaaggggagtttatttaagtattaatttatatggtcacaaggtcccacaataggctgtctgcaagctgaggagcaatgagagccagtccaagtcccaaaactgaagaacttggagtctgatgttcaaaggcaggaagcatccagcatgggagaaagatgtaggctgggaggctaggcccatctctccttttcaagtttttctgcctgctttatattcactggaagctgattagcttgtgcccaccagattaagggtggatctgccttccccagcccactgactcaaatgttaatctcttttggcaacacctaggattaatactttgtatccttccatccaatcaagttgacagtattaaccatcacactcactatatacttaaaaaaactttttttttaggttcgggggtaaatgtgcaggtttgttatataggtaaaaacatagctgtttcataaagcaagctattattatatttaaaatacagaaaaaataactttatacttagttgcttccaatttgcattcagtttttttgttgaggttgctctctcattccctgtgcctgtatagatgagctgagatatgttagtacactggagtttccctatgttgctgttctcagaacctaggtcatgggatttatttatgtgattctgccttctaaccaatttccttctctccctccctccctccctccctccctccctccctccctccctctctctctcactccctccattccttccttcctccctcccttcctcccttcctcccttctttccttcttccttctttctttctaaatatttaaataaatagggctcttggatggtgtgctgggctctgagtagagaaggtgagcaggagagctactgccttacctggccacggcttgatgagctgtgctgcaggggttctttgtgctttgataactgcgttcatgagttgctggcagagcacagctatctctgtgttaggtgggaggtgttaatgaatctgaggaggtgggtgtggctgaaaaatgccctgggagtctgcagggccttctctctctctcacctctgagcctgcagcctcgacaaatcatgaaaggcaaggaggggagtggtaatcacaggttttactaacctgtggctgagactgtgaaagcttgggagcagcttctggtgttaatttgctgttactttgacatgggcccctgcttttttgatacccagttgagggtgaaatcccaagctgtatttcttaccaggtctccccctcaaaacggcagaggtttcactccctgaggagccctccgaagtgacagtagggtccatgagcaagtttctttctccctggagttcaaccacaggaacctgggggtgtccaggtcagcgctttggagattctcctgacctttccctcaattctatgatggccctcacagattcaagcttcacatttctggttacagcagaaagatgaggagaaggatggcattagcatgccccaccccacttatcaggaaaacaaaagctttcccaggcacttctggcaatcgtttatgtttcatttgctacccttagctgtaaggcaagctgtgaaagtattccctttttccagtctcttcagaggagagggatggggcagagctgaaagtgggtgctggtggacccgcagtcatgtgtgctgggcatcccccctagctgggccatcctgtgagtataaaagtgctgtcctaatgctggcagccttgaggcaggttgttcatcacccgctcaagcatttctaggactgggtcaactgcacatgttctgcatcacaaaccctataaaacatggaaatgtcatcagcaacactttaatatctttctttcacttatttcttgagtagcatttatggaaagccagcggcggtgttggatggtgttttcagggtgggagtgacatggatgattctcatttgagatagcttgctctggcccacttcagggaatcagggtaattcaggataggagaggagatgatcagaagagagaggatgagaaccggggttatggctgcagttgtagacatggacaggagtgacagggtttgagaaatatttaggaggcaaaatctgcaggacttgtgttggggagtctgtgaggggtggaagggaggagggtcaaggtcgacttccaggtggctggcttatgtgactatgatgacagatgctagcacttccaaatgagataaagaatgcctggaattccagagggaaaaaatcgagtgtggaaaatgctaatggaggtagtagcttcattgataactcattggcactgttgctgtgcagaggtgctgtatgcctcccatttaattgttcaagcagccctctgggcattggactatggccatctccatttttcccatgagataatggttgaaaggattaagtaatttacccaggtcacacctggaaagtgctgggacctcaatttggacccaagcagcctcttctacttacaatgcttactacctccaccaagggagcctccaccaaggagatggtggaggtatgaatatgcttctgtttgaattgatgagtgtgaattacttgagggactttcaggtaaacctgtccaatagataatatgagtctgaagcttcgggaggaggtttgggttggacaggagataatttggatatcatacacacgtgggcaagctcactcagaaaaaggtaaatcaagtcagcagtggactgaggcttaagccctggggaaaacaacttctaaggcatcagtccagaaactagagcccctggaggagacaaagaccaaatgagcagataaacagaaggaaaataagggggttgcagtgtcactcaatccacgagagttgtgtgtttcaagaggaaagcatgaccaatgttattaaatataactaggagatgcagtgagataggaacttcccactggagtcaacagttgggggacactggttgaactcgggtagattccaaattttaatggtctaaaagtcaaggagatgtgaggaaatgggtgtagtcaatttggatgaatctttaaagaaatttgaaggagaggaaaagaaaatttgggtggtaactagagaggaatgtgggtgagaggaggggtgtttcaatttcagtatttgtttcaggattggagggactggaacatgtagcaggcagagagggaagaatcagtcaaggaagaattctgaagattcaggagggactggaggagaagcatagaggacaggggcacgggtgaggggctgagtaggaaggaaaattcctcatcttccaaggttgtcgagaaagaggtgaaggagggtatgactgccgtaggtggagaagtatgaactaagcctcatgcctgacaatctcaagttatttaaagatgtaggtggtgagcaggtgctatagggtcttagaggggcagatgagtacccttacatctgaaaacatcatccatatcctttaagactatgtcttcctatggattttgtttcagaaagtccaggtaaaatcatcatgctgatgtgtgattttcacatacataacatactttctctattgagaaatgtcttgccccaaactgtgcagcttgtaacgtgtagataactatttcttagcctatactctttcaactattttgtgctgcattttggtgaaaatagacagcctatttcatcattttgaagcaacatttatatagaatgtcatttcagatttttgctcctatgggtttctgcattgatgatcaacgtgtttatttttaagcatctctgtgaagtgactaataatggcatctaagaaagtaggacagtgtttcccagagtgtgttctctatgaacacctgtcatgtgagattctccttgggggaaaaaagttccatcatcaaatacagttggatcatgctgtgttttgtgtctcttctcatagaggcccaaggcacattaatatataaaaggctatgagtagacacgtagtcaaaaaatgaatcttgtttagcccaataattcccaaaattgttctactataaacactaccctaccacatttttatttttataataccattgaataaggtgcagaactcattccaggaaatgctgaactatagaggcatattacctctattccatacaacactgaggcaggtggctgacagaacttgaacagatttgtagtctatgtgttgtgataactttatatccattttttctttttgacacttaagattttgtgcaaacattgaaataactattaatttggcattcatatttagtaacttttcaaaaataattgttaagagtatgtttttatatttatttttcagatatttatttggcttctttcaaccataaagcctatttattttctttttgaatgtgcttattgaactcttatttaatactttgtatgtgcaaagcaccatattgggattagagtagtaagatatgttcatcccttgcctccagaggatttgttgtccagaggggacagtctgagtaggaaaggctgtgttcaatgccaaccttttgaacaaaatgcttagaagctactttggagggagtgactgatggcaagaatagttgaaagaatcctccagaaagtgctatttgaggcgggtctcaaaaaacgaatagaaattgacccaggggaatggaaattgtatacattctagaaaaaaaaaaatagaaaagttcagtggagcatgacattttggaagcacactgatgtctttgtatgacttgataagaagtttagatgtaattctataaacagccagaagcctctgtagtagcattttaggtagagtattaagatctgatttttttctactttttagattactatagcagaagtgtggaagataaattggaggaccgagattttgttagggacattagtaagagactcaagggggaaaaaaatctcactaataaatgataggataaatggatgctgcatgagtttgtatgatttttcccctcctttttttcccccaaaggaacttatgtttacttctataactagaagtagtaaaatgtgtgtgtgcgtgtgtgtgtgtgtgtgtgtatttgcatagtaaaatgggactcacctgtagtgaagtaacacactgtggtctgaggactaacaatatgccccagtggctggccctctgccatttgtaggccatctcagggatgacagctcacgtgattaaagggctaaatgaagccctttttggtggggaaagaggcggcttggactcaaggcagtgcccagtcagaacccgagctccaccatggatagcagtgacagaatcactttaccccaccccccatcacattactgtttcctcacctgcaaataaggactatactatttattttaaacagccatttatgggttaaaggagataatgtataggaaaccacttttttattctcacaataaactgggaggcagggaaggtagaaataaaacttattaaaaacatggaaaccaatgttcacagggattaagtgatttaccccaggttgtgggcaaaggatctgagcaaacatttctcaaaagaagacaccaaaatggccaactggcttatggaagaatgctcaacacctctaatcatcagggaaacgcaaattaaaaccacaatgaggtgccacctcatacctgttagaatggttactaccaaagagaatgataacaagccttggcaagaatgcagggaatagagaaccctatacactattagtgggaatgtaaattaaggcagctgttttggaaagtcgtgtggcagttcctcacaaaactagcaatagaactaacgtgattcagcaatcccacttctgggtatgtatctaaagaaaattgaaatcaggatgttgaaaagatgtatgtagtctcatgttcatttcagcatcactcacaataaccaagatatgaaagcaacctaaccaatggataaagaaaatgtggtatatagacacaatggagtactatacagcccttagaagaaggaaaattctgccattctcaacaagggtagaactggagagcactatgctaactgaaataagccaggcacagaaagatgaatactgtatgatctcacttatatgtggaatctgaaaaagtcaatctcagaaacacagtagaaagttgtttaccagaggctggggcttgggggcaaggaatgaggaaaaagaagatgttgatcaatgggtacaaagtctcagttagactgaaagaataagttttagtgatctactgcatggcttggtgaccacagtttaaaataatgtattgtatatttcaaaattgctaaaagaatagatttttaatgtcttcaccacagttacctttcttttttccatgtacatagaaaagaaaggtaactatgtaaggtaataaacatgtgaattagctgattgaatctttctacaatgtatacatagatcaaaacttcacattgtatcccaatagattccccataagtgattgtctattttttaaaaaacatctacacacgcacaaagaaaatgcttccaaaagcaaataggagggcattgctctcatgtcttttgtctcctggtggcaaagacaaccatcactgaacctcccaacagaaatacccagtctccttgttacatccattctgacagcttcattagtcacataggggctctgacaatccacaggccaagttctgcctggaattatttgcccatagttctagctgaagtgacagaaacagtttaatctcaaagtaggtgggattgccatccatattttggtgccagagaccttaccatgtgcttcctcagccctgccctgtcacccacatcatgtctgcagagctggagtttcccagtgaagcttatggtccctagggtaatagagtcgctgatgtctttgtcacattaagggtgccacacagagcacttatgaagggccatgggtatcggaatgagaacactcagaacatccacaaacgcttcctccctgactgcctcctgtgctttctcccctctttcctattcccctaatttgccttcacccttgctcctatgtctgtttctctctgtcttcacacttgtatcttatgatgacctctttcacttacaagaattcataaacgtggctcatttgcacccacataattgaaactgtactccaccagaaagcgctggtctgaactcagggaggacggactgtgggcattccctggcttttccacataaattctaagacattcttgcagcatatgaagcaagaggtgaaaaaggtgggggaaaatatttaatgaaaacaaatgtgcccactgcgataacttgctcttgagtctctaatctaaaaagagagcatgcaagtggaattacagcccactaaagaaaggatccaaatggactaaatattcttcatctttgccctccagttactccagaagcatgttgtaaggattaatgagggaataactggaagctctttgaactgcttcgtgatagttccttcctaataagatgacccaattaccagccttattttcaatattgcaactatgtaggaaagctaaattcttatggtattccttaaggaaggataaccttcataaaatgctactataacagcagccagagccagacaggtattacacaaccataagacaggctataaatagctgtacctctctcttgctaccctcttcaccctctttcttctcagtatcttggcctcttttctgatcttttctcttctttcttaagatttctattactttcatcccggcctgtctgtttctgtcttgctcttcctctctgtctgtctctcatgcatacatacacactgtcctgtggatgcacgtctaggtgttagtggcagcaaatgtactggagtcccacagcaccaaagtatgttagcagcagtgaatccacatggatctacagcagcctcaattcttgcctcctcataaggcaggagagactggggcaagttttagagcaggagtgaaagtttattcaaaagctttagaacaggaatgaaaggaaagaaaatacacttggaaaagggccaagtgggtaacttgaaagacaagtgtacagtttgactttgacttagggtttttgttcgtttttttgagacagactcttgctctgtcacccaggctggagagaagtggcgcgatctcagcttactgcaacctccacttcccaggttcaagtgattctcctgcctcagcctctccagtagctgggattacaggcacttgccacaacacacggctaatttttgtatttttaatggagatgaggtttcaccatgttgaccaggctggtctcaaactccttacctcaaataatccatctgaaagtgctgagatgacaggcatgagccaccgcacctgactgacttcaggttttacctgttggcatacttctggggtcttgcgtccctactcctgtgattcttcccttaagtggtgtgtctgcgtgtgcagtggcctgctagcgcttagaagcggagcatgcacagtgcgtttactagtgttgtactcgtgaccacttgatgcattttttccttaccagttgagtgtccctggaggaaggccacatactggttaaattccgccattttggctcttagtgcgcatgcctgagcccactcacccaactgctgaggttttattgggaagctgctgatcaccagtttcaggtatttctgtttattgggagactgcccttccctagcactggctgggaccaattattattttagaaggacagtttaacaatgaccgtcacctgatggtcgcctgccattcctggtgtgtgcgtagtgggggaagccctctcctcccctactcatgcctgactaggtacctactgtagcataggtatttactcatttgttagagaagtaatgggagttacccttgggaggtgggtctgaccgtttttgtgtctgttcatgagcatttctttagccttcaggaagctggggctggatgtgctaaatgtgctgcccatctctggctaaagcctagcttagccattgggatgctccttctctgcactgttggaggttttgctttggcttcttcaacttccttgtctatttcctttccaattctgtttacaaatctctataacatcttgtcccatgtctggttcagtgaatttgtgatgcagaaacctctgctgtgtccagcagtttgtgacaccccagagggggtttaagaggaatgaaagaccccatctctgtcttttttctttttgagttggagtctcgctctggtgcccatgccggagtgcagtggcgtgatctcagctcactgcaacctctgcctcccaggttcaagtgattctcttgcctcagcctcctgagtagctgggattacaggtgcccgccaccaggcctagctaatttattttttgtatttttagtagaaacgggatttcaccatgttggccaggctggtttcaaacttttgaccatctctgtctttaaagagcttactgtagttggagtgagaggaattccacaaacaatgaacacagtcagagagtatataattgagctatactgatacagttgccttccagaaatgtgtgacacgactggccgaagtgactctgggcagtcaagagcaagaggatcagctagagttgaagggtaaaatctcagaaaagggcagggaggtcttgagatgactcttgaggaactgggagcattccaagagggctacgaagtatgtaccctccatgcaaggaggacggcattcttggtagtccaggagcttattgttctgctgatgcaaacaagcttctagtgagaaggaaatatttccctgaatcaagtgtctggctgcatttggagtttggacaccactcagtttcaaggctctggagttgtaagaagcttgcagcggcaggaaaggcccatcaggcaggcccatgaggaatgtgctcccctcatgcaatcagtctgctgttattgcttggttagtgcccagggtggacaggggccttttgtattaaagcaattaattttacaaaaagaggaagaaacccttatgtttctgtgactaaaatgacggaaatgaagtagtggagacagctgcagtggcattttccatcaaacagcttttctatttgtgcaacatatttctaagtgatagaaaatgacacactctctccattacttcacttccatcatttccatcatttcaaccttttctaactttcatatttgtgaaacaaattgctttaaacatgtcaaagacatttgagtggagtgttagccaaattttaaaaataaagatgattcataaagacagtgcttgtgtttatagccatcaagacaaaatttcaggaaaaaaaatcacagtcctaattactgaaggcgcatgcataaggtaatcatatttggaagttagaaacaaatctctttttgctctctgcctcttttcccttagatttatatgggttggtaaacctggccttgtggtactcaatcatccttgcttcagtgattcactaagtaaccccttgcgagttgatttctccagcctctggatttatttgcattgttatgcaatgggtggaacacctcactgctgttctgctcctcagcagttagttctatcttctcttacagctgatgcttcttgaggggaaaggccaccttgtgtcttttgttagagataggatgttgccaagggtagggcaaccaggagggtatcccttagcatgtaactttgaagaatcaagattggtgctccacacaaagttcgttcaaaaatgtttctcttaagaaacttaaaaacctacatcgctgatggaaaaaaaaaaggaaggacatgaatatacaggataattgtacaaaaattgggtacatgtattgttgttgtttaaaagttttttttaaatttcgaaacaaactccactttacagaaaatttacaagacaaaccatacaaagaactgttttttcccagaaccgttattagagttgtcaatctgatgtctcgtcatccctgaatactttagtgtgtactacctatgagcaaagacattcttctgtgcaaccatcaaaataaggaaattaacactgatatttgatggtagtctaatctttagaacacatttgagtttttctacttgttcagtaatgtaccttatagcaacagaagctagtccaggatcacatgttatatttagatgtcatgtctcatgtctttagttttctttaatttggaacagattcataatcttgctttgactttcatgatttgacacttttgaacattacaaggcagtaatttttagaatgcccctccatttgggtttgactgatgtttcctcacttgatgttaaaatcaagtcacgtatctttcacaggaagattgcagaaatgatgctgtgttcttcttggtgcctcctacctggttgcacataacttttacagatcccattactgatgatgttaacttaaccactcgattaaggtggtggcacaggttgagtgcccaggaagtagactgtgaaattagcatgcaagctgttgattagggagtgctgttgggatcaactcctgtggaaggaagcagtattaggtagtgggggagtcaggctgcaatgcactcacaccaaaggcctcagatgaccctctgtgaaactctggagctgagatagctcttcatagtgctcctgagatgaggacaaagggatggggctttgttcctccatagtgatcagtcactggatgtgagccacccctggaatgaggtgtgaccctggatgaggcagttttcttctgctaaggcaactcccaaggaggcctgaaccaccaaggactattttctgtcatcactcccagcagctgaggataagcctgtcggtcatttccgaaggtgtcttgggcagaacatcacagagcccaacacagaggtgactgttggggttacccctgcaaagttattctttgttccttttatagttaataagtactttataggaaattatcttgagactataaaatcccatttattaccaaaattattattgatagaatgattgattaatacctggatgaatcctgattttctcttttaattaaataggttacttaaatcttttattatcattaaataacttaatgttcaaacagcctcgattttgccagttggactgttccaactagtttcagtatccttacttcctcatagtctgttacagtaagatgtttcaggcccgttttgagttttccctgcacctaccctcaaaataaccatttatctaaggagaaacatttctccaaagaactccacttcattttaatagaaagtagtatttagaaaccaaggtctagatcctaggtgtgctcattagtattttacctcctttcagtatttcccaattcaacctaggtatatctcacttaccattcttttcacctctctgtcatacctatggtgacccctgattcatgactcttgtcctccatacatttttttttttttttttttttttgagacggagtctcactctgtcgcccaggctggagtgcagtggcatgatctcggctcactgcaagctctgcctcccgggttcataccattttcctgcctcagcctcctgggtagctggggactacaggcgcccgccaccaggcctggctaatttattgtatttttagtagaggcggggtttcaccaagttcgccaggatggtctcgatctcctgacctcgtgatctgcctgccttggcctcccaaggtgctaggattacaggcgtgagccaccgagcccggccgtcctccatacattttttatctttgagcttgtcatttactgagtcttcacaatgtgccaacagtgtgctctgtgtttgcattagttttatgttgctgttgtaacaaaatatcataatcttagtggcttaaaacaacaaacatttattattttgatataaggtataatgatatataaaaggtgtaatgacatcttaactgagctcctcctacctagtgtcgtcccttagggaggaatcagtggaattcagatcctgattattctggctctaaatggtccagaataatcaggatccgatggctggtcctggtatacctggtctgacactgggcctgggatctggaaaggtcttagaagaaattacattgagactgtaaaatcccctgaggaagaagacaaggtcttcagaatgtgaagtaaagagcatgccctctcccaattttatgcaatgagtgaaattctattatggcaatttattcatttaagatatgaaggaattattttctacaaagtgtaaatatggaggtaagaagaagtattagcactcttcttagacattaacattttagcaaaatgaatttattagactcttgccattaactgttagctgagaccagttcccttagaacgagttgccaaatgaccgttttcatggggagccatgcgatgttcaatgactaggtgctgccagggaaggctggcccagctgagtcccaaagtgaggattctccagccactccgcaaacagtatgaaactccagggtacatgcttaaagcactctggaatttaagtagtggcagatgttttagaagaaattccactgtgccactttccaaagcactggaattaggtgttatttacggaaggcaatattgtaccccttcaagcccacaaataaagaggtactcagcagtgacctttattaaaggcaaatcagtggggaacacatgaccagaggaaatgagagaagattggaatatattctaaggccttaaaaagatgtcaagaacaattgtgttcccccacaaggcatcattaggcaaggatggtccaacctcaatacggtttctttacatccctgtgtttcagctacatccgtggtctcctgtattgtttatctatgtcacttgcaaaaaactaggcttgaatacagttttttaaaagtgatgcttttaaatataagcggtaatcaacttatgaaggaacaatgaacatctatagtaagcaaataaacatccacacataaatatacatatgaataaacaaaatgcaaatgtgtgtcattctttctgccagtcctttgagttccatatttgttgtcatgtagttaataaagtcgttgacttcccccacggtctactactcttgctctgttattctcatgtggcattagtattatgaattaaattacagtctaaacttgcgtatttaattataaacccattgagcacaggaaatgtatcatatctcagcacattcaccaccctgtctcctccagattaagtggtatcactctgctcatcataagcactagtaaacatctgtttaaataaatgtttattgagtatgtattgtaaatatccacttgtaggttaatactagatggactgtaccatactccttagaatgttttctatgttgatttttgtttctccagtaattgctttaatctctggcaatgcaaactcatttaacacttgcttttatatattgcattcatatatactccaaagacaaacaaatgctttatcagaattaccagtgatttattctcattattgttgccattcaattattaacaggaattgactgttttagcaaaaatgtcatcagttggcctgttttgtttggaagacattcagctaaactttttcctttgttggctaatgacactttattttttaagtcagttgccatgattttaacgaaatgagcctttcttgtaaaacctagaaggctcattctgctcatataatggatggaacacaagcaaatgagcaaatggtgctttggctccatagacttgccatttgctgggggaaattcagttgctgtaggagattctttacggcatgtgttctgagctgactgagaacatgaaagagatgggtctcgaagatgctaaatgcagtgcatctggtcagtgaccttcatgttcagtgcaaagtgtgcctccccaccaagtccctctccaccccttgggcttccagaccccagcacgaggggtcagaaacccaagaaatatggaaacattctttgtcagttgaaagaattgcataacagttggggtcagatggggcaaaaagctgggtatgcagtttggtttataactgtgaaatctggcaaactacaataaattagacattgtgacaccaacatcctatttctctgtctcacatctctagatcttaaagagtttagccttcatggattgatagaataacacagtcttgtttaaactcatgccaaggaagggctggaaactgccctagaaacaatggtcatgtagatgaactttgtgcttctggtggccacattttttataccatgtcccctgagcaagtttccctatttccaacctccactttcctccctatttccaacacccagttccagcttttaggaaaggtacatagtgcagtaaatttaagcaaacacattgcctttcccagggatataaacatttcagcatcatctctaatttctcttctgttggtaggattttcattaccaacaagcaaagggggaatattgagaggtcaagagatcttcatagcaatcctgattgctctcctgcagtcttcacagaacaaccaaagtgattttttaaaagaacttaaagcagaccatgcctcttttctagtgactgcttttctcaatcagaataagatccaaagtcctacaaagccctgcttgatctggctgtctctgacatcatcttccatggtttcccctgctccaggaactttctcgtctcccacaattcccctgctcaggcactgtcacctcccacaattccctctgctccaggcgtctaatctcccccaattccctctgttcaggcacctcatctcccacaattccctctgtcccaggcatcttatctcccacagttccctctgctcaggcacctaatctcccacaattccctctgccccaggcatcatacctcccccaattcccctgctcagatacctcacctcccacagtttctctgcttcaggcacattggcctcctcaagcatgccaagtaccacctcccacagggtctttgcactgatgacacctgtcccctgatatttgcactgctcattccctcacttttctcaagtctcttctcaaatgtctcctctggccactgtctctaaaatagcacccccagctctgaccctctctgtcctcttaagctgctctagtcattttttcatagcacttgtctccgtttgacgtatcatgtatttatttgtttattgtccgtatactcccactagactatacactccattaatctttatgtgttgacactgctgtattctcagtacctagaacagtgcctggcacttaaatggtgcttaataaataacctgttgacgaaaaagatcctgaatcgtgccacagcaacaattacttgttaattgaaaaatcacaaatctatacatttggaaaggagtctttatttcttataaaaggttacagcctgcagagtgactatccggacaggctgagaagcacagcctctggcagaggctgaaaggtgggcacttcaagggaaaggaagatggaacaggaatttatgctgagctggttggccaaatatacatattccacaggttacaggaggagctatgaacatttatgaagagggtcttaatgtatgcatactgaataaacatgcatgttatgtgtgacccatgttcgctttggggtgagacttaacatttatatgtgcttcagttaggccctatacatcaaaaggtgaagcagggacaggaatgcattgtagtgtgcagcttcggtaaatcgtccagaaccagtccatggttgatagtctcttaccaggagaaagatgctgaaatcagtctcttacgcaatcaaaactgtagttgtggctggtggaatgtgagttagttagtcagcatctggtgatggatgaactgtagttgttccaacattgctcatcttgagaccagggcttgtttagctgctagacaaaaagaaaaactttgtggcagttagaacatagtttattctttaaatgcaggggttcatgacttaatccttgcctggtgtggccttgggtcttgtttataattatatattttattgccacagtgtcagtcttttttttttttttttttttttttttttttttttttgagacggagtctcgctctgtcgcccaggctggagtgcagtggcgggatctcggctcactgcaagctccgcctcccgggttcacgccattctcctgcctcagcctcccaagtagctgggaccacaggcgcccgccactacgcccggctaattttttgtattttttagtagagacggggtttcaccgttttagccgggatggtctcgatctcctgcacagtgtcagtcttatgatctctattttaacattgattctgttcaattttgtctaaacagcaaaaggaaagggaatatagtgaggtgtgtaccacctcccatcccatcatggctgcggctcagtttttaaggtttctctggggtccccttagccaagaaagagtctgtacagttggttgggagtggggtggggataagattttacttttagttctcacaccttattcactacctgtgtggttatgctcagaaataaaaataaaataagtttagtaagatttctttgctattatagccatcagacaccatataatacggagaataataatttgttcagtttatgaaatgcccttcacacacactattgtttaatcctcatcttctggaatgccaattttacagatggaaaatgcactgagagggttcattagcctccccagtcacagctctggaccaagccgacctgggttcaaatgattgttctgcatcctgatagctatgtagcctagagctagttacttaagttacctgagcctcagttttcccatatataaaatggacataacccttaaaggtgatagagcaaatagaaactgctctagatttgtaagcagtgggagcttactggaggcaattgggtacacaagcgagtgaatgactaagaagccaaacaaacgacatggtgaggcaacccaggaattaggaacagtagaaaactgccaccacaccaggagctggaggcacatggaggaggaggtcccatcagaacccagaaggcatcagcaggtgctggagccatggaggagactcagactctcacctcaagacagagagagcacaggagacacaccctgacatctcccctcctcctgcttccaatcctctctttggccgaacctacctcgaagtcagagagcagaggagcgtgggaacatggcttcctgtggaacctgacagaagattctaggggtgcaggcaataggtctgagaacagccagtctgtcaataggtggagttgctgagacaaactataagtggttgttattcccgaatggacaacaggaaacacaagtccagattctttgactcctgttcctcctggtccttcggaattgaatgggcaacgtgaacaaatctgcagtgtaatgttatgctctgtaaccaactttgtctacattgtagaacattttctgctggttattttttcttaaagactaaaaatatcctgtcttctcttaaatgaggcaacacacatgtgggttagggaatttctagaaaactagcttcctggagtaaatttgtatcgcagttaacaacaccaggtcctaacttttggagcaaactcctcataaagcagcatgttctcccatgcttgaagcttagtctggaatctttgggttagagggaatgactgtttggttcatggctgtatctcacttaaaacagtgcctagggccaggcacagtggctcacgcctgtaatcccagcacattgggaggccaaggcgggtggatctcttgaggtcaggagttcaagaccagcctggctaacatggcaaaattccctatctactaaaagtacaaaaattagtgggtgtggtggcccacaccagtagtcccagctacttgggaggctgaggcaggagaatcgcttgaacctggaaggtggaggttacaatgagctgagatggcacccctgcactccagcctgggcaacagagcaagactccgtctccaaacaaaacaaaacaaacaaaaaaaataaaaaaaatggtgcctggcaccttgtaggcactgaaaaactctttcaagaatgaacaaaacctggggtcgcctatggctctgcccccctacttaatgccaacatcaaatacctgttgcgtctacttcctgcttccgctggcacccctccacttaccttcccccgagagtcagtcaaagacaccatcatgcctcccttgagcacttcagcaccctctgactggtttccttgctccactcttgtccctctcaaaccattttccatcttgcagacagactgatctttctaaaatgtaatctcaccagatcacttaagcttttcaatggctcctgccccatctccatcccctccctaggacacactctacatacctttgcacagcgttggaggtccctttgctttttaccctccctgggtcaaatgcttcttctgccacaggtatcctgagtttcctgccattccctttatgcaccatcctttccttattccctcagttggttactcccccagctgggaagacttttctctaccttttccacctttaagattgtatcccaaaaccacattctctgaggaatcttcttcaacttccacagacactgttagccacttcctcctctgggtttccacactgtgttcctcgtgaccagtagtcccaggaagaggctggcatgctgtaggaatgtttaaaatgcatgcacatttcactgaaggggcttcacagtcctctttctcagaaataagccattcttagggagaaattctcctatctcaatgctgttcgtattttctctgaagttcatgttatgttcttacttcctgtgaatgccactggcatcatcctgagacagggtgtcctcatgttcacattcctgccttggttagccatctaagtggtgcacttcttaaagccagggaccaggtagtcagcatcaggtgacagccttatgatttctttctgattcactcaaaaaacctagcacgatgctggtttcatgtatatcccacaaaattacgccttacatttactccaaaagaggctttaagtgatgtaggaagcactgaaagaaaagtaaaataaaatcaaggtagaaaagacaccttaacaagtacctagcttccatttgccaaatatttattgagcacctactacgttccaaacatcatgcaagctgctgggtatacaaagttaaacaaaactccatctctgtcttcacaaagtttccccccaaccctacctaagtttgcctgagctagaataaacatggccaggaaggtctcttttctttaggaaacatctggaaatatgtatgtaatctgccaatggcaacttagcaatggaaagggcggatttctacagtcctcaaagagatgatttgcttttgaatacttgtgtttctctcctcttagttgctatcatccatgatttctgtgcctttttgattgtttcttttttggtggtggcattttgtttttgtagctggtaacctggtatttctaagagttatttggtgacttattcccacttggtctcagcacactccctttccatcctaagactgttagcacaagttttgcttccttttccaaagcaactgtattcacacttccagcgctgccacatacatcatgctgttaccttcatacttcaagggcccatttggaaatagattgattattttgaacatgaaaggtgcgccttgggaaaaacaaatgaatcaaatggaaaaatgaattaacatcatgaaatttaccttctcagctgaagacatgatagattcctgtgttccttagagacagtcctcttataagaatgaactcttaagggaagtctgcaggtagatggagtcagggctcagcttaaaatgtgtttatataagaatggaaaacaccctctgaggaagaagcttagaaataaaaaagtttctttcttgtgaggggtgcttggattgaacacccagattgctgtgggcatctcattccagagcttctaacatctctatgatgatcttagtggggcttgccatttgcagagagctcagttcagcctcactgacatttattaggtaccgactgggtacaaaacactgtgacattctatgggagctatacagacatattagacaatgtcttcagttcagtttaacaagcggaatagatatctaagtgaataaggagaaaaatgtttgtttgggcttttctggcaaataattgttataggaaaaggggtctcgatgcagaccccaagagagtgttcttggatctcatgcaggaaggaattcagggtgagtcacagagagcagtgagaagagatagtttattaaaagctgctccattacaaagtagggtatcctcagaaagcaagtggaggaatgcgctgtcattgttttaagcttttcttacataggagtcttgtctatgtaaagactaaacaaagctgtgcttttgtgtgggtaggatgacagcatgacaaaatttattattctattgatttaaagaaaactatccttgacattttagtgtgtgagtatatcaaagcataactgtaattctcttgaaagtatatatcattatgggtattgggacatctggactttctgttgttgtaggagtttgtccttgcaggcattactaagttgtttccttagctgtcaacatcttaggaccatgggttttgactggcaaggaaagtgccttgctagttttcagatgcagttgatttaaaaaggttgtgaccctggctctcctacgttcgtttccctaacgatatggccagaagtcttcttattactaagtatagcatatgaggggcacagactgcagccactggacttacagatgacatgcccaaaagaggagagaagtgggagtgtcctgagttatcagcttctttattttggagcacgagagggagcagtgattgatagatgtgtctactcagtcactgataccaaccctccttgatggcaagtatgttcttccaggtcctaggcatgagagaggtggagtcagaacagttctattaggaacaatattcaaccatactgaccataccatgtgctatttgatgtcctttctagactacctgggaacctaatcaccacctaggacattgtatttttaatgtaaaaatatttcaaagccatcaactaacccaaaagattaattttttaaaaggcaatgaattcttctagtgggcactaccaatgcagggctttgcgtgcagtgggctctctggtctgtggaatgcattgaaaggttgagaggacattttccccagggtcacatagcactgaatttgagctgtggctagatttctctttcctatcttgtgaagaatactaatatcaagaaactgtgcacaaagctcaatcaagcctaggtagctaaggttggaaaagagtaacatcacaaatggaattaaagattttcatcttcttcctcctacatcccagctggggggattaaggtaggtctgtgtaaggagagtgaggccctcagtaaagggacaatgagacattcgaatataggcatatggtccaagcggcttttgccttaaaaacattagttttgtggcctcaataataattcacaaatggaagcaagcactgaaactaagagcatatgttaatttctagatcacttgggaagatggcactagtttttgataagtgtgaaaaaatgcaattggtaattataatatttcctcatgtttagtagtccaatttcaaaggctgcaattattaaaaacaaaacgggattcctttcttggatgctgtctttcccgatgtctttttcttgccctgatgtttttaacgcaaagttgcatgatttgggggagaaaaacacatctatccaggcattatatactctaggcaaacacgtgcatggaggttccctgtatggagccatgttttccatccagattgggccaaggatagctgatgggcagtcatggatgttgatggatgggttttcccagggtagctggattgtggtctcgtaaccatgccgactcctggggctgagaagggctatttagtgaaatgaaatactactctgtcacaacttcctcactcacaattcaatcatggagagtacttccccagtgctgtcactgaaatcattacattcagaattaaacatgggtgtaatagagcagtccctgaggttctattggcacatcaggttccacattcctaaccagctttcccatacaggaatatgaaaagcctgccaatcaggattctttttccttcctttggaattaatctcaccactccctgtccctgataacgcttccataacctgttcccgggccacgtggcatcagcgtatcagcaggattgctcagccttcaccctttggtgtctgacattactttggaagtcttcccaatgcaaatcacaaaaaaatgagttggcccagagagaccctcatgcaggttctctccacctggtcttccttctcttcactcactcagttgttacctcctttgatccacatttctggctcacacaactcttatccacggcagcatattttctcaatgtcccttttcctcatattcctttggactttccagttttattcttctcttgtctcctttcatctccctagatcccttttgccattctccaccttcctccacagaggaagcatgacatggagcaaagagaacaggcttccctgtccccagttctgtctccacttctgcctagctatgtgatgtgcacacatgacgccctcaccaagcctcagtttcccatctgtaaaaatttcctcacagaggttttgtaaggaccccaagaaataaaacttatttcctgtcactttatttgcatcactatgtgaactgccttggcaactctaaacaacttttgcaatcttaaaattgaatattttagccatgaatcataaaatcaataaaaagctacaaacttcctatgttttcaacaccccctgagactgtggggaatttaggcgactttaaggaaactaaaggttgacctactagtagtacagatgtttgcgaatagtttagaaacatatttctccttggaaggagaagctaggtgatggtattttcttcttaggctcaagtgttagacttcaagagtctgtaataaatcgctccttaaataaataaaatgtgaaatcctctaaggcagatgttggcaattgtttactgtaagggccagctactgtgttaggcgttgcagaccatagggactctgtcacaactactcaactctgctcttacaagagtagggttgtattgtagcacaataatacacaagcaaatcaacataactgtgttccaattaaactttatataaacagtaggtaggctgggcgcagtggctcatgcctgtaatcccagcactttgggaggcctaggcgggcagatcatgaggtcaggagatcaagaccatcctggctaacaaggtgaaaccccgtctctactaaaaatacaaaaattagccgggcgtgatggtgggcgcctgtaatcccagctactagggaggctgaggcaggagaatggcatgaacccaggaggcagagcttgcagtgagccaagattgcaccactgcactccagcctgggcaacagtgcaagactccatctcaaaacaaaacaaaataaaacaaacaaaaaaaaaaacagtaggtaagctacatttggcccgcagactatagttttctaaccattgctctaaaggatgaatggagattacattgatcattaacaactcagaaaatcagaaattatgattgaatgggaggtttcaggtgactccatgatgattctggaattattaaggcttttggttactaataaatggcaacccttttttttttctttttttacttctacaagttctcctgatggaaaaatcagtcagctcaaggttttttagtttgggatgaattggcctttgaaatagatttgggctttgataggtttgttggcaattggtaaacccatcctaatttcccacagatggagcagagaaggatcacttagaggaatcagaaagcccaggacaacagggaagtaatgataactaccaattattaagctgccctccccatcacaaactatgaccaccatgatctccattttgtagaagaagcaaagttttagttgacaggggatgagtgctttgcccgagatcacacagaagtgttagagccagctgaattgctttccccttagccacaatatctcaatcaacacaagtaacgtactttccttgggacattcacctttcttcagattcagaaccagagagcaaaaaagaaatcaccccttcttccttctgcctttactttctagtagaagttatacttaaaaaaaaaaaacaatttgccaggcatggtggctcacacctgtaatcccagtactttgggaggctgaggcgggggggaacacctgaggtcaggagtttgagaccagcctgccctacatggcaaaaacttgtctctactaaaaatacaaaaagttagccaggcatggtggtgggtgcctgtaatcccagctacttgggaggctgaggcaggaaaattgcttgaacccaggaggcagaggttgcagtgagctgagactatgccactgcactccagcctgggtggcaagagtgaaagtccttctcaaaaaaaaaaaaaaaaaatgagtgccccctcagccagcccctactgtgtgctaagcataaagctttcattatattataaaatctattgtctttttatttcccaaactaaactgcaaagaatcaagaaaatggaagctaagacaagtaagtgatttgcctgaagttgcaccagtagttaatagtggagtcagaatttgacatggttctcatcaactccaaaacattttcaactcacacagctgccatagagcttagaacaggccgactctcaaaccagatggtctgggttcaaatctgaactccactatttgctagttgtatcaccctaggtaagttgcttaatgactcttagtttcctgatttgtcaaattaggatgatgataatggtttccttctcatcttttgttatagggaataaaggggtaataagaacatggtaagccacatgctttggctttttctgtggaatatcagctctatgagcacagaagttattgtctgttttcttcactgttgtatccttagcacttaggataatgtctagcacatagtaggcaatatcaatatatgaatgaaaaatgtcagaagtagtctttaaattaggttatgactggattcaaagtcagcatgaaaaagcatagctttccttttgctttactatttttgtataacttggatttgataggtgaaattcaatatgagtctttgaagtcttaatttaaagtgtaacagtggaaactagtgattgtcttcattctttccatgttcccaacaaaagtagaagttagtacaaaggtgaagcttttaaaacaaaagtggaagttagcacaaaggtgaagctgaggttgagcacataacaggtacaaagagtgctttcagatgtacttctctagttttttgctattccccaaagtgcatccttacataattagctttaaaattcctttcatcccttatttttttttaaatctatcattaacacgtagatttttatctctaagtttatttttactaaacttgcatctttttaaatacgacgtattctgaatctaaatcagtatttagtgacaacagctgctgggaaccactgtaataaatgaattatgggtcccatttacctggcaagattgcctttgatgtctacacgtcaacagtgaaaggggttccagagaaaaacaaagcctctggtaaaaagggcaagctcatcccaagattgagtatgcacgaagagggagcagaaacaggagatgggtgcctctggaacaaacatgcttatgcaggtgggtttatggaggggctcctgagagggtgagtcccatgagtcttcaagagcattacttagatgccatgggcacctaggcagaaaacaatgtttaaatttgtgctggatttacaagtatatgtgatattcattctgagtggtataacctatatccctaatagcaaagtgttgaagttctaatctttctcagtggtttgcactgtgtaaattattattttcattaagattaagcatcctcacagaattgcacagcagtaacttatgtaaccacctccttagaatgttctctctctgacaatatgcctaccaaagactcttttaaagatctttgaaattagtaattagggaggttacaatggagcactgtttgcttgtcttaatgtggaatcctctacatgctttatagaaaacaaatgaagtgaataagttttgctcttgaaggttctcctgcttacaatcaaagtaatttgcagacttgcctgatttgtatgtttcttcaagtcaagaataattctaatggattactcctgtcccttcagctataagataacagagtgagaacaaaaatggcttgtgaaatcaacctaacagagtatttcttctctcttctcataggtcgctacccacaggagaacaagggaacctacatcccagtgcctatagtctcagagttacaaagtggaaagtggggggccaagattgtcatgagagaggacaggtctgtgcggctgtccatccagtcttcccccaaatgtattgtggggaaattccgcatgtatgttgctgtctggactccctatggcgtacttcgaaccagtcgaaacccagaaacagacacgtacattctcttcaatccttggtgtgaaggtaagaggcagacatttagttttctcatttaaaaattcacctatttggcggggtgccatggcacatgcctatactcccagctctttgggaggccaagatgggaggatcgcttgaggccaggagtttgagacctagtctctaaaaaataaaaattaaaaattagatgggtgtggtggtgcacacctgtactcccagctacttgggaggctgaagtgggagaattgcttgagttcgggagttggaggttacagtgagcaatgattgtgccactgtactccagcctgggcaacagagcaagactccgtctttgaaaaaagaaaaaaaacaagctcatgtatttccaatacatctctttttgaaggggtagtaagattattctaaatacatatgcctctcctacatataccatctttaatgattgaaagagaaagatagaaaattcatcctccatgtgtatgaagataaaacctctatatgtgaagtcaatgctgctatacatttatttcgggattaattggagattgtctaaagttgcagttagttatttgtggagctattaattgcagttttgtaattaaaagtaattgcaaaaatcacaattacttttgcaccaacctcaccaacctaatatatgttgacagtataacctctgtacactattactctgtaaacaaattgggcttattaagcttgattatcaaaactattagagtctataactctgacttcagaaaaataaaataaagtcgacgctgttcatagtagaactaacctctctatccccctactttaagaacagaaagtctgtatatctaaaggattccacaaagttgtttatgtgcatagtgggtgcaaattttgcaaaccataactctggatgtgcaaagatgtagctgtactttaatataatataacttgatctctagtgctattttcagtcttcctttctgtctgcggcagaagcttaatctagttatattcaaataaaactcagtcaagttcaatgatttctctatcaattctgttttgtgcctcagtcacacatagcattttctcctcatcttcatctctgccctttcatacctctcccctgctcccacactttgtacgaagctgttttaagttccagaggcagatgcagatgttgcagcagcatcaatgtgggagagaccacttctaggtcctaggaaataaggcagtgaaagatatgaaagctcacatggggcaggagacttcccatggcaccctaccccatatgcactgctctctaacatcatccaaaatgagcccatattattgctgattttgaatgatccttgtatgtgaaagtcacatttgaatcagggttaatctgtcctagatatagataagtgcacaacaatatttgctactcatctagaacatacaccttggtcctactgatcttttctttgttttatatttatatttatttactttttgtagagacgtggtgtcactatgttgtccaggctggtctcgaactcttgggctcaagcagtgctcctgcctgagcctcccaaagtgttgggattacagtcatgaaccaccatgcccagcatggcttgggaattacctgttccactagtgttggcaaaaggcgccaagctattcctacactccctatacatccatcctcatcatattgtacccaacactcctatctatgagacagatattcaaggtaaatggtaacaggaaatgttaactgggccatgtgcagttcaaaaaatgaactcttgatagtaatcttaaaaccagatgtgaggcatttgcaactggttgatggggtgatatttacagagatgaaaaatactgagaggatcagagttacagatatataaattaagattttgaatatgttaagttggagataaccatagatagacagcagaaatgacaaataggtatgtgaatctggagaagaaaatcagagatatatatttgggagttatctgtacctagggagaaaatatagataaagaaggaaataggatatagtatctagccttcaggaacaccatcatttaggagtccagtagagaaggagtcagcaaaagagaatgagatggaagagtatgtaggaagcaacctattctaagaaaattgtatttaaaaattcatacttatcaatcaagagtttgttattgactttctttttattacaaaaagaaaatcctaggctacatataactgttcagaactctaggaaatttcaggaatgctataatttacccagactttggtttgtttgcaacttttctggattatatcatgtgtgtaaatgggatatgtgtctgcattcatttcaacttatgtgaccactcttcttgacgggaaaagggttagttaagttgcttgacatattaactttcaggataactactcaggaggtggacaatctaataaccttctaattgctgccttgatcttcagttgtatccatgatgagcagcttccagatacctctgttctgaaaaagtcacttaggtctggaggcgttcttgttctagaggctgtacagggacctcccctaggttttcagttcatggaaaggattggaggaaggtgggacaaaaaccagagaccaatttggaagctgtggtctaggacaaagatgatgataaactaaacatggtggtaccagtggagatgagaaggggttagattggagatctattttgtatttagaacaaaaattgcacagggattcaagatgagaagtaaagaaatgggaggactcaagaataactctagatttcttgttagaccaattgggttgatggcggtgccattttcagagctgggaaaactgtgggaagtggaggggaagcactgggggtgaagctaagagttacattcagaaatgttaatttggtgatgtctatgagacatgcaaatgaaaacgtcaagtaagcacttgaataaagtgaatctagaactcaaaggagatggctgagctagacatgtaaacatgggcacggttaggagcaataacggacacaaatgattcagggtcattaacaattaagagttgagacaaaggagaagtcaacaaaggaggctgagcaggagcagtcagtggagcgcaaggagatcaaaagagcccagagccagacacattgatagattcaagacagcagtcaactctgtttaatgctatgattagttgaataggataggggaggaaagtggccatatagtgtggaaatatggatgtcttcgatgatcttgaaaaggacggtttcactaaagtgatagagacagaagccagggagatggtcatgggctgtgttgtaaacaggaggcgagaaagtagagacggcgggagatggcacctttctcaagactttctgtagcacctagatgttgaagcgaaggtcaaaggagaattttttaaagacaagagagagtgggtgttattttatggtgacggagaggaaccaggaaagagagtttgcagtccagagagaggacggtggttcacagccttggctgcacgttgcaatcatctgggaagctttgaaactatggatgcttcagtcccccatgcaggcattctgatgtaattgctctggactgcagcctgggctttggggttttttaaagttctgcaggtgattcttggagctaaggttgagaagtttcaggagtgaaatccttgagtggttggaatccagggaacaggtgaagaagggcctgtgatgggtggggctatctactctctccagagacaggagtagagtagaagaagaggggtgcagattttccagtttaatggaagaagaatgaggtgattgccattttgtgactcctttttttttttttttgtcagtgaagtgtaaagcaaagtcatgtgttgagaagcagcagcaaggaagggcatgaaacgcttgatagggaagatgtgagctagtcatctggagggtagaaggtgaacttattacagggacatgccgggagggtgctccctgcttccagaacacagggcaaactagcacaatcttcttcattacttggcctgtggaggcccaaacatctctgcaaattctttagggatttctgacttcatggctgcctctgcctctaggagtcctactcacacttgtgctgctgcaagtgagaaacttgaccgtcaccttcaatttcaatgttggcaacaacaacaaaagcagccacacacaacatctgtgaatgcccagaccttaactgcagtttgggatggagggtgagagcaggaaggatgcactctgtggtcaccacgcttggagcacatcagaatcacctggagggtcaccacgcttggagcacatcagaatcacctggagggtcaccacgcttggagcacatcagaatcacctggagggtcaccacgcttggagcacatcagaatcacctggagggtcaccacgcttggagcacatcagaatcacctggagggtcaccacgcttggagcacatcagaatcacctggagggtcaccacgcttggagcacatcagaatcacctggagggtcaccacgcttggagcacatcagaatcacctggagggtcaccacgcttggagcacatcagaatcacctggagggtcaccacgcttggagcacatcagaatcacctggagggtcaccacgcttggagcacatcagaatcacctggagggtcaccacgcttggagcacatcagaatcacctggagggtcaccacgcttggagcacatcagaatcacctggagggtcaccacgcttggagcacatcagaatcacctggagggtcaccacgcttggagcacatcagaatcacctggagggtcaccacgcttggagcacatcagaatcacctggagggtcaccacgcttggagcacatcagaatcacctggagggtcaccacgcttggagcacatcagaatcacctggagggtcaccacgcttggaacacatcagaatcacctggagggcttgttcagccacttctgtgcagcaccctcaggttgagtaggtctgaggcctggcctgagaatttgcatttctaaccagttcctgggagatgctgttgctgctggtcggggtcaacacttagcggaccactggtttcataataatcacgaaacaataaagctgggcatggcccccagagcagcctgcggtcccagctacttgggaagctgaggcaggaggattgcttgggcccaggagttcgaggcagccccgccagcctgtctctaagaagaaagaaagacaataagcaataactttaaaactcaagaggcagggccgggcccagtggctcacgcctgtaatcccagcacttcgggagaccaaggcaggcagatcatgaggtcaggagttcaagatcagcctgatcaacatggtgaaaccccatctctactaaacatacaaaaattagctgggcatggtggtgtgtgcctgtaatctcagctactcaggaggctgaggcaggagaactgcttgaacctgggaggcggaggttgcagtgagccgagatcgtaccactgcactccagcctgggccacagagtgagactccatctcaaaaaacaaaaacaaaacaaacaaacaaaaaacctcaggagattataatttactcttcttaaaatttcactggctctaccctgaacctaattccagtctctctcccttaccaccccttctctctctcctactgttctcctttattctctgaacttttctctcccattctgtcccaggagcaaattctccttccttaatgcagagggatccagtgagctttattatttttgttgcttgatctcttccaacaaccatgcttttgggccctgaacaccatttttttaaatgaagtgagagaaagagttcatctccccacttattgtgtggtttcccggcctagcacgcaaagcataacccaaaaaggggatgatatgatgaaccgctccccccaacacacacacaagcacatacactgtagcccagcagtcccctgcagttttatgcttgtgtgtgtgttaatgcataacaaaggattcagcgctatggcctggtaactggaaagtaggtcaaaagagaggggtgagactgtcgcccaagtgaaaaagatagcagaagataagaaggaaaactgtttccagaaattgtcaaaagacagccaggtgaacaagattgtggcccgaggtggcacaggatgctgggctgaaaattacagcagcatgcacagcacttattgataggagaatgctcagctgtgctcctgagggcccttcagcctgctttgcattcataggcaatttatcctccttaatcactaaatcattaatggggatcaatagcaatgccacatcagtgaaggcaggggtgcatgcggggagaataattgcttgcttagtttttagtttagtggtgctaaccgggcttcgggtccattctgggaggaaacccttctcctgggtgttagagagaactgtacccacaaaggcagcaggagtgagacgggcagttattatgaattcatcatgtttttctaactactcaggaactctgaactattgaatgtatttcactatttaaatatagaatgttccagtttggtagtctagcactagtgccagatagtgggtcctgaaagatttagatttctgatatctgtgcctagtactctggagaagcagtgagcagtatttttgattgggcatcagttacctttaagggatctttctcctcttgataagttgttcccccattccattctccatcactgcttttccctcacctcattcgacctcatatccttagcctctggcacacttgaggtttaataaatgtttgctgtgttgatttaataatcccaagtaaatactctaggttcgccgcaccctgtcattacagataacttgtaaatgtaatctcagaccttaccatcttgagaaaagtcaaaaacatatctggtgtgctgggaggagtgtgtctgtgggtgatgtgtgtgtggatttctctatctcttagcatctgacaccaaattagcatctaatatttcctttttattcaatgtgttttttcacttttctttaaacaaataaatcaatttaatttaatatgaagaaatcaatatgttcccaatatcttggatgcttttaacagcaaataaataaatatgacctgcttgtattttatcattaaattcatccttagccaatttgctttgtatttatataaggtctttttagcccctttcatacagaatggagtaagtaaccaagactggtgtcctcagagtaacaatgacccacattccttctcttggagactcttgagcccagaccagcatttacgccctcaggctagagccattcatccatcaatccacaaatattgatagtatgtcgcatcccatgcccatgacaacacaatgacctgtgcacagtacgacagtattatgtattcattcagaaaaattcaaagtcaatactgaattaggtactgggactatggcagtgaaaaaggcagacacaatcttcgtatagcttctagcaaggattttacaaatgagctcctaataaaaaactgattacaattgtaaaaagtactaaaataagtcagtgcacaagaagaacacaaaactggggactccgacctatttggggaacgaggagagactggccagtggcttagctttgcaccttggctagcacccagaacagtatttgcataggatagtaatcaaatagttggttaattgaatttttatgaagttttaataaagcttatggaaaaattttaacctttatttactcaatattcctcttaaataaaatagtatgcatcattcttcctagtatctgagtcattagagacttattatgctttttatgccaagcgaggatcatttagtgtggccctgtaatcagaaaggatcccagagagctcacagtaaaccttcttttcaatggcatgtaggtgaccccaggattgaggtgcaaaggtctttacaaggtgtttctagaaagagcatggttggaagtgtctaatgcagagacacattcacccaccaattcatgtggtttacaattccttccttgtagagtctcttatatgcttcaaagtgtgctcatagtcagtatctccctagattgtgtgtttggaaggtgtaatccttatctcattcagcctttcgtggtgcctggaattgagtcaatgttcagtaaatgtttgctgaactgaactgataatcaccattctgagaggcaaggagacgattattagactcagatttcaagagagaaagcaggttctgtgatgttacgtgcatttctcaaagtcctatagaaaattaagaaacaaactgaggctaaccctggagcatcctgactctgtcaaggtaagcacttatatttttaaaacaaaagccatcagtatctggcattgtgtaacaaaagaaaaaaaaccaatagatggccagccgagaagattctgtaatgacctaatcaacgtggaaatttctgccataataaataaatacataaataaataaataaattcaggttgatatttacaagatcaaatgaaagctttctctgggaaaaaaaattaaagcataccaacaagggcacaggctcccttagaggatatgtgctaagtaaagaagctctgacattttctttgtagaattgcttcatgaataatagtctatcttctgaagatatctcagtacactaaaaagcccttaaccagcaaaacaggcaaattagcacaaatccagtaaccttctcaagctggtgtgagctgtaatgcagcatgtttgtaaggaatgtaaactatgttgtactatgcacgcacggatgattgtgctgtcgtgagcactgtgggagatatactatcaatatctgtgaattgatggatgaatggcagtagcctgagggtgcaaattctggtctaggctcaagggtctccaagagaagcggtgttagtcattgttatttcgaggataccagtcctggcgaactactctactttatactgaaggggctaaaaggaaagaagcaaactcaactgactattgaggaaccatttgcttgtgcttcatagattgattccattccagtgttactagataggcaagcaacgtctctggagtggctatatgaaaccattttaggaaggcagtgcgtttggatccttccagaataaaaagctcagactctaaaaatgccattccttaatatgctcacaattgccaccgacaggaagttactcctggtatgccacagcacacacagcctgttagaatctgccaccccttttgatgtactttgtgatggaaaaacatatcatggtgacaccagtccggagtcacatttgctctgcagatcaagccactccctctaagagtgattacacactcccagcatgaatctttcctctttttagtggtgctcagcttttatataaagggggaagcaagtgtaagtgattcctaatcccctcgctctaaattccttccttccctaaatggtgactcattttgccttttggaagggccaaaccattattccttctaaaggattagaaacaacaccaaactctggtttaaactgttgaaagagaccatgtaggttagctgttctagcaccatagttttgtttaattcctgggctccctttgccagacttgagcctaatgaccaaggaaatggaacttgctctgactttgaaatagcatgtaaataagcagaaggaatgtatcagcccatgcaatgatgaatgatcttccttctcacaaagaggttatacagatactaaaatcagtaggctcagcatttgtttttacatgtttgttataaatccttaccttctctgggtcgggaggacagtgggaatgtcagagggtgactgaaatccaccccaaattttcttggcccactcttttcttttttaactacccttccattcccaccagaggaacagtaaaataaatgaggtcattattcttcactacatgcctcttgtaaattgttagtcagcctgcaagggtggttatttacgaggcattttgaaggtctgttctggtgacagagttgctctgggcagtggatggaggtgctgtgtcacactcaccaatggtgccatgtgtaatctgtttttctcagagttttatcgtaatggtggttgtctgccagaggtcacctacgatcaaagagttgtcagttggtccaaggtgcagccgctcctactctgggagctgtctagaccttatttctcccctcagtcctcagttaagtatagtttccagctcccacattccacacaagcctcatacacgtctaccttctaccagtccaaattgttgggtttctagaatagtgagttgtttgttagtttgtttttcctattagtcgagccttccattttactaagtgaagaactagcttcccctgaaacttagtgaaaccccaccgctctgaagctaaccaaaaatttaaaaacaaacgaaaacactatcaaaaagccaacagcaaaaatctccaagggcaaatgattacatttttctatttttgttagccttccaaacatagggagtttttttggagtttccatcgtgatacaattttttttaaccttgctttggacaactatattttaaagtgacagatctgaataaaaacgggaaataaagcactgctttccaccctcaatcttctttttaaaatcataaataaatttaaaattaaaatcgagccttcccatttgacttccttgccatactgtggattcatgataatgtctgcctgtttgaggtgagatttaattcaagtgttggaagggaaagggtggcctagtctggagctccagaactcctctctatcatgctttgccacttaaatttatcacttcccatcaatactaacgcaaagcccaaaggtaaatccttcattttcttggacttcttccttactctctaagctccagacatcttccccatctctcattctttcagtacacattgattgatttcctaccgtgttccaaggcacagtgttgggggctggggacgcagtcatccgatcctttggacccaagagccatggactacttagaaggcagcttattcaaatcctagcttcacaactcactagctgcatgaccttggaaaagttatgtttctctctgcctcagtttcctcatcagtgaaatggggctactttcctcacaaggatgttatgagtgttgatgagttcatgtgtcttgttataaagcacttagaaagttcctggccataaataagcagtataacaatgcttatttacatgctactacttaaaaaaaattaagaagtaaatacttaaacacatacttattcaataaatataatcattaaacggcaatgtccatacagtgggataaatgttacccccgcctccatagggcactaagggaacaaggtttaattcaatctgtgctggaaaggaaagggttcagggagacttaaagaaggagaaaaaagttgtgttgaaggactctgataataaaaaagagcacaaccctatattgctcttaaagaaaaactaatgcacaaaagttggacttgttaatctctttttaaatgggtagcttcacttaaatggaaacacattttagaaaataactttatctgatggaaaagtctcattatagaaataaaaaataataaaagcataaaaagagctcaaagatctacaaattagagacactaacaattaacattttgttgtaatgtcatccatttaaagtattttcagtgcttttcatttttaattggcaattaattgaatatattgttcttttcaaataaacacacatgtacatttacatggctaaaagaaaactttccttttcaccaatcttccaatcctagagaatccccagggaaaaccaactttaactgtgtatatcattacagatactttgctatcattttatgtattgatggcatatatatacctagagaatttaggttttttaaaaccacaaaagagattgtgtcaacctgttgctctgtacctcattttctcactcagtatatcttggagcgttttctatatcagtacctgcatcttctttttaatggctgcttggtatggtcatatcatgttgttttggtgttttgtttacaactatttggattgtttcccatttttactatagcacgttatgccattttgaaggttgcacatacattttgtacaaatgttactgtagaatagacatctagaaatagcattgggcaaagtgaattcacattttaaatttgcatagatattgcctaattacccttctaaaaggctgcagtattttacactacagccatagtagatgagagtatccatctcttcataccctcattggcactggtggttaatcatttgttttaatatttgccgatatggtaggagaattatggtatttcattggtatttcatggttaatttggtttttatgtctctgattgttagtggagttgagcattttttcatatatttattgaacgttatgtttctctacctgcttatatctggaacatgtcaggtgaaataaagatcgtcagggagagacacacatgtgcctcttaaatctatggatacagtttgtatatagtaggataaagagatcttactgacactttttttcttacatagataaccagctgtcaaaacaccacgtattgatcagatctatttttacctattgattttaagggccatctttattatttactaagatttaatacacatctagctccttccatatatttgtccattactgtgctaatgtcagttttaagtgtagctttgtttcagttagctataatcacactaatgctacattaaaaagaaccagaaaatcttagtggcatacaacaataagcacttactcagggatctggggcttggctgggattgggctcatccagactgggcttgactagccagctctgcttccggtgggaacagctggagaggatccgtctctccctgagagctccggagaccctctgctctggtgcctctcatccttctttgaccagtgggcttgctgggtcatattttcctcagggtaacagcagatttgtatgatcacatgctcagctgcgcagtcatattttagacccctacttgcttctgctaacattgcttctgctaacaccccattagccaaaataagcctaaagttaagagaggatattccacatttagagggaagaactgctagttacatggcaaagggcatagatgcaggaaactataaattggggtccaaagtttaatttacctttgggcaagtccttcaatctttcttctttttcaacatattagtttttggctattttctctctctctctctctctttttttttttttttttttttgggacagattctagctctgttgcccagcctggagtgcagtagtgctatctcggcctcctgggctcaagcgattctcctgcctcagcctcccgagtagctaggattacaggcacacaccaccatgcctggcttatatttttatttttagtagagatggggtttcactgtattggccaggctggtctcaaacttctgacctcaagtgatccacctgcctcagcctcccaaagtgctgggattacaagcatgagccaccacgccctgcctggctgttttctttcacattgttttttccagataagcttttgaatgagcatgcaaagttccaaaacttctgagtagaagtttggttgggttcacattggtcatatagactaatttgggtagaatttatatctttacattactgaatgttcacatccaattggaaacattttgtatgtgttcattttgtatttcagttttatatcttttgacaaagttaatttttcttataaatattttcagataaactcaaaagcagaaagagtagcacaatgaatatctacttatatgactctcagagttaatggttatcaagattttgccacatttgctttatctatcccttttttccttattttttgccttagcattttcaagtaaattctagtaatcatattattttacctgtacatattttagcgtgtagctttttaaaaatagacatatatacagtatacatagatacatatgtacatatgtgtgtatgtatgtgtttatgtgtgtttgtgtataattattgcagctaatacaaatcaacaagagctccttggtattatctaatgaaccatctttaattttcccaatgtctaaaaattatctttttagttagtttatttggattaaggtctgtagattaaatttggttggtatgtcacttaaatcttttcctctagagtaatcctcttcatctgtttcttcatgccacaaacttatggctgaaactgagtcattttttatgtagaactttccatattctgaattttgctgattccatcccccggtgtcatgaaatatttttctctaaccactgtgggatttttttttaaccactgtggcattttctgttaagcagctggttagatctacagactctgtcagattcagctccaagtggcattttttttttggaggaaggggcaaaaatatttcataagtcacgccattgcttcctaggacattcatcctggcagaagatacatatatttaggtttgtcaatagtatctggttcacgttttatcagtctcatccacccgttacgaagttctcttcttaacgaattatttctgcctcaattcgttacttcattagggattgcaagatcgtgacattctaattctaccattccttttgcatttattataatcaattatttcgttaccttgaggtagaattcgtgtaaaaacgcttagatgcctgtcccaaacacacacattttcctgagtgcgatttacacttgtagggtcctgtctgtgttaaagatgctttgctgctctcccaccaggcctgggaataagtaccagactgatgatagacggggaggatgatcctcctgaaattctagccacagggaagaaaagtccttgcaatgaaagacactggccagggaagctggttggacacacacacatacttgcacattcacaagtatctttcattaaaaggagatgacctactgcttccctcctgccagtgatgggccacaaaacagacatgacacgtgggccttctcacgtgtcccagatttgttttaaaaatcattttcaattcatctagttttctattaatgttaaaaggttggaaattatattttaattagtgttagagacgtacatcagcatcatagaattctgaaactactgatgcaacagaatcataaaatgtttaatgagacatatcaatttaattctgctgcttggaacttaaagagccagagttcgtcagcattttgctaacaaatgtcatcatttacagactgaatttggtgctgattatgttcaccattactaaaaatattgggaaatgagctatgcttggtgaaacaaagggcatttttttaaaaatttggctgattaaatgtagtttagaaacaaaataaacttgcataaacttgcaagtgtttggaaacagtctggtttggtaatagtcactatgtttaaaccctgatgcagatgatgctgtgtatctggacaatgagaaagaaagagaagagtatgtcctgaatgacatcggggtaattttttatggagaggtcaatgacatcaagaccagaagctggagctatggtcaggtgagccacttaaaatttgttattgtcaaggacatttttacttcatattttttgtcacatgtatccctacaggatcccatatatcgatattagacaagcacaatttcctgctttttaggatctgagactccaaggcagagagcataggagtagggactcataaagacaactgcgtaatttatcagctgaaaccacatatctctgggtattacagtgttacagaaatgagagattccatgaataatgtggcattctattgagaaatgctttggccacttagaacagtgaaatctcattagttcaacctggcttataaagaaaggtattttcaaagtgatgcaaagaatactgcaaggggtgtgcccaattcaaagaaatagcttctttttgtttttttttaagtgttagcctagggtactgctaattagaaaagagtgttatcatttcatcaaaggaagggccactgagcttttacatagaaagattttatcagctgcaagttgattgtctagacacaaagtagcaaatggcatttctttaagatgttcagtcattcaaactatttcagtttggtatctttaacaatggagcaaatgaatgatattttaccaattttccataaatgaatgcatgtcctgtgatttcaaaatgatttttaattagcgacacaagcgggggcgaatgtcatttctcaggagttttggctgggatggctggaactgtgcatcattgcgctgggcatccagcagggagttttcatggaatctggtggtcacagggtactttcttggctccggatgccttgctttgacttccatatgggatctccctgtgttccttacccactgctccagtacccgtgttatcctgcctacctggctttgtgaacagcttccctgactccggagaattacatgcccagtgctcaggcttccccgcctgcatttctaatgtcctgccaagctacaagctagttggcaccccctgttcttggattcctgcctgactccctggtttcaagccatcccctcctcagtgacatgcaacctttgactatactgcctactgcctgatgcccttgtcttgggtccccaatttctagcctttagcctggtgattctatttatggcccaaatatgacaatctatagatagctaacaaggggaaaagtcatcaaggtgggcagcaaggaggtctggaaaagtgtcccaagcccagtcagggcactcttcgccagcttgcctttgggtaggcaccctggagcacagtcacttgattgtatcttctgccactcaaagaggctattggtgtgtatcctttggccagaataaccagccaagcatgtttacagtgatgcagggaatcaatccgttctatgactatttccttaactctccagttagttgctatcctgcccagcaaacacagctgagagaagctgcttaataagaaccaaaatactgagctatttgcatacctgaagaactagtgcaattacccattactgcatccatcctgtcagtttgggatacacccagagtgggtattctaactggactgaataaagaattgtgtggtaattagccattatgattgtggtttctgtcacaagcacttgggtggatagcacacaaggtttctctattcaggaaaatctcttactacagtgaggtacagtataggtaaaatcttcctgtcttgctatttgatctttattcctttttaagaaaattctggtattgcctgtggctagcagttctttctaaggagactgaactggtaccagactcctcccttgatagtgtaatctactttctgcagccttctgccctctccttgatcctggggtccaccttgtctcagaagaggggaaaccttagagggacagtcactatatgaggtctcctactattttgggtgcaaactaagtagtgtgaagcaccttcctgtgatacacctgagagctctttattttcgaaatgcacgaggattcacattactttcgaggtcctaagactctggcctgactttggtaaatgattcattccttcttcttgggtacaggagccaatatgttgaaaagaccttctaaattgaatcattttctgaagaacttcaagtcagcttatgatccctgagtatatcaactctctagtatttctgtttatgtttctggcttgcttttatattcttattcactttaatgaaaaacaaaagaagatgtctcattccttctactttaatatttcatactaaagattatgggagatcactatacaggaaacacacatttctaaacattaggttgtggtttcatgttatttttcatcagagaatattttgcttgcagagtgaacactagtttctctttgtttttctttctccaaatagtttgaagatggcatcctggacacttgcctgtatgtgatggacagagcacaaatggacctctctggaagagggaatcccatcaaagtcagccgtgtggggtctgcaatggtaagcagcaattactgatacctaaaatctgttacacctgtcatttgcctcagtatatatgccagttcattaagagctgctgaaatgatgacttacacttaataaactttcatttgtaagattctagcttctgacacccagttatagctcctggaattttctgagcttatcatgtgctataaaacaaaattatcgtctcaatactgtatgtttctttggctttagaaaacaatgatagatataatgatactgtagaccagttattcttaagaaccccttgcctagagactgaggagtgatcatgacaaaaatgtcaatgactataatcaaacagttgatcaaccaaacatcaaggtgcacagaagatgtgcaaggcacagcttttctcaattttcacactgatagtaagagtgaagaaatgaatggctacatctcatcctaactcctgtcacaaggatgtgtcactgtagggctttctcacttacgaagtgggtattgattctttgcaggatcctgtgtggtaagtagggcagccattactcatgcacttttacaagttaggacacagggtaaggacagctttcagtgacaaagccacagctagaactccggtctgctgacttcaaatctagacattttctacttttcatgccgctctctgcaggatatcctaaaacaactttgagaatgcagagatcttgcagtggaacaactttctgagaaaggagatagaactcccatgagtgggaagggtgggccaggcataggacgtggattaaatgggatgtccaggacccatgcagtcctggattatatcaatgtacccaacatggagagccagatgttggtacagagaagtagacccaatctggctgaagagtagattatttctgaagaaatgttaaactgggtggtatttcaaacaatcaaagactgaaaaaaagaaatacttatattaccaatttccctaagttttctaagaaatcctctttttgaaagaatgttatgtttgagtttggtttgtatattcttttgagctaaatgaaatcaatattgttaatataaaaatattagactgtgaatgatatgaaatataatttctggttagcttttaagaatggtggcttttattttattaataactaagctacatgtgaatttaagaaacagcagagcataaaaagtaaaaatagaaaccaacatgtaaaggcagttttgtttcctatgcatttacattccataatgggaagccaatgaattccaaagatttgggggaatgttgaatttgggaaatgtttaccaaagtgtcatgaccgtttataacaaatatattagacttgcatctgatcactatttttactgtttcgcccacaagatttctctttttcttctttgaagttaccataacaattttgcagtaagaaaggaagcaacagctagcagtggttaaatttaaattaattccttcttaagcattctaaaatggcacactcatcagcataagcttactcacacactgtgtgtacttttacgcacccagaagtcagaaatcactgcctagcagaagccagtgcaaaagagaagcagacaggaagcagttaacctaatgtgtctgtggtggcagctggctaagcggaagctgttaattattgaataagcacacatactcctaatgcaaattgccctgagattttattaatcatgtaaagcctatgaagttctaagtttgaaaatttatatcccaattaaaagatttaaaactagacagagaaaatccatttggaaaacggtttggttttatttttggagggggagaatttgggtgttaaggggtagaggtcctgacctgagacattttgagcaatatttccatttccgtcatacccttgtttatatacacaaaatattcaatggttttcaaaaacactttcacctctattagctcctttaaaccttagaatacctctgtgaatctttccaaaatctgttccgttttaataattttaaaagctaaaatactgagcctccaaaaatcaatttaaaaaatgacacagaggaaagatcaagtgttctttggtcattcaggcagatactctcccgttcacaaatcctggaaatctatcatgaaatttctgaatgcagttaaacaaagaacaaagacaaaaaaaatctttaaatttctcaatgaatgatttgactttattagtatgaaaagatgtgcctagagagcccacaagaaaatgttctgaagttgtggactcttagccagaaccctgttgcagggcgacagagctgtgtgtgttttctcaggggctgggcccaggcctcacaggtaaaacagaggctggtgcagagttgttctgaattcctctcaaacacctcccagcctggtcatagaggctagaaatcccattcgcaggttgcaaatgccagagcagcggtataggtggcatgtggactctccagaagaaatagcacatagatctcagttcatccccaggtgagagtgaaggaaggcagaactttcctgagggcacttgctgctgggaaacagtgaggatgagcagaccagtctttgctgggtatctggagagagtggagctgggtggggacaagatgcagagcacacgactggggccccaaagacaaatttgcttactgtggtccaggacaagtctagcactgaaggttggcaaggagttttcaggcaacaggtgggtgcatgttgaaaaaagcaccgataacccaaattgtgcaaactttcaatcataataagaatctgaatttgggccaggaacggtggctcacgcctgtaatcccagcactttgggaggccgaggcgggcagatcacctgaggtcaggagttcaagaccagcctgaccaacatggagaaaccctatctctactgaaaatacaaaaaattagccaggcatggtgatgcatgcctgtaattccagttactcaggaggctgaggcaggagaattgcttgaacccgggaggcagaggttgtggtgagctgtgatcacaccattgcactcaagagtaaaactccatctcaaaaggattttaagtgcacaatccccagataaaaatatttattgttcagtatatttatatttattgtatgtgaccttgggtaattgtttgttgtagaaggttgtcctgtgtagaatgtttaacgacatccctatcttctacctgggggatgcaagttgtcataactgttcccttaccagttgtgacaactcaaactgattccacatattaccaaatgtctactgggggtaaaaatcacccttagtgaggatgacagcactaaacccctctgtgactcagtttctccacctatggaatgtaagtaacactctcttctcacctgcatagcgaatctgtcttcctaactcactcaaaacctgctggttttcatccttgactgaaaagaaagtgaaggcagcatcatatgggaagcgactcagctcgtgtcgagggattggaccttgattctggttgtgctattaacttactatgtgacccagggtaaataactcacctctgctggcctcgcatctttgtctttaaagtgaaattttgtctctgtactcaaaccacattggcagcaagaatactcttttattcttcaaaatagtgctctcccttcttctattttttcctttatacattcagtaacttcccttgttcttatattgagttgctgttatttcactttgatgtaaaagtaggaaaagttatgacaatctggacagcctggggctattggagtttcccaggagaaagcaagtccaaaatcctgtattctcatcatctagagattaggcctgagatattataaccttacataagctaacttttgcttaggctcctttaaatactgagtggtgcattttaccaagctatactgcagattgatttaagagagaaaagaaaaaaaagagaagcaattagaaaaaatgaagaaacttgcccacagttatacttctccctttaaattgcattgcttgattgctgctttcttttcaatgcatttctgatgtgacagttcccaccaggaaaattgccagagaaagctaaggagaatgcttaactttgtgccatccgaacacttacttccctcacatggcattaataaagcattctattgctagccccaagtttctgtgaataagccagacatggactctgagccctgagtcagactatcaaagaaggtgggccgtgacatattgtgacaagggcagcatggttctggggaaaagggaaggctgtgcaaccacctggcattactgcggcgtggttacctgtctatgcctgttcctgcctcccgactgataggatctggcagcaactatgggcagagaatttcccccaaggagatgcagctgcttctgcaaaggctgccgctactgcagataaaggctcgttattcactgtgacacacctacatgtaccacctccatccatatttgctccagtgggtcaaggcattaccagtggaggatctgtgtcgaaacacatgctgaaccagcgtgtgcaatggggaggactctccaagagtcttctgggtgaggaagcagaagcccttggaagtggtgtccctcactcaaagtcacacagcaaataagtggctgagctgaaaccagatatggtccttactctcagatcatattaccttagagggccactatcaacacgttattgccaataacacaataattatgtaagattgaattgccatttcctagaaaagaagagagccccaagggaatggagcccagatgaggcaaattattgaaaatggggaataagtgaagaaaggtatcaatcagaggattctaaatagccataggcactggggccctggagaatgagcttccaaagacgatcaggtaccaaatatgatatgataatggtggtggtgtttggtggtggtggtgatagagttagtgatgatggtggtggtgacggtggtggtgatagtgattgtgataataatggtggtgatggtagggtgattatggtggtgatagtgatgatgatggtgatggtggtggtggagatggtgacggtgatggtggtggtgatggtaggagtgatggtggtgggagtgatggtggtagtggtggtgatggcgtaatgtggtggtggtggtgatttatgatggtggtgatagtggtagtggtggtggtgatggtggtaaaacactcagtatttactcatttgtttgacaaatgtttatggcaatctaccagtctgaacactggagtacaattgtgaacaaaattaagtttctgccttcacaaagcttacagtctaacagagaacacagactagtaaatagaaaattttagctcagcatggcaaattctgtgatggaaataagcatagggttgtatgggaaagcaaatctctcaaatgtagctcaaaggtttcccaggactaaacattggatcaaaagatagaagaatgtctgaggtcccacagtaattaaccatgctattatttgaagaaaccctttctccatggtggaaattatatacaaacagctagtcaccaaaagcactgaagaaaaatgtagtagagggttatttgctcttctgggggcttgtttgttttgcaattcagaaaactaaggttgacacaactgaagtttattccataggatctcaacatttacagttacttgatccatggtattctgattcagttgtagtaagaaaaaaggtaatattaatgagaaaattaggaaagtaggaggagagaaaaaaacgtcaatatagttacatatttttaaatttcagtgtttgtactgctgccatcctggactatccagcttcccttgagatgtatgcatttatttttaaccctggccttttgctaatatcgaaccacaatgccatcattaatccccattaatactttgctctgactatgccttttgggaactaactcatgactaaacttttttaaccaatcgatgttcgatgtactctttagcattgtaaaaaaatcttgaacttcagctagtaaatcaaactgaccacaattcggagtaggtcctggatttttctaggacacagtacaagatgaatgactgtagacctttgagatgaaatggactttagtgcttctgatcctcatgcatctgtgatcctacagataaacagaaaataaagttattttccctttgtccatcttttcctccccctctttttgtcccagtatttagaaagatttttttctttccatgcatgaaaaagacagtaatgacataactacttttatatcttgccaagcagctcctcaaggggttaactataaaaccatgttttgttcattttctttcaattgtttacttggtcatcttataggaagcttcacgttgagcaaacctcttcatgcaacaaaccttaattataaatattcagattacatttaaaagttcactttgattagaaatttcacacctgagtcatcccaaatgaactgtaaagacagaaataaatatataaagtttgtatttatttctaaagtttattccttgatcatacagaccagtcacaaggtactttcgtaacagttttattaagaaaaattttaattacaaagcaatatctaacccatcctttggtttataaagcagcttaaacctctttttttggagtgaacggtcgtagatacatctgaggacccaggtgctcaatgggcattgtccttggcatttctaaatcaccaaggaactttttcgcatttacccatatggattttaatttttgaaaaagttcatctatcaaaacaaatcatgattatgtaataataccttgttaccccattcttgtgtcagatttatataactgccaatgggaacttctaatgatggtggcggtggtggtaatcatctctaccagataatgagtatgaccacactgaatatgattcggtgtcactttgtgggggtaaagatacaacttccatctggtcttttataaaagcgacaacagcctacctgcattactaacccacagatgcctagaggtcaaaattccccaggtggtgaccactgccagatgtaggttccatcatggacttgagtctccatccagagcttctgggtctccaaccctatcagcttttatttaaaagtgttattgtctctttctatgattcatatcaggaatgaaatttctcagtttggaacagcagaaaaaggcagaagcctccggtgttccttgcaacctttccaattgtaacgcatatcaattagtaggagctctcggggtgacaactttgggagaatccactgatttatattaatgaagagtgttactgtagtccaacagagtaaagtactaaattaccaactctaaaaagattttttagaaaaccattaaagttaaagtcaaggtatttctaagaatgaaagtcatttctatgattctaaaatgacccagggaattcaatgatgaatgagaggtacagactcaaagcaattctctaatgtattcaaagtaaacaataccataaggtcaccttattcaccagggattttcatttctgttcattgaagatttttaaaaaattgacagatatattggaagccagtgggaaaatagaatttatctaacagaaagtatcttcatagccacttttgagaaattgcataaatccattccataaataaccaaagtgcaggtggagagactgaggcatcaggaagttaagtaactttatccaaggttgctggtagcactgggggtgggtcatgagttgcctggccccactaattcacacacaatgttctatttcccctggatttgtcctctgtctgtcctctctcccggtcacatgagctccttggatacagatataatgccttttacatgtcctgtctgattcaatccttctctttcaggtgggggcagtggggggacgatgaactgctcagacattatcttttttctcttatggtaaaagccagcagtgtaatgaagtttccatttgtggtcaaacagcttggtttctcaattattaagcttacatttcttatgcctcttcaccccatatttttggagaaaaacagacatttattacaaggcatctctcgaatgtgataatcatgggcaatctaaatgtctgctttccctgaattgcttcctggaatgaggtttcaatgctgcagctattctgtaatcacacaggctatttctgaagcacagggatgctttacagcactccctccaagctgagcggttggtgctgctctggtctcctggggccagcatccccaggatagatggatagcaaaggagcaaagcaaagccagctcagccctttaggatatgcacagcttcatgcaccttgggttcccttcataccctctttctttcccctgtctcctcctgttacatccttccctttttcctcctcctgctctgcatttttccctctctcatacgtccattcctttaattcagatatttttgaggcctgttctataccagctctacaccatgcagcagtggtatggcaatgaaaacagcaggccacacttggagaccttgaaatctcagttttctctctcagtccacatttgcttatttctctcattattgtcaattagtaaaatatgttttggccaaatgagcatcctcagatactgagagagacaaggttaataatttcctgtggtcatagttatcatgaaaaatgagtctaattacccacccctatcagagcttgggtcatatatataccaaaggacattcatatatcggtagttatatgcttcatactattcattacagttagttacaggattttttttaattgaagtaaaatttacatacagtaaaaaatcatggatattaaatgcacaattcaatgacttttgattggggtaatcaccaccccaatcaaaatatagacatttccacaagctcagaagtttccctcgtgcttcttccggtcaatccccacctcattaggtagctactattctgatttcttgcaatgggttacatttgtctattcttcaactttacataaatggattcacacagtagaaatagggctggcttctcttactccatcaactgttacatgtgttttcaatgctttccttaccattactaagaagtattttattgcattgtatatcacaatttgtctatccattcacctattgatgcatgtttaagatgtttccaatgtgaagctattatgaatacagttactataaacattcttgtacaagtgtttttgtgtatgtgttttcatatatctggagtaaatagctaaagagagcatgcctagatcagaaagtatgtatatatttaactttataagaattggctagttttccaaagcagctctactgttttacattcctgccagcaacatatgagagttccagtttctccacagcttcacctattcttgatgtcttgaacctttttaattttaaccaatcaaatgggtatatagtggcatttcattgtagttttaattttcatttccctgatggctaatgattttgagcatcttttaatacatttattggctatatatatatatatatatgcagcatgttttcaagtctactgattttcttattcagtcatttgtacttttattattaagttatagttgctctgtgtatatacctctcatttgtcagatatgtatagaacatattttccccaaactatggcttgtagttatattttataaatggcatattttaagtaacaaaagtttttaaattttataaaatcaaattttttcattgttctttaatagtcatccccagtaaatgttctttccacatgaagactttcacatgaatcactatttgcccatgtttgccactatttctcctatgttttatttttgaagctttataatttgaacttttacattgtggtctatgatccatcttgagttaccttttggtgttgtgtgaggtagggatcaaatcttattttttccaaatttatccatttgttccaccagcatttgttgaaaagactgttggaaaggctttcattcgttgcaaagagtttctttgttgaaaagactgtcattttcttcattgaattgctttggtgactttgtcagaaatcaaatgtctacatgagtatggatctatttctagactctcttttctgtttcattagtttatatgtatgtccttatgacaataccacactgccttttttactgctttcctctagtaaaccttcaaatcaggtagtcattcatttttgttcttctttttcaatattatgtttaattattctagatcctttgtattgctatgtaaattttggaaacaactttccagctttaatgaagtgcctattggcattctaactgtcccgttgtcttgatctattaaagaagtattaaaatgtagcctatagccatcttccagtgatagcacatccattcattcaacagaacttattgagttcccactctgtgctagccctgggaatataaagtcaaaacagcatagtgccttccttccttctgtgaacataaagtctgggaaaagaacaaggacagtctaaccaatgacacaatacaatgtgataaatggatagtactatgcaaagagtactatgtgatcaaagagtaaggacatccaaatcaaggtgataagtaaagattcccagggtgaaaccagctgagttttaaaggatcaatagggcaccaggtaaagaagaggtttgagtgtggatggacattccagggagcgagaataacatttccagcaacaacaaggcagaaaacagcttgttattaagcaaaccactatgaaaaaccaaagacatggtagatgattttcctttcctttcgaccaagtatgtgaccctggctgttgtaagtgccataaaagcccagaagaaaatcaaggatgaagagccaggcaagggaagaaatagaattgctgctaccctatttcttttttcttgtgcattttctgggatgcctgcccatggaataacctgagtacttgaccttcagctcatctcccttcctatccttacaacataacttggcaaatggcggagcaggcacaaaaacagatctctacattcccagaactgtgaccttttaaattttattttttagaacaattttttcaaacagcaattgaatccaaatacataaaagagaaaaagcagagcagctattattaaagaaaggtggtgactgcagccttgactatcaacattcaattctcacctgccccaccccacaacaccgtaactactgagtttcttttgcaaaaccctagcatgtcatgaagcacaatttgacatccaccacaccacttccacctgtgattaagtctggtcaccaccacactgtagctggggatttgtggttcacaaaacctggaaacgattttctacaggaaataattcttctccttgccaaacttaacgctaggcctttgatgttagttcgtgttacccaacatcaaaattcatttccaatggtctttgagaaaccattgtggacaaaattaggtataagactattttctaaaagagttatggaaatcctagcctttatgaggacataacttttaacaatgaaatttaacggaatatgataggtttataacagagaaaagtcatttcatcatagccatataaaatgcacacagaggagaaaagtacccttgcatatttttttaaaaagcagaaagaaatagtaactatacaaaatgtaaaggtctgcgctacaggaaattgaagaatcaagaaatgtcacatttctttatttttcagtatcaagttagaatctgctcatattccaatgaccaaaattaaacagaagtccagtacgggtcatgttttagggctatttctattctttgaattatacaggagaaataattttaaaatcatagataatattatactatagatgctggtttaatttaaaagtcttcattgattttcacagctttattgagatatagttgacaataaaatgtgcatacttaatgtacaattggataatgttgacatgtatatgtacccatgaaacgaacactaaaatcaaaataatgaatatatccattgcccccagaagtttccttattgtaatttcttccttaaaccactccctgctttgtgtaccatcccccatcactgctcagccttctgtcattatacattgatttgtgttttctagacttttacacaaatataatcatgcagtatgtactccttgtgaggcttcttttatgcttccttactgtattctgagcttcatccatgctgttttttgtttcagtagttcattcctctttattgctgagtagtagtgtttcattgtatggatgaatcactatttgcccatgtatttacttgtggatggacatttaggccattttccgtttttgcctcttacaaataaagccagaaactttagcttggaagactttagtaaaagtctttgtatagacgtaagcttttatttctcttaggtaaatacctaggagtgaggtggctgggtcataagctaaacataggtttaatttttaagaaactaccaaactgtttcctaaattggatgggcattttacattcccaccagcagcatatgagagtctaaagtgttgcatatcctcccggacacttcatatgatcagtctttttaatcttagacttttaaatagatgtccaatgttaccttgctgtggttttgatttgcatttccttaatggctgatgatactgagcatcttttgttgtgattggccacccacgtattttctttgatggaatatctgttccaatatttttctcttgttttaaggttgtgtttgttttcttactattgagtttcaagggttctttacatattctggatacaagttttttctttttaatcagataaaggatttacaaatatcttcttccactctagttttattttttcattctcttcacagggcctttcaaagagcaaaggttcttaatttttatgaagtctgatttacaaatttttttatggatcatgcttttcatattttatctaaggaaactgcctaacctaagatcacacaattttctcctttgcttccttttagaagttttataaccctaggttttatatttaggtctaaggttcattttgagttcatttttacatatggtgcaaggtatgaatcaaagctcgtatttttgcatatgaatatccaattgatgccacctcattttttgaaatgattatcctttatccataaaatttcctttgcaactttatcacaaattagttaactgtatttgtgtgagtctatttctgtgttctctattgtgtcacattgatctgtttgtatttataccaaatggtgtcatgctacttaatttgaaagtattacatgtaattgtacccaaattctatttaattttaagttttattgaattttactttaataggaaagaaattaaattgcaacagaagaaattattaaacttcaaataaatatttcttcactacaagagatatcatttcttaacaggttttcctaaggttattaaaaattataaaaaccattaaaagaataaagtaattatgtacttttaaattatactttaatgttagatggtatcaattaactgagagacccacacactaaaacattaccattttcactgttcctctcctctttctcctatcttttttcttaggatgattattgtttttatattatcaagtcttaaaattcatctgtaactgtaaatcccaaagatgcttaacttatatagagttttctcacccctgaatctgttatcacagagtctctgttcctgggttctttgtttgactcagcccctaattattttgatatcactttcaagtattaatagtttggttatgataggtaccatattccctgaagtacttcatgttcgacaatgtgtgtaaaagggggctgaatgcttgatttgatgctccacttggtcactgttgatgtagagaagagctaatgatttgtgtacattaatcttgtatccagaaactttgctgaattcttttatcagtcctaggagctttctggaggagtccttggggttttcaaggtaaacaatcatatcgtcagcaaacagtgacagtttgacttcctctttacctatttggatgtcctttatttctttctcttaacttattgctctggctaggacttccagtactatgttgaagaggagtggtgacagtgggactccttgtcttattccagttctcagaggaaatggctttcaacatttcctcattcagtattatgttggctgtgggtttgtcatagatggcttttattacattaaggtatgtcccttgtatgctgattttgctgagagttttaatgataaagcaatgttggattttgttgaatgctttttctgaatctattgagatgatcatgtgatttttgtttttaattctgtttatatggtgcatcacatttattgacttgtgtatgttaaaccatgtccacattcctgttatgaaacccacttgatcatggcggattatctttttgatatgttgttggattcagttagctagtattttgtgaaagattttagcatctgtgttcatcaaggatattggtctgtagtttccttttttggttatatcctttcctggtttttgtattagggtgatgctggcttcatagaatgaatttgggagggttccttctttctctatcttgtggaatagtgtcaaaaggattggtagcaattcttccttgaatgtctggtagaattctcctgtgaatccgtctgttcctggacatttttttgttgataagtttttaattaccatttcaatctcactgcttgttattggtctgttcaggatatctaattcttcctgacttaagctaggagggttgtatttttccaggaatttatctgtcttttctagattttatagtttatgtgcattaaggtgttcatagtagccttgaatgatcttttgtatttcagtggtgtcagttgtaatatctcctgtttcatttcttagtgaggttatttggattttctctctttttggttaattttgctaatgatctatcaattttatttatctttttaaataaccagctttttgtttcatttatcttttgtatttttgtttgtttcaattttgtttagttctgctctgatcttggttatttcttttctcctgctgggttagggttttgtttgttcttgtttctccagttccttgaggtgtaaccttagaatgtcagtttgcgctcctttggtcttttttctgtaggcctttaggtctatgaactttcctcctagcactgcctttgctgtatcccagaggctttgataagttgtgtcattattgtcattcagttcaaagaattttttaattttcatcttgattttgtttttgacccaatgctcattcaggagcaggttacttaatttccatgtatttgcatggttttgaaggtttcttttagagttgctttccagttttatttctgtgtggtctgagagatggcttgatataattccaattttcttacatttattgaagcacattttatggcttatcatatggtctatcttggagaaagttttatgcactgttgattagaatgtgtgttctgtggttgttggataaaatgttctgtatatatctgttaagtccatttgttccaaggtatagtttaaatctattgtttctttgttgactttctgtcttgatgacctgtctagtgctgtcagtggagtactgaagtcctccactactattgtcttactgtctatctcatttcttaggtctatttgttattgttttataaatttgggaacttgagtgttcagtgcacatttgtttaggattgtgatattttcctgttggacaaggccttttaccattatataatgtccctctttgtctcttttaactgctgttgctttaaagtttgttttgtctgatataagaatagctacccctgctcgcttttggtgtccatttgcatgaaatacctttttccacacctttactttaagtttatgtgagtccttatgtgttaggtgagtttcctgaaggcagcagacagttggttggtgagttcttatccattcttcagttctgtatcttttaaatatagcatttaggccatttacattcaatgttagtgttgaaatgtgaggtaccattacattcatcatgctctttgttgcctgtgtactttggtttttttgttttttgtttttgctttttaacttgtatttttgtttcataggtcctgtgtgatttatgctttaaagaagttctgttttgatgtgtttccaggatttgcttcaagatttagagctccttttagcagttcttgtagtggtggcttggtaatggtgaattatctcagcatttgtttgtctgaaaaaggctgtatctttctttcatatatgatgcttagtttcgctggatacaaaattcttggctgataattgttttgtttgaagaggctgaagatagggttccaatcccttctagattgtagggtttctgctgagaaatttgctgttcatctgataggttttcttttataggttacctgatgcttctgtctcacagctcttaagattcttttctttgtcttaactttggataacctaatgacaatgtgcctaggcaaagatctttctgcaatgaatttcctgggtgttgtttgtgcttcttgtatttggatgtctaggtctctagcaaggccggggaagtattcctcaattattaccccaaatacattttccaagctttcagaattctcttcttcctcaggaacaccgattattcttagctttggtcatttaacataatcccagacttcttggtggctttgttcatattttcttattccttttcctttgtctttttggactgggttaattcaaagaacttgtctttgagctctgaatttttttcttctacatgttcaattctattgctgagactttccagagcatttcgcattcgtaaaagtgtgtgcaaagtttcctgaatttttgcttgttttttctttaagctatctatttccttgaatatttctcccttcacttcttgtattattctttggatttccttgcattgggcttcacttttctctggtccctccctgtttggcttaataactaacctccttaattctttttcaggtaaatcagggatttcttctttgtttggatccattgctggtgaactagtgtgatttttggggggtgttgaagagccttgttttgtcatattacagttccttctcatctgggtaggctctgtcagagggaaggtctagggctgaaggctgttgttcagattattttgtcccatgggatgttcccttgatgtagtactctcccccttttcctatggatgtggcttcctgtgagccaaattgcagtgattgtctctcttctgggtctacccacccagcaagtctacccagctctggagtgacactgggcattgtctgcacagaatcctgtgatgtgagccatctctgggtccctctcagccaccggaatagcgcctattccggtggaggtggcagggggtacaatggacactgttagggttcttagctttggtgtttaatgctctatttttgtgctggttggctccctgccaggaggtggtgctttccagagagcagtagctgtggtagtatggggaggaaccagtggtgggcagggccccagaactcccaagattatatgccctttgtcttccactagcagggtaggtaggaaaggaccatcaactgggggctgggctaggcgtgtctgaggtcagactctccttgggcaggtcttgctgcagctgctgtgggggatgggggtgagatttctaggtcactggagctgtgtacctaagaggattatggctgcctctgctgagtcatgcaggttgtcagggaagttgggggaagctggcagtcacaggagtcacccagctgccatgcaaaccaaagggccagtctcactcccaccgtgcccccctcaacagccctaagtccatttccaggcagagggcaagatggccttgaaaacctgacccggtctacccacctcccagctgcaaaagaaaagggtttggttcttccacacctgtggagtctgcacaccggatttgcaccctcccccaagttttggccaggaggcttctcaccccattcaaattgctacaaagttcagctagagatttccttctccatgtggagttttatcctctgctcctctgtccacctttctgatggatctctgtggtgccaggcagggatggcctgctaggggacctagcaagctcccagggcctttctgctgcttcctctacccctgtatttccctcagctctccaagttgacccagcaccaggtgaagtcggaaacttctcccacaaacagaccttcagcttctccagtggaggtttgtgttcgggagaggagggtctccctttcccacttgcatagttgggacactcacagtatttgggggggtctctcgggtcctgcagaagcagtctgcttccttcagagagtctgtggtcctctcaggattgctggtttgttcttgcagtcgacctggatctaaaatttacagcacgagcctccacatgctgctctgtccagagctgcaatccagtcctgcctcccatccaccatgatgatccaaatccttgggttctctattttaaggacactaatcatccttatgttgtatcatctttgttttccataactatggtactattagaatctctctaaataattcatcactttggttttttattagtattttctttgatatctcaagttttcttctatgtcattaatttttatttttaataatatgtattctgtttcttgcagtttataatttattattagctctgtaatggtatgatttggtcctcaatttgttgccttggtctgtgatctcctaaaaggttgtgagaaaaatgacttatgctccttaatttcgttttcttctatgtatattttttcatgatctctccctctctctctttctgtctcttcctctgcatgcagtttcttttccctatatttatgctcaaacttgcatcattcttgtctctagacgttctatttgctgtaataaatgaaattcttctcaatctaaggttagtttgatctcacttctgaactacaatttgaggccaatgtaccacattctatctactcttcagtactctgcaagagattggagtgaggactacagtattagaagatgaacaatctttggtatcatgcttagggtctgctctttcccttaagattctcctacatctgtcactccagaacccacccccacaactggaggcatatctcagttccattgggggatacgctcagcttgtattatttcccaattgtgttccagaatctctacctcttttaaggtgcagatactttttcactcgtttctccacagcaggtgtttccaccattctgttcagaacaataaaaagatcagcttttttttttttttttttttttgagacaggatctcactctgttgcccaggctggagtgcagtggtacaatcagctcactgcaacctctgcctccccggttcaagcgattctcctgcctcagcctccagagtagcggggactacaggcatgtgccactatgcccagctagtttttgtatttttagtagagatggggtttcaccatgttggccaggctggtcttgaattcctgacctcaagcaatctatctgcctcatcctctcaaagggctgggattacatgcctggccaaaaagatcagcattttgattatatttattactttctagaatttaaaatataaattagaaatctcaggtttttgttgactagctggtaagatggttaaggttaggagctgagccatgttgcctctctgctttactccatagtcctcatgttttgttgggaccatgttttgaagtttattgcattatgctgataatgacttttaggggtttttgaaatttttttctaattttgtaggtattatgggagggcaatttagtgtagccttaatgaagttgaataatgcctcctgtacgtagtcctggacttgtattgtctacttgaccaccagtgactcaagaccaagacactttattctgccactggtcaaaccctgagatcatgagagggtgttaaaacagccaactgtggcatgaaaaatgacaaacatgtcctccaaacatatcttgttgcttatgaggggagatattattttaaccctttacatctgtcactaaaaacttacctctttcatggcctgagctccctagaaatcaatgttctaattagaaaacagtagctaatctgcccaaatgctaataaatgagggttgtgatttatctagcaacaggggaacagctcagcattaacaattaaaaggtctgtagaggacagagctttttttccttactcttccccttagctgattgagttcagccctatgctataaatagcccttgtaattaatggctatctgtttgaaaatcagttatcaggaccacagtttaggagcctttacctctgaaattcatagagcctattttatgtctcagtgataagggaatgataatgtgagttcaaagctaaacctacctacccacaaagaccaaaccacatcatagcctaccaaggcattcttcaatcttcacgataatggatacagatttttaaataatcaatccaactgcaaggagaagtactgatctttaatatagccataatgtttggctaaagcctgctgcactccagtcatttcatgactctataagctaaagtcaaaatttatatcaaaggcatgagtttgcaattagctgagcaaggtcttttagagacccccaaagagttcattttttcctacattgaacaaattaactgtgtggttcataaagttcttcttcactttaacctgactggacacagagttaaagggggaagatagcatgtctaaaccaaattgaatagtgatcttctagacaacactccccagaagggaccctccttgggaaataccactcagtgctagagtaaatctcaaatttcagtgaaggctttgtcattcacagtaaaagatgcttgcacatcttgcatgttttcttctagtattttttttatttcgttcggtattgcctacttacataatacccatgcagagctcctagaaggtcccagagcctgccatattgtttcatgacactacacatttattaaaactgtttccactatgtagatggccttttctggccagtttgcctgtcatctccctctattaggccccccagcatcaccaccaccaccctccaatctaactgataactcccttcctcaggttcccactctacctctacatttttctgtcttaataccagtaatctttacatccacttgattggtttcttgaccatctctctccaggcataaggtcttattcttactcaaatatacatttcctatatgtttgttgactatataagtgattattgaacaactacagagcatccagtctttgctaacacttggtaaaactcagaaagacggagattttttttctttgttcccaatgaattgataaaccagcggggaagacagacttctctacaactagacacagcaagtcaaaaagaggggtctaggcaggtgatgaggctgagttgttagttggtgaggcagcaaacacataaaagctcaccatgttttaatgtctcttctgtgattttcataatcaaaacacacatgcttcaatcatatgtttcacattgcttactaatgtctttgcattataactcagacctgtgcttctaaacgaatgtgcacacaaatcacccagtgatcttgttaaaatgcaaattcttattcaagagttctgggaggggcctcagattctgaattcctaacaagctcccagggaatgccaatattgctgatccatgaatgcctcaagtagcaaggctccacaccattgtaatgtcaatgtaaacattgttgaaatggcaccagtttttggaaaagctcctggactccccacctaaactcttctgactgtaattaaacatgatcaacgttacaccaagagaggtagattcagcagtgcccagaaaaaaactggcaagatgccttgaaactgttacctcttggcctttgttttactatgtaaacacaaaaggtctttgctcctgcactttaggtctgctgctacaagatgaatgtagtctgaaggtgtggcaagttttatccagatattcaagattgcctttctctgctaaagtctcttccatatttaaaccataacatcccaggttctttatggaaacagaaataccttctaagaaaactctaaaactttaatctgtttaaacaatcataagaaagaatacttaagtgaattttacaaagggaaaaagaagctctgggccaggcatggtgacttatgcctgtaattccaactctttggaaggctgaggcaggagaatcacttgagcccaggaggtcaagactagcctgggcaacatagggagaccctggctctacaaaaaaaataaatttaattagccgagcatacacctgtagtcctagctactcgggagcctgaagtgggaggatcacttgagcctaagagttcgaggctacagtgaaccatgatcgtgccactgcattccagcctgtgtgacagatcgagaccttatcttagaaagaaagagagagagagagagaaaagaaaagaaaaaagaaacaaaaacaaaaaacctctgtaagcatcccatgggaatctattttcttaactcttaatgattccaagacaacatctgttaactttttcaattcattagagtctaccactcaaaatgacaacatctgttaactttttcaagtcggtagagtctaccactcaaaatgaaagtcaaaatccattagaccactaatttctcatttgtgagttttgagttatctttccaccaagacaagttccctacttgagattttatcttttgtaggtcttcttcctctcttccccacatcattcttgagcactaacctagcccaaaccaagtgtcctatgtatgtcttcttccaatccggtaggtgtcacactcctcctatctgccgttcaactttgccttgctataatatgcgatttaacaggcaatcttggttacttggtctcctcttgcgtatttagtttttgcatcttttttttctaacaatgtaatggtaaaccgaacagaagtggaactcttttcactgggcacaacatatagaaggcaatggcagccatagcttgcgccatgcatagcctggagtagacaaacctaaatgaactttcttccttctcacttctcacggactcatttaggtgaatgccaaagatgacgaaggtgtcctcgttggatcctgggacaatatctatgcctatggcgtccccccatcggcctggactggaagcgttgacattctattggaataccggagctctgagaatccagtccggtatggccaatgctgggtttttgctggtgtctttaacacatgtaagtatccaactgagtaatttctttttaatataaaggaaacttcactctaagacattttttctataacctaacaaagagacatagcagcccctgttgacactatagaatttatgggtgagccattctgggatgtagtcaatgcataattaaattgtagtgggccaaatatgctcatagtttctctttgactgcagaatctttatagaaagaatgatagactatatcctgtgtaatccatcacttaacacccgaagaaatagagggttacagtaaaaatatagagaaaaaagccattttcttttcagccaccacattttaaaaaaactaaaacagttaaaactaaaataataaataacaaaagatatatattgcttatttatcattgagaagttgtataaatatgcgtatttatttattattgagaattttataaatatatccacttaatttttatcccagttatggaaggtattatagcaggtggtctcatattcatttttccacatttctcaatgcccctgagcaattagagatcagaacataatgaacaatctttccctctccagtttcccctctggtttttaatccacccaacatccaatctgtagaggaaagcatatgagaacagaattattctcttcagtgtcatgcatcatttttcagaggcatttgcctctctagacccagacgatattacaattaattcagtgaatatttttaaaaatacatttatttcagtatgtcttcatcactggtaatgattttcattcacaagtcatttctacagccttggagaaacattaagctcaagttggggtgtcctttctgcctgctcattaataaagaatttttacctagctaacattttttaaatcaaaaacaaagggaggggttggaggctggagggaggtcatttaaaaaaatgattacaaaacctatttgttttagctcaaagtctcaacagtctaagacttggtgatctaaatttaaaaaaaaaaagtcatgagttttgttttgttttattttcccatagtatcaaacaggataagattattttcttagccatttaaatataacccagggaagaaggaatacatatttcttgggagcaatgaaaatcaaaagtatagtcccctagaagcactggtctctgaagttccagatagaagccggaacttcatggtaggttaaaggttggaggtcatcccatccctcgaggctcccaaaccaagacaaggtaaaagatgcccaacagaggcaaccactcttgtgaaatgattttaggaagacagaaaggacccaagttctccccatgcctacaatttcactatcccagtgtaattccttccggctcacaacaagataaaatagtgaacaccttacatccgttcgtgtctttggcataaaaaggttatccaatctatgcctgaaaacaggctttggcggtaaatcaagaaaaggcagaaacacacagtggggaagtcacaacgagagtaaacctgaagatggaaattgggggaaggaggaacaggtgccctaaagtcaagcctcactttcttgaaattatgagtaaggcagagtcttgaccaagtcgtgtctgggataatgtgaattagtgttcagccagaaacagaatgagagtggcaatcgttttattgataagaccctgggtgaacagggctgaaaatcaagaaaggaaaatgggaacgggaggcccgtggcagctgccactgttgtttggggcattaagatcaagtcctttaaggagggggacccttgaatctctaccagactccagtttggacttccaaggttgttctgttgaaggaggtgggtagtctttggttaaaaatgctaaactattctgaaggagaaaataaaaaggcaagccaagtcattaatcttaaaattgtcagctgaattattttcaatgagccctgatgtctggtgtcctgggaggcagggagggcatttggattaagtttaatcagtaggtacatatggcaagaaaggtattcagataatttgttatctattaaaatgaactaaaatgaatctgtggtgtcacccaccaatgcatgtcacaggagcaaattctggccaagacagcaaattccaccaaggacctactctgtaaattcctaacttcctattagtgggtttttaaaattgtattttcaggaacatagtcccattcatgggactaaaataatactacgttgatgatcaaacgcttagaaacgaaacaattagaaccctgttgggattctactctagttggcttcacctgacaccagctgcaattctgaaggatcacacagcaagatttctctctaccgcccccatggggttgaatgaccacccttttccagcatggaacatttgagaataacatgtccaaagggcttttcatgttgggtcaggaagaaagtcccctacaagaagggtttttttcactctgtgtttattaaatgctggtgatgtgtttagctgtggtctgtcctttcctgtagttttacgatgccttggaataccagcaagaattgttaccaattatttctctgcccatgataatgatgccaatttgcaaatggacatcttcctggaagaagatgggaacgtgaattccaaactcaccaaggattcagtgtggtgagtttgattgacaatggcattggctgatgtcacattatagtaatgttacacatttaccacaagatagactcaatctgatgtttctgttctattttgaggaccattcaacagcacaggcagaaaactctgattgtcaaagaatgttctagcaaatgattagaaatgttactgaagagacagtttgggttcctagtgataaaaatcaatcattccttataatagcaaccaccaaaaaaaggtcatagttttagctgctgcatatgcctatactagttcctctctaccttgatatattaatattacagttaatagcagaagtattggagccaagcgttctctgggtcagtgccctgggactaatagagctaacatttatttagtatttactatgcatcggtcttggtgtatgcatgatcttatccagttctttttagttgtatcaggtggatgttattaatatcgccatttacaaatgaggaaactgaggcccaaaaaggcttgctcacggtcatacatctgttgagctgggaataaacccaaatgcttctgaccattaaccacaaccttttaaatgacttcagcagtataggttttcttttcgaatgtaaagatgagattctccttgattatattgtcacctttcattgagatatagaaatgggagtaaagctgaaattgttccccaaaaccagctgtggggttctctcactgccctgaacagctttgttacaagctggctagagggaacttaagatcccagggaaattccatttttccttgagaccccctaagtccaaatcaatacactaagaagaaacgaaaaaaatcctaagagtttaagtaggaagaatttttatcaaggtctgtgtgggaggaaattggggcataagttcctctgtggtcaggcattgagctaggtagaacttctaagccaaaaatgagtctcatgcacaaataataaagctaaaacactttctgttatacaagcatccaaatggggatggtaggaagttacaagttcattttaagcaaaactaaaagttagaagtgcctgaacttcatgttacaggaatggatcacagttgtagcagcagtattaactcaccagtaggggcacacattcattggagaatgttgaaatgaaattgctgaatgagtagcaaagtgctaccatgaattaaaaatagttcggttcattggaagggaatgagctgagccatagtaagctggagggcacgtgtaagacaaaaccttgtctctgtaaattgaacagaaatttaaagaacactttaagcctgcagaattataatatagcagccctgcatgtatatgggatgacaaaacagaccaaaatagtcaccccaaaaactcattgcaattgttaaaaatgacaaaaagatagttatttggcattctccatatctcttccttaaaaacacacagacacacacacacacacacagacagacacacagacacacacacacagcctttgtagctaagtgcagttcaaagttatctttcccagctccttgattcaggtacctcccatcatcaaataagtccctatgaggcactcctacaaataaccccacaggccctaaacagagttaatacaaaatagcgaaggtagatcttgcccttggtaaccctgtcctcattcaggtccctgctccaaattacttccccttttcctgacaccatttgttcctttggtgccttactcaaatatcccatcaccctgagactgttcttcctggcctgggaccctcacccaccctccactgcagaccactgcccgagactcctcttcccttcctttgcctggcttgtagtaggttttcaacgcatgatgcctgatcagatgctctgactgactgcggggctgagaccagcacaactcaggacgtgcccagaccatgaagcacagggattaaagggctcagtgggatctgaggccaagacttggctctgctactgcccaagctgtgtgactttgggcaaggcacaacctctctgtgcctcttttctcctctaaagtggagagaacaatattccctgcttcactcatcacagagccgagcataacaggtgcctaatgaacgttagctgctattattgccttcattattagtcacacagctggaatttcttagaggcaatatgtttccatcaacccaagtacatcaaagcggtcagaaaaagagggatgcccagtgtcctaagatgactgtgctatttctgttactttggggtatttttaaagaaaaagcagacacttggcctcaccagtgcaaacacccatgcaccttagaagttataggtggtccaggaaaacaagagtatggctaagactctcctggattgaggaggttagtgcgggctgtccccagacagatcagccagtgcatgatcaccacagccacactcctatgtcaagctctggcttgggcagctacttgctgtgtggctttgagaaaatgacttcacctctctgagcttcattttcttcatcagtagaatgaaagtaatcttagtagttaccatttcccgatggagtgactataatgattaaatcaggtcatccaggtagagtgcttaccatagaggtaggcctgatgctgatttaattattattggtcactggtaagaagcaggggctgcctgagcatagggctggtgaggaagggtgagggtgagggtgagggtggaggctaaacaggggctgaggtgggggtgggaatgatttgctgggcatcagctgacctctgtgaggtcagtgcggtgtagactggcgacacatggcctgatggatttcctagcaaggatctcaggagctattggcctcatacttacctccctccacaggctctggtcaaacacacccacctcaacctgtcttccccgctcctggttggtttgtggctggggcccctctcctctccaagtaaaggagacctgagaacaatctctcatcctccaccatctatttcttcttcaacactcaggtcccaatggtccacagtttgtgatgaatcagtttgtccagttaggtctcagtgactcagggtgtcctcttctccatgactcagccaaatcccagcctgccgaaaccagaaatcagccagcagggaggctcagaggaaaagtacaagagggtgtgagaggtgtattctgctcgccacactccagagccaggagtgacaagtttggctctgtctcttgctgtgacccttctcgccttactactgcagaccatcaaggacagactgcttcctggtttgccaccgtaggtcccctgcatgaaggatgtttccttccaagagggagcctcacctcaggggggctacagttttgcacagagcggccccactgttgacgccaacagaggccatggtctgagctccttagctgttcaggagagggctggggactcaggaacctcagaagggcagagcagggcagagtaattagatcccagggtagcaaatgaaaccccaagtgggcaaatgcaaagtagcagatcccagaaggagcaatttcggccgcctgtccccagcgtgctgatgagttctgaattatgtgtaacctctggggggaaggcagctatgaatcactggacagtttaatgaagacgcttgctcaatgtttagctgcagtccaaacagcaaatagaatacgagggctcagtgaggagggagtcagggctactcagaggggcagggggacagcaatggtttggcctcaccttggaagagctcagcttgatcacctcattatacaaaggtcacagtcaaaatggaaacaattttaaaagacagagacgttggcacttactaggatcaagaaagatttttcaatgaaaggcttcgctccttctaaatgaagaagcctccctgtgttcttttgctggagagagtgtggtctgataggatgattctgggtgagggttggtgtcctcctctcagcttttccccaccggaatgcacccacccacagggggagcagtgtctgatctattttatttttgttgttttgtcagcatgtaacagtgtgcagggcatagagcaagcactgaataaacagaattgcttggaaaaaatttttaatgcataaaaactccatgctgcaatgggtggtcttaatctataaacaaacctttttcaaagcacattttagagcagaaattaaccagctttcacacctgggacactgccctaatcagtgtataatcctaattctcattatgtcctcagtactcatatggtgtttcacacattgtaggtgcatttttgaaattgagattgttcttctatacattattttatttttatttttatttatttttattattatactttaagttttagggtacatgtgcacaacgtgcaggttagtaacatatgtatacatgtgccatgctggtgcgctgcacccactaactcgtcatccagcattaggtatatctcccagtgctatccctcccccctccccccaccccacaacaggccgcagagtgttatgttccccttcctgtgtccatatgttctcattgttcaattcccacctatgagtgagaatatgcggtgtttggttttttgttcttgtgatagtttactgagaatgatgatttccaatttcatccatgtccctacaaaggacatgaactcatcattttttatggctgcatagtattccatggtgtatatgtgccacatattcttaatccagtctatcatttgtggacatttgggttggttccaagtctttgctattgtgaatagtgccgcaataaacatatgtgtgcatgtgtctttatagcagcatgatttatagtcctttgggtatataccaagtaatgggatggctgggtcaaatggtatttctggttctagatccctgaggaatcgccacactgacttccacaatggttgaactagtttacagtgccaccaatagtgtaaaagtgttcctatttctccacatcctctccagcacctgttgtttcctgactttttaatgattgccattctaactggtgtgagatggtatctcattgtggttttgttttgcatttctctgatggccagtgatggtgagcattttttcatgtgttttttggctgcataaatgtcttcttttgagaagtgcctgttcatgtcctttgcccacttttcgatggggttgtttgtttttttcttgtaaatttgtttgagttcattgtagattctggatattagccctttgtcagatgagtaggttgcgaaaattttctcccattttgtaggttgcctgttcactctgatggtagtttcttttgctgtgcagaagctcttgagtttcattagatcccatttgtcaattttggcttttgttgccattgcttttggtgttttagacatgaagtccttccccatgcctatgtcctgaatggtattgcctaggttttcttctagggtttttatggttttaggtctaatgtttaagtctttaatccatcttgaattgatttttgtataagctgtaaggaagggatccagtttcagctttctacatatggctagccagttttcccagcaccatttattaaatagggaatcctttccccattgcttgtttttctcaggtttgtcaaagatcagatagttgtagatatgcggcgttatttctgagagctctgttttgttccattgatctatatctctgttttggtaccagtaccatcctgttttggttactgtagccttgtagtatagtttgaagtcaggtagtgtgatgcctccagctttgttcttttggcttaggattgacttggcgatgcaggctctcttttggttccatatgaactttcaggtagttttttccaattctgtgaagaaagtcactggtagcttgatggggatggcattgaatctgtaaattaccttgggcagtatggccattttcacgatattgattcttgctacccatgcgcatggaatgttcttccatttgtttgtatcctcttttatttccttgagcagtggtttgtagttctccctgaagaggtccttcacatcccttgtaagttggattcctaggtattttattctctttttagcaattgtgaataggagttcactcatgatttggctctctgtctgttgttggtgtataagaatgtttgtgatttttgtacattgattttgtatcctgagactttgctgaagttgcttatcagcttaaggagcttttgggctgagacagtggggttttctagatatacaatcatgtcgtctgcaaacagggacaatttgacttcctcttttcctaattgaataccctttatttccttctcctgcctaattgccctggccagaacttccaacactatgttgaataggagtggtgagagagggcatccctgtctgtgccagttttcaaagggaatgcttccagttttggcccattcagtatgatattggctgtgggtttgtcatagatagctcttattattttgagatacgtcccatcaatacctaatttattgagagtttttagcatgaagggttgttgaattttgtcaaaggccttttctgcatctattgagataatcatgtggtttttgtctttggctctgtttatatgctggattacatttattgatttccgtatattgaaccagccttgcatcccagggatgaagcccacttgatcatggtggataagctttttgatgtgctgctggatttggtttgccagtattttattgaggatttttgcatcaatgttcatcaaggatattggtctaaaattctctttttttgttgtgtctctacccggctttggtatcaggatgatgctggcctcataaaatgagttagggaggattccctctttttctattgattggaatagtttcagaaagaatggtaccagttcctccttgtacctctggtagaattcggctgtgaatccatctggtcctggactctttttggttggtaagctattgattattgccacaatttcagatcctgttattggtctattcagagattcaacttcttcctggtttagtcttgggagagtgtatgtgtcgaggaatttatccatttcttctagattttctagtttatttgcatagaggtgtttgtagtattctctgatggtagtttgtatttctgtgggatcggtggtgatatcccctttatcattttttattgcgtctatttgattcttctctctttttttctttattagtcttgctagcggtctatcaattttgttgatcctttcaaaaaaccagctcctggattcattaattttttgaagggttttttgtgtctctatttccttcagttctgctctgattttagttatttattgccttctgctagcttttgaatgtgtttgctcttgcttttctagttcttttaattgtgatgttagggtgtcaattttggatctttcctgctttctcttgtgggcatttagtgctataaatttccctctacacactgctttgaatgcgtccctgagattctggtatgttgtgtctttgttcttgttggtttcaaagaacatctttatttctgccttcatttcgttatgtacccagtagtcattcaggagcaggttgttcagtttccacgtagttgagcggttttgagtgagattcttaatcctgagttctagtttgattgcactgtggtctgagacatagtttgttataatttctgttcttttacatttgctgaggagggcttttcttccaagtatgtggtcaattttggaataggtgtggtgtggtgctgaaaaaaatgtatattctgttgatttggggtggagagttctgtagatgtctattaggtccgcttggtgcagagctgagttcaattcctgggtatccttgttgactttctgtctcgttgatctgtctaatgttgacagtggggtgttaaagtctcccattattaatgtgtgggagtctaagtctctttgtaggtcactcaggacttgctttatgaatctgggtgctcctgtattgggtgcatatatatttaggatagttagctcttcttgttgaattgatccctttaccattatgtaatggccttctttgtctcttttgatctttgttggtttaaagtctgttttatcagagactaggattgcaacccctgcctttttttgttttccatttgcttggtagatcttcctccatccttttattttgagcctatgtgtgtctctgcacgtgagatgggtttcctgaatacagcacactgaagggtcttgactctttatccaatttgccagtctgtgtcttttaattggagcatttagtccatttacctttaaagttaatattgtcatgtgtgaatttgatcctgtcattatgatgttagctggttattttgctcgttagttgatgcagtttcttcctagtctcgatggtctttacattttggcatgattttgcagcggctggtaccggttgttcctttccatgtttagcgcttccttcaggagctcttttagggcaggcctggtggtgacaaaatctctcagcatttgcttgtctgtaaagtattttatttctccttcacttatgaagcttagtttggctggatatgaaattcggggttgaaaattctttctttaagaatgttgaatattggcccccactctcttctggcttgtagagtttctgccgagagatccgctgttagtctgatgggcttccctttgagggtaacccgacctttctctctggctgcccttaacattttttccttcatttcaactttggtgaatctgacaattatgtgtcttggagttgctcgtctcgaggagtatctttgtggtgttctctgtatttcctgaatctgaacgttggcctgccttgctagattggggaaattctcctggatagtatcctgcagagtgttttccaacttggttccattctccccgtcactttcaggtacaccaatcagacgtagatttggtcttttcacatagtcccatatttcttggaggcttttctggtttctttttattcttttttctctaaacttcccttctcacttcatttcattcatttcatcttccatcgctgataccctttcttccagttgatcgcatcggctcctgaggcttctgcattcttcacttagttctcgagccttgcttttcagctccatcagctcctttaagcacttctctgtattggttattctagttatacattcttctaaatttttttcaaagttttcaacttctttgcctttggtttgaatgtcctcccgtagctcggagcaatttgattgtctgaagccttcttctctcagctcgtcaaagttattctccatccagctttgttcctttgctggtgaggaactgcattcctttggaggaggagaggcgctctgctttttagagtttccagtttttctgctctgttttttccccatctttgtggttttatctacttttggtctttgatgatggtgatgtacagatgggtttttggtgtggatgtcctttctgtttgtcagttttccttctaacagacaggaccctcagctgcagatctgttggagtacccggccgtgtgaggtgtcagtgtgcccctgctggggggtgcctcccagttaggctgcttgggggtcaggggtcagggacccacttgaggaggcagtctgccccttctcagatctccagctgtgtgctgggagaaccactgctctcttcaaagctgtcagacagggacatttaagtctgcagaggttactgctgtctttttgtttgtctgtgccctgcccccagaggtggagcctacagaggcaggcaggcctccttgagctgtggtgggctccacccagttcgagcttcctggccgctttgtttacctaagcaaacctgggcaatggcgggcgcccctccgccagccttgctgctgctttgctgtttgatctcagactgctgtgctagcaatcagcgagactccgtgggcataggaccctccgagccaggtgcgggatataatctcctggtgtgccgttttttaagcccgtcagaaaagcgcagtatttgggtgggagtgacccgattttccaggtgctgtctgtcacccctttctttgactcgggaagggaactccctgaccccttgcgcttcccgagtgaggcaatgcctcaccctgctttggctcgcgcatggtgcgcgcacccactaacctgcgcccactgtctggcactccctagtgagatgaacccggtacctcagatggaaatgcagaaatcacccgtcttctgtgtcactcacgctgggagctgtagactggagctgttcctattcggccatcttggctcctccccctaattattgtcacttctatacattattttagatgctgtgtatgactcatctagttggacttttatattgtaaaattatcttcaattttaatcactgtctgcaaagcagaatgatctaaaaacgaattccaagtaaaatagtagagaagaaaaattcagaatgtagaccaaattgcttaaagatgcttaagggtttgtaaaaatatcccatgatgcattgcagttgccaattctggacagttatcagagatgcttattttcaaacattttcttgttaaccatatttctggccaagttggttttaggaaaatcacctggagttagaccatgagccttagcattagaggactgagaatatacactgaaggcacacaatagtgttggaaaaaacattatttgccaccttcaaagaataagagtagctcatgttcacaaaaatacttttttttgcaatgccctgatttaagtgctgacatgtattaatttacttctacctcttaacagcatgttaaggtaattactgttagtggcacggtaacttaaccaaggtcccagccaataagtggcagaacctgaattacaaacccaagggggctgaccccagagcccactctttttaaaatgacatccttattgactgggcgtggtggctcacacctataatcccagcactttgggaggccgatgcaggaggatcacttgagatcaggagtttgagaacagcctgaccaacacggtgataacctgtctctactaaaaatacaaaaaaattagctgggcgtggtggtgcatgcctgtaatccccgctacttgggaggctgaggcaggagaatcacttgaacctgggagacagaggttgcagtaagccaagatcatgccactgtattcctctagcctgggtgacagagtgagacttggtctcaaaaataaataaataaaaataattaacatccttattaaaatatgcttcacggcctggcgaggtggctcacacctgtaatcccagcaatttaggaggctgaggcaggtggatcacaaggtcaggagatcaagaccatcctggctaacacagtaaaaatcccgtctctactaaaaatacagaaaaattagccaggcattgcaggctaactgtggcaggtgcctgtagtcccacattgcaggctaactgtggcaggtgcctgtagtcccagctactctggaggctgaggcaggagaatggcatgaacctgggaggtggagctttcagtgagccgagatcgtgccactgcacttcagcctgggcgacagagcaagactgcctctaaaaaaaaaaaagaaatatatatatatatatatatatatcacatgctacaaaatttacaaaattcactcctttaaagtaaagtacacaattcaataatttttagtatatttttatttatgtattattattattattttgagacaggttgtctctcacccaagctggattgcaatggcaagatcatgactcactgcagccttgacctcccaggctcaagcaatcttcccatctcagcttccctagtagctgggactacaggcacacccaccacacctggctaatttttaattttttttttttgtagagacaagatctcactatgttgcccaggctgctcttgaactcctggcctcaagagattctcctgcctcagcctcccagagtgctgggattacaggcatgagccacggcactaggccatttttagtatatttgtggtcttgtataaccatcattatcatcagattccagaacattttctctcccctctgccatacctattagcagtcactccccatttctccaactctggcaacctcgaatctactttctctctctatggatttgccagttctgatcatttcctataagtggagtcatgtaatatgtgaccttttgtgtctggcttccttcacttagcgtaacgtgttcaaggttcgtccgtgttgtagcatgtatcagtacctcattccctttcattgatgaatgatatttcattgtgtggataaaccaggttttatttatccattcatcagttgtacatttgggttgtttccatttttggctttcatgaataatgttgtaatgaacattcaggtaaaagtttttatgtgaacatatgttttttatttctcatgggcatatatttagagtggaatttctgggttgtatggtaactctatgtttaatttcttttgatgaagtgccaaactgttttccaaagcagctactccattctgtattcccactagcaatacacaaaagttccaacttcatattcttgcaaataacttttattttctgttttttttttttttttaattattattgtagccatcctaatgggtgtgaagtggtatttcatggtgggattaattttcatttctctaatgaccaatgacgttgaacatctttttgtgtttttcttggccctgtgtatatcttctttggcaaaatggttattcatatttttgtcccattttaaaattgacctacttttgtattgttgaattgtaactattctttatatgttctgcatataagctctctatcatatatgtgatttgtaaatattttctaccatccatgggctctcttttcactttcttaatggtgttctttgaagcactaaagaaattaatttttataaaatccaactttttaattatttctttggatgcttatacatttggtgtcatatctaagaaaccataacttgatccaaggtcacaaagatttgctcctctgttttgttctaagtgttttacaatcatagatcttacatctaggtctgggattcattttgagttaactttttatgtatgtatgaagtataaatagaaatggagaagagagaaaaataagagagcgaataagagagaaaactaaaatcatcttattgattatctcttgtacatggtaaattatttttttaatgttgtcttaaagattctttgtttcactcaggtctgagatttgaaaaagaaaaaaagtaaaaaagagattctctatttgtcttcagcttttgacagtttgaatatgatgtgtctaagtgtagatatcttaagtttatcctacttggagtttttgaactttttcaatgtacataataatatctttcattgaatttgggaaatttttggctatcgtttcttcaaatattctttctgctacttgctctctttcctcttcttctgggactcccattaggaaaatgttaatatacttcatcaactgcataagtaacatctcacctgtttctggggctttgattttgttttagttttttgcttctgttattcaaattggataatttcaattggcctaccttcaagttcattgattcttctttctgcctgcttaactctactgttgaaactagtgaatttttcattttggttattgtacttttcagttccagaatttctatttggttccttttcataatttctatcttttcattcgtattctctatttgatgagatataattctcatggtttcccttcagttctttgaacatatttataatggctaatttaagatctttgtcttgtaagtccaatgtcttagctttcttaataccaatttctcttggctgcttcctgtgtatgggctatacttttctgatcctttctgtgtcttataatttttgttgaaaactgaacatttaaaataatataatgtggcaattcttaaaatcagatttcctgttctctagcacctattgttgatgtttgctgttgttgttgtttttgctgctgctgctcgtttatttagtgaccttcttggactaattctatgaagtctgtttttcttgtcatgtatggccactgaagtgagctgagttagcttagtggtcatataacaattggacagagatttccttaaataccttgggccaaaagctccccagctttagccaagtagcgttgtgtgtgtgttggggaaagtctttaattaacccgcaggcagtttaaaattcttcattagccttcacttcctgtgtggacagagcctcaagatcaaccagagatgagagatgaggaccttcctggggcttttcttttgggcatgctcacagccctgcacatgtttgtggctatctatgtcagagtttttcaaagcctcctatggacatcttattccctgttttttctttcaaagtgttttggatagcccttttttagtctcaagtggtattgccccttcaggcattatgatgttaaacatttgcttctattttatttttatacattatatgaatagggctgattcagaatgagctgtgaatcagatcaaataaaaacaagccctgagaatggagcttttcagagagctgccaggcaagttaagcagtggcaatttggagagaaagagctttcggagtgttcaaaactcattttctctccttcattggtttctaggctgcaagtttgcaaagctactgaggctactggtttttaagactactgtggaggtggggtgagaataaggcaaattaaaactccacaaagtcactcttcttactgagatttatgtttgtttgtttttttccttgaataaatgcccctcagattgttgtttgcttcacttccagagttctggaaaggtcagctgtgatcatatttgcaagtgttctcattgctctatggaggagcagatttccagtagtccttactctgccactctggaggtgtttcccagagcccactcttaaccactacacaagtgcttcctaccacactgctaaggtgctttacattttgtaagaatatttttggcatctagtagagtcttcctgacatatatctgctgaaacacatattattgtatgtatatccttttatttctccatttctcccatacattacggggcatgatattgatcttttagaaaattatgtatgtagaaagccatctatggatttagtttcagcctaatgaaggaatgtaaaaaatatttgcttaaaaacaagaagggggcattgctctttgaaggttggaaatcactgccctacactctcctcccgttcctctcaggtacccatccattcctgctgctggaatgtctccaaagagcgcctgaagccctcattccactcaagtctcacttgagagtaaaccaaggggagtttgggggtaaaatgtcagaggtcattgtaataacttcttgggaaattaggcagaaagggaaaaaaagtgggaatcatttaataaaccacatagaaaacactccatatggcaatggaatcatgttctggttaatcataatttttgcctacaagagtcatcatatataccgttagaaggttactagttttaaagtaattagaaactaataaagtatgcaccgcctaggctatactgaatgtaatgtaattccttttggtaattaataatacctctaggaacacgttacaaaaataagagccatcagctgtagaatatcatattcataaatagtttataatgcaaaacagtaactttggtacctactgggtctattggttggaattcttttaacccttttcaataattatggagacacttgtccagaatttattatataaacttttttatacattagacttttacaaacaaatgctctcaaaattcaatattttcttcatgttcagtcaggatattaattcctagcttgctatgccagagtggtaaaagggggtagggcttcattttcaaaatgaacccagcaaagggaacccagaagtgctcagaaagggctttctgctaactaatgatggcaaacgtggtctgtgtgatggggtggcatctactttctgaaaatttttaattttaatttttgttgttttcgttttgttttgttttataacttgtgttttatttttgccaaatttggtttcattccctgcctgttccatttggaggtactacactaaaaaaaaaataataaaacacgtaatcacaccatggggaaaaatgaaaggagaagaaaaaaagaaagctggataatcagcccctaattttctaaaaattgctattaacaaagctgctttacaattctcttgataaatatccaagaaatctgttcttggaagcttaagaagagagtggaaaggctgtactctcaggactaaggaaggactcactccctaaagactttgtggatggaaatttgttcagtactcctgtagtgtgtatgtgagtgaggacatctggactggtatctagccaggatgccctggtagaactgcatttagcgttgatgtcctttccgatgggttgcaacatccatttggttcatgcctgtgtctgagcacttattaatggttttgactatcactcctactacacatacacctcatagtttaatggtggaagctacagcacctgtccaagtgcaccccgccatctgcaaccccctccattgaggtctcttgtgctatatcagactgtatttacacgtgacttctcagtgagacttgcaaaaccccttgccttcacaggacaagtaagaataaacacattcatttcttcttttttcttggcggtcagttgattcctacaacagcatcctttactgagctgggatgcccatggcgccctccatttatctcccatatagcattgctatgcaaatgaggccattcatgactggctacccagggcttccccaggtggctcccagccagagggatctgaagcagctgagcctcagagaggacaggggccctggcctagtctccacctgactggactgctggcctttgacatgacgccagttaacatccaaatgccccttgctggtttcagcactccaacaggctcaaacaatgaatagctgtattctgaaatagtgtcatgctcgcagctccatcaaagattcctgcagcatgcctctttcctctgaataattcctttctgtcatcttccttcattatatttcctaacaagtttttttctaagtccaggctttcatttccactttgaaatgtcttgttagacaagcctcagagtccaccaaattgttcccacttctttccaacaactcccaccccatcctatccccactgcccctgaaatggccagagcttaataatccaggatgtcctgtcattattgtcaacaatattgttgtctgtattcggaatgtattagcagaaccagagaggtagggctacacccatctgctacaaatacacaaatgatttgcaagatagacagtgcctttctttcaccccctgccagttttgctatgaaagaattcaaacccttggtttacagttgaagttggtccaagacatctcctccagggctttctcttgatcttatttgtgctctcccctgagccctaataaagctgcacaaacaaaattacaagcccatatctctttcttcccttttaagaactccttttctctgaaacatttctggacagatagattgtaaatgagatgaccctgtggactgtttaagcagttagttagccaagttaaggtcagtaaaggactccttgtttaaattaaccactttattttcttcaaacacatagcaccctgaagcccatgttggtctcagctgtgttctctgtccagctcttcaccaccccataggctcctatacctctggatatgaccttagccagaaccaagacagattttgaactactgtgctctactgggttttggtaaaataaatacataaataaataaatagtcctcagtgtttcggagggaacctaatacatgtttattatgcagtattttaaatgttgcagaaaaaataccaaagtaagaagtatctattttctaactactcagaacatctgtaacatttccttaacccttctgtaatatgtctctttgtgtgtcgtatgcatgtttttaatgctgcataccaaagtaccaaagtaccacaacgtaacagcttaaaaaaacacaacttatcatcagacaattcctgtgggtcaggagtttggtcactggttgactgggtctctctgctcagggtctcagataactgcaatcgatcagtgttggctgggactgttgtcccatctaatgctcagagtcctcttccaaattcattgaggttcttgaaagaattcagttccttgcagctgtagaactcatagatgcttctatcttctttgaagccagcaggagaatgtctctgctgctttgaatccctgacttgctctgtctctgatctctagacccagacttaaaaggctcatctgatgaggccagacccacctgataatctaccttttaattaactcaaagtcaacagattagtaaacttaattacttctgcaaaatcctccttgacacataaagcaacatagtcacaggagtactagcctgttctgtttatagatttcacctacactcaggggagaaaattatacaaaattatgcaaaaggtagtgggagtcatttaaaattctgctctgcatgtgattttgaaacactaatatgccatggatgtctttcttgcctagtcaatatagatctgcatttttatggctgaatagcattctattctgtttcaaaatacttgatcacatgttggacagttaggctgcttccatgcttccactttccctttcttacaccatgatgaacattcttacataacacacttgtctttgcatttgtatgattatttcccgtgtacaaattcaaagcacatggatttactgaatcacaacataaactatgacgtcccatgtagggtcccccagcaggggatggtgctgctgttctagtgaagtactgcctttggtgaaggttctctgagtcctttgtaccaatactgctgaattattagcatccttgaaaggagttctaaaaattactagctgtcactgcacggaacacacaggaagaaacataaagcagagatgtgttcttcacttgtcatctccatcgttatcctcccaaaggttgttctcatcttgattaaacaagtctcaatgaaatgaggcctttattttgatttctatactgcttctatagaaagaggcaacaaggagatttagaatttttttactttaaagggacacggtaccttttgactgtatagtgagaacttaagtttcaaatgaaggctccgagaacataaaaaaccatgaatcttaaagagaaacaaacaagcaaaggtttaataagaacttccttgctagatgtcctcatgatttatttagccaacacttactgagcacctcctaatgactgggccctgctctagtgctggagatgtgtagaagaataagaccaacagagctcccaaagtagatttatgcactctacaaatgcatgatggaattgcaagatgaaaacagaaaaactcttatggatctagataaagaagctttagaataaaaagtagcatttcaggaatcagttggtattttccaacctggagaatcagtagatgaaattaggaaaagtctgtacggaaggaataagtgtttgagatcaaatatacaacatgttggctatagttaattatactatactatatatttcaaaattgccaggagagtaaatttcaaatgtttgcaccacaaaaataaatatgggaggtaatcgatatgttattaacttaattatcctgcaatgtgatttgattttatatatatatgtaaaatcatcactttgtaccctataatatatacaattatacaattattatgtgtctatttaaaaaattaaagatatgctaaaggaagttttccaacacaaagggaaatgacactactgtatattgaaaattagatcctctgacacgtatgaattgcagcaaaaatgctaaatatctgagaaaaatgctcacgcctgtaatcccagcactttaaaagactggggcaggaggatggcttgaggccaggagttcaataccagcctgggcaacatgagaccctgtctcaagaaaacaaaacaaaacaaaacaaaaaacaggaaaataaatgtctgtaaacattagcctctttcatggaggaacttgggatataaaaaactgagcatgcttaaatagaattgtgtaatgtcagccaaatggaaactcttgaggcacgggtggcttaggacacaattcccctagtcattcctgagtagagaggattgcatggtgaaagagatccccatggctgtggaggtagcaccctctcgttctcttcatgggctgtctgggagctgagccattagctttccacccattgatggaggcccagccctactgggagcatttgcttcctccccacctcacccactgcctgcaagttcctgaccctgttatgaaactcccaccctaaatacacagataacgtctcagccatgagtgaaactagaagagatcatgtgtaactaattagatgtcagagtgagagaaaagaaacttttccccgggtcctggtcatttgaaaagaaatattatcctcaaagaaaagtctttacttgagatctgaagtgcaaagcatatttatcttgttccaggctaaccttgccaaggatatttgaatttaaataaggctattctggagcctattaatctagggtgatggtgtagcagtgaaagccagggggtcactaaacacttcgggtcgtataggaagcaggacggcgtccattcagggttgcaaatgttttattgctgtttttccctgggtccttctgcctgatggggcaaccttcactgctctggagagaggctagcagagtcattgtctaacatacacagtgacctcccttccagcttccaagcaaagatggaggctctcaggtgggaactgacctcatgttcctgctcagagacctccacaccttcaccctaatccacatctgtacccttctctccctgcagaccctgccttgcttcccacatctgtccagggtgttgctctcagcctcatcctcttgcaaccttggtatttcagctcccttttatattcccactgtctctaccttcctccattcctccatgaacatgcctcagtctcttttaatttgaaaataaccgaaacagacttccctgcattgcattacatgctagcccctgccctatcttttcttctgtcttacaacctagatcacttttttttttttttttttagacagggtctcactctgtcttccaggatggagtgcagtggtgcaatcatggctcactgcagccttgatctcccgggctcaagtgatcctcccactcagcccctcaagtagctgagactacaggtcagctaacttctttaactttaatagagacagggtttcgccatgttgcccaggatggcctcaaactcctgggctcaagcagttctcctgcctcggcctcctaaaatgctgggattactggtgtgagccactgtagccagcctctaagtcactcttaaggaagaagctacctctttcttccctcctcattcatttgtcagctggctttgcccagccctcctccaccacccaccaatactcccgcaacctcctcctccgcttcatccaatccagagcatcacaagtgtagacaaaaatgcctcttaggcctcacctcctgggtttcccacaggcactcaagctcatcctgcccagaattgggctggtcatccacccatcaccaccagtcccaacacagactttcttctcttccttttttattcacagtcttggtaaacaaaaccatcatactacttggacaggcaaaagtcttccccaactcatccgagtccctcacatctccctaaacctgtgggttgtatccccaatggcttctctccctctccatggtgctggccacctgaatgcctttctggtccactattgcagttcttcaggggtgggggacagccggggaggactcagctcaatctccagccttgcctctccatccatcttccacgaacagagatttgcaaatttagatcttcttcttaaattattccaatggctttttatagcctaagaataaagcatgaatgtttaatttgatatcaaaggatttcacaatcttatccttacctatatcataggtcagtgttgaagagtgtggatttcagagctctatcactaactagctgtgacctcagcaaggttcttaaccttcctgggtttcagcttcctcccctgtaaactgggggtaattataatagtactgttctttttttttttttctgagatggagtctcgctctgtcgaccaggctggagtgcggtggggtgatctcagctcactactgcaagctccgcctcccgggttcacgccattctcctgcctcagcctcccgagtagctgggactacaggtgcccgccaccacgcccagctaatttttttgtatttttagtagagacggggtttcaccgtgttaaccaggatggtctcgatctcctgacctcgtgatctgcccgcctcggcctcccaaagtgctgggattacaggcgtgagccactgcgcccgaccaatagtactgttcttatagggtgctagggacatcagatgtgttaacatccatgagggttttagaacaccacttcgcactaaggaagtgttatatgtatttgttagtttcgtgcattgcctgccatcaccgttctcctatgaacctgaatgttcaaacacgctatgctccagccacaacacacagcagacagttccacaaacaaaccatgatggctatttcatgccgctgtaactttgttcttcctccttttcttgacctcctaaattcccatttatctttcgagcctcagctcaaacatcacttcccaaatacctggagactttgctccactgagactccatggcaccccaaatcaacacccgttttaccagggatcatttaaattaattatttttcaaagcctgagagttaccatttttgagcacttaacacatgccagtctgtgttcgaaatacatgtattagcttatttaagtctcacagcaaacctatgacagttttgataattggtttacaggtttgtcatttctcctagaagattaccctttatgggtaagaatctatgttttgatcatctctgagtctccagcacctaccaaggtgcctggtgtgtagtgggtacatagtgaaattaatatctcttgaaccaatcaaaaatgggctgcactcagagaaagatgggagcatgggcaaacagctgacattgaagggcgtctaggcacggaacccgtggtagttgaacctgaaattcatcagtgtcataaacaaagactgctgtaactacctcaccacattattaaatctttctttattactatatgaacattttctatagtgctgaggggttaatgtgctctcatttgattctgtactgtcatataatttcaggtcttttcaaggacataataatacaattcatgatggcattttattccatgctcttgcttccagggtcatattcaaatttctgagaagttttccatgacccttagcacttttaataaagggtaaagagagattcaccctgacaacgtattcttcttgttggacacgagatggaaattgtagagaattatagtcaggcataattgttgtagtttctacagtaatagtctaagaccacaaacacaagtattttttgcttaattgctacaaaggaatatgctttttctaaataggaactatattaaaaagttcaaaataaatatttcagttttggttaacttttcttccccaccctgtcggtacctagtaagttctgtttcgttagtcagcagaaaatggttaagattaaaactgttcaatgcactgattcaaatatctttgggtggccttgaagctgctcttagcagagggaaagagacatccagccatgtgagtgtcctgagggatgccaatgagaatgaatctgcccagaaaacccaagtctagagccccaggatatctccaggagccctcagatttggcttaatccattctaataatctgtagatagcatatgcacaggatttggggtcacttttttttttttttgagatggagtctccctctgtcaccaggctgaagtgcagtggcacaatctcagctcactgtaacctccatatcccagattcaagcgattctcctgcctcagcctcccaagtagctgggactacaggcacccgccaccacacccagctaatttttgtatttttagtagagacagggtttcatcatgttggcaaggctggtcttgatgtcttgaccttgtgactcacctgccttggcctcccaaattgctgggattacaggcatgagccactgtgcctggccgtcacttcttgatctcttggagcattgggtgtgatgggaagtttaacctttctgggcttgtgttttctaaggaactaccactgctggaatgaagcatggatgacaaggcctgaccttcctgttggatttggaggctggcaagctgtggacagcaccccccaggaaaatagcgatggtaaaactgtgtcctccctctgggaacttgcttcattgctgatctttgttttgcttttatgcttgcatttgatgtgtgggaaccacgcccattgggaggcaacatctgaagtgtgcttcctgggcacatgtacagtattagctaccttccaatcaggtttaatttcatttccattgtcagctttaccctgattattttacagattttagagaaagaatataaaacaacgtataattcatccattcttgctttgctaagcagttttgaagacaggagagaaaatatctgtaagcatttttactaggctataaaatatacttcagccctttgtggtatgcactggtaagatataaggcaggagagaaaatagagaactcgaaaaataattatagatcatcctttaaattgtttttccagaacctggcctccttttatgtcatgtgatttcctccaaagcttcagtatgtgggtatttgtcttctaacttgccaactatgctaagcagctgcagctctgacctcccccagatttttataaaatcacatcataagcctccatctctctttaatatgataatataaagaatcagtagactgtggatattatgtttatttcctcaggtgttgatatatcgatgggcacacacaggaacatgcataaacattcaatggatattcatactgaaaccatattataatcctaggctttaaggaagaaagtttagcactttctggtgttctggtatatatatcatggggacattttacaggtgactaatagcagctaatctcttattaactatatagataggtggttaaaatttaaagcattttagaagagtaacataggccttctgacttcctaaatgcatggtgggcatggccaaaatgcacaggcaatgtccaaattctccagttaaacttgacatatgttcataatgtccaaaaacaaaagacaaaaagcaaaacaaacagcaacagcagcacaaccacagagcacacatcaacatttccaacatttcagataccacctgaacaagagataaatgctgtgtaagccacctgcttggcatcaacacatctgggtatgtgtctgtaggtggcagagtagatgcaggaatagtgttgccttgtatttatttccatggcttcaatttttggcttgagggggcatagccaatggaattctcttcagccttggaaagcatctgggctaaatcagcaatgaagttgggaacactggtctttacagagtcaccctcagtgccatgaatcttgcagtatctggacagaattggagatgacaaactcacaccgcccttcctctgtgcaatgcaggcatgtatcggtgtggccccgcctcggttcaagccatcaagcacggccatgtctgcttccaatttgatgcaccttttgtttttgcagaggtaagcaggaagctggaggaaagtgctgtttttctccccaacctcttaacacatgaaagagtaagctaaaagttgttgtttctaagttttccaggtacatagcgtatgcttcgtgttgacaaaggtaactaggcattattccaacttccaggctattaatgctaaatgcagttcttgtttaacatttttctttccttgatgttttgggattccctactcccaaaagtaaatgctttactaacattagcttagttctctgcacccattaagtatcaactgctccagagaaattatatgactaatggatctctcaactaacctcattggaagagatgggtcatgaattgaaatttcaggacatgccacttccctctgggactagtccagcaatccaggtaagacaaaatccacatacacacacccaaccatggtcttaccctggcctttgcaatctatgtcctgccatcccacaccatcacctgtggccagggagggagggttgagttgccaaaggaggaaggggagcctggaggctactctaagagaggaatacagcccacctacagggttgatgggaatgcctgggcaaaggctctgccatttcagaagaactaggcagggactggaagcagaacaggctgttaaaggatactcaaggagagctctgaaaatcaaattaaatgtaagagatgttgggtaaacgagaaggctgggctgccggcctaggaagacttgaaagactgagaggcaggacttccccagggtatatttgcaccagtaaatacactgaaataatgtctttcactttgcctaccattggatgctcttagcaaccttctaaaattgataattcttcccattttacagaaaataaaatcgaggcaaagagtgattaagtgactttctcacaaccatctagctaataaatagcagtgctaagatttgaagccaggcagatacctgaatgcatactggtaaccattgcactctagtactccaggaggaacaaatagttattattaatgtacaccaggcattgtactggggggaattctaaggttcaagtctttaagaaacgtatttctagatgccaggtgacagggcacaaacacactgaacatgaaataacaacaatacttgtcaggtgggccatgtagagagcacagatctgcattcatatgatgcatgagttgggaagtagaggccaagaactgaagcaggatggcaaagaccacaagacaccatctaggaaggaagggcgacctgggaacagacagtgaggatgcctgtggaagtgtccccaggtagtaagagcagagaactgtgggaccacatgggaaggagggatgattaggcaaaatgattagaaagaagccagaggaagggaggagtgcaaagcagggggatgagttgagcatctgaaagctttgtgggggcagttgaaagctgtgcagactcactagaacgccaaggatgcatcaggggtgttggaaggtggaggctgaaggaacgcagtgcagaggacctccctgagagacttgctccttgtccctcctgtaagtgagggagagttttcactgggtgggaacttgggcaaggtgctgacagccttgtggaacacggattggaggggttgttatgaagttgtggggaacatctagagggctggtcatccctccaagccagagatggaaagggcatgagctagacaaatggcaataatgaggaaaagaggaggcaggactgagaaatgttaatatttagaaagcaaaacgaacatcaaaattcagacagcaagatcaggaatttgaaacacacaaaagaccagtgttcatctcatcgtacctgccgtggcagtttacagaagcctttggagaccaagcttactggacttggaattttatcccctcgttttcactttgggatttgaagatttccacaaacctcccagctgtcatttgatagtttatgatgctacgagagcccctaatgaggagatcactctgaaatccacaaagccttgttttcagctttttattacactttattgctgcaaagaaggagaaggaggacctccctccacaagcaagctgcctaatagctgtaaatgcaaacactttttgctattattaaatatagatcggggtgttatgaatgtcatcaggatttgcagattataattactcctttctcacccactgcagaggcgtgtctgacagagggtacaatttgttgctttggcatgggctgcgctccaggggctgagccatttttaagagatgtttgagttgatgaaaagtgtatgaggaatcttttctcaagggtgcctgcagtgggaccccatggggagtgtcatatgagtcgatatgactcaggttcgagtctgtggctctctctgctctccctcgtccttgctgcatcagctcgccttctcttccctcccagcatgctgactttcttggtcattccttactcatttccaggcttgatcaagcatcatgttcattgactgttttttagtgttcccagggccttagtctccatgagtgaaagcagagcctaaaaagaagaggggtatgcctggaaaatgtcttaccttctgttccttttttctctcctcctccactttggaagttcaccctccacatttctgggtttctgccagggcttgaagcttatttctcttacccctcccttcccatgtcctccctgctgcagtgggttcctgtggatctgaagccccatctgcctatctccccagcttatggtggcctagggcttccaaataggtgagaggagatgagagctgttctaagcgtctggagtcgtattccaagattccatgttcacgaagccctcaggggttcttagtgaagaactctctccttcttgccaaagataactctcttctgtcctaacttctcattaactctgctgccctctttcacaccactccaccccaaactcactcacatacacacacacatgcatgcacacactcctgcctgccctcactggcgctgagatgattttgacaggagcaataactggctccctgggaccacagcaaccatctcatcactcaagaagctaagccctcctctgctgtgggccagcagttctcttatacaacgtgtggagatgttttcctgtagattattcattctcaattcaaacttatttattttgctactatcttatcagatgcagcctatttttttggcatctcctacttggctataaaataatccagtcatttattcaaatagcatacaaaactttggaattattttagctttccttcttaacctcccttatgcatcttgccaaaaataccttcccaaaattatcataaatccagccacttctacaatctctatcgttaccctctgagctctgtacaacactgagctccataaagttacctcctaactcctcctaactcatctccctgatccccctcttgctccttttctgtctattccccacagagcaagagaattattctttaaatgtaaatacaaacatcacactcctgccccaacccttctggtggagttccaccacccttacaataaaactgaacataaattcctacaagattccatggcttcccttccacttcatcccttgtttatttccctccagccatactgagatttttctcttcagaaagcatccacacatcctcttgtgtcagcacttttagacatactgctccttttgctaggaaagctcccctcactatctttcactctgtgtaggaagaatgctttgcatgctttgttccctctctgcattcaagtctctgctctggtcacctcttcaaagaggccttcgctcacccaactgcacctaaaatatcaccatctgccctgttgttttcatcctccaaccttagtgtgtactccatttctcccttctagaatatgagctccatgaaggtagaagctcttgtaaccgcattgctgagagcaggatctagggtccagtgccaggaaggcattcactgcctccatatgccctctgagaagcagcattttctctgcagagcctgcagacaaggttatctccacttggaaacaaataaacaaaccaaagcaaactctgtccagggtcctgaaagcaagagcacgtctctagcctcagtggtgaagagcatatcttctgccacctgtggacaaatgttcacattctatgggcccaggtggacatttgcagagagcagcccccaagcctgctttccaccccacctttactgagaagctagggccctgaccaatggtagaggctactatgtaggaagtgcctgtacttaagaggcaagggtgtggtgttgtgaaaaaaatatccaatttcatgcaccaatgcccagattttgtgtgatgataacccttcaagtgtagggatagaaaaaggggatcactaacattacattcaaaagaaggaagaaaaattagccgtaaatgtagggctttcacaagtagtaccaatctatccaccagcccgacaaggaaggtaggctcagagagattcagtaactcggagggaggagccaagatggctgaataggaacagctccagtctacagctcccagcatgagtgacgcagaagactggtgatttctgcatttccatctgaggtaccgggttcatctcactagggagtgccagacagtgggcacaggtcagtgggtgcacgcaccgtgcgcgagccaaagcagggtgaggcattgcctcactcgggaagcacaaggggtcagggagttccctttcctagtcaaagaaaggggtgacggatggcacctggaaaatcgggtcactcacacccaaatactgcgcttttccgacgggcttaaaaaacggcgcaccacgagattatatcccgcacctggctcggagggtcctacgcccacggagtctcgctgattgctagcacagcagtctgagatcaaactgcaaggcggcagcgaggctgggggaggggcgcccaccattgcccaggcttgcttaggtaaacaaagcagccaggaagctcgaactgggtggagcccaccacagctcaaggaggcctgcctgcctctgtaggctccacctctgggggcagggcacagacaaacaaaaagacagcagtaacctctgcagacttaaatgtccctgtctgacagctttgaagagagcactggttctcccagcatgcagctggagatctgagaaggggcagactgcctcctcaagtgggtccctgacccctgacccccgagcagcctaactgggaggcaccccccagcaggggaacactgacaccttacacagcagggtattccaacagacctgcagctgagggtcctgtctgttagaaggaaaactaacaaacagaaaggacatccacaccaaaaacccatctgtacatcaccatcatcaaagaccaaaagtagataaaaccacaaggatggggaaaaaacagagcagaaaaactggaaactctagaaagaagagcgcctctcctcctccaaaggaacgcagttcctcaccagcaaaggaacaaagctggacggagaacgactttgacgagctgagagaagaaggcttcagacgatcaaattactctgagctacgggaggacattcaaaccaaaggcaaagaagttgaaaactttgaaaaaaatttagaagaatgtataactagaataaccaatacagagaagtgcttaaaggagctgatggagctgaaaagcaaggctcaagacctacgtgaagaatgcagaagcctcaggagccgatgcgatcaactggaagaaagggtatcagcgatggaaaatgaaatgaaagaaatgaagcaagatgggaagtttagagaaaaaagaataaaaagaaaccagaaaagcctccaagaaatatgggactatgtgaaaagaccaaatctacgtctcactggtgtacctgaaagtgatggggagaatggaaccaagttggaaaacactctgcaggatattatccaggagaacttccccaatctagcaaggcaggccaacattcagattcaggaaatacagagaacgccacaaagatactcctcgagaagagcaactccaagacacataattgtcagattcaccaaagttgaaatgaaggaaaaaatgttaagggcagccagagagaaaggtcgggttaccctgaaagggaagcccatcagactaacagcggatctctcggcagaaactctacaagccagaagagagtgggggccaatattcaacattcttaaagaaaagaattttcaacccagaatttcatattcagccaaactaagcttcataagtgaaggagaaataaaatactttacagacaagcaaatgctgagagattttgtcaccaccaggcctgccctaaaagagctcctgaaggaagcgctaaacatggaaaggaacaaccggtaccagccgctgcaaaatcatgccaaaatgtaaagaccatcgagactaggaagaaactgcatcaactaacgagcaaaataaccagctaacatcataatgacaggatcaaattcacacatgacaatattaactttaaaggtaaatggactaaatgctccaattaaaagacacagactggcaaattggataaagagtcaagacccttcagtgtgctgtattcaggaaacccatctcacatgcagagacacacataggctcaaaataaaaggatggaggaagatctaccaagcaaatggaaaacaaaaaaaggcaggggttgcaatcctagtctctgataaaacagactttaaaccaacaaagatcaaaagagacaaagaaggccattacataatggtaaagggatcaattcaacaagaagagctaactatcctaaatatatatgcacccaatacaggagcacccagattcataaagcaagttcttagagacctacaaagagacttagattcccacacattaataatgggagactttaacaccccactgtcaacattagacagatcaacgagacagaaagtcaacaaggatacccaggaattgaactcagctctgcaccaagcggacctaatagacatctacagaactctccaccccaaatcaacagaatatacatttttttcagcaccacaccacacctattccaaaattgaccacatacttggaagtaaagctctcctcagcaaatgtaaaagaacacaaattataacaaactatctctcagaccacagtgcaatcaaactagaactcaggattaagaatctcactcaaaaccgctcaactacgtggaaactgaacaacctgctcctgaatgactactgggtacataacgaaatgaaggcagaaataaagatgttctttgaaaccaacgagaacaaagacacaacataccagaatctctgggacacattcaaagcagtgtgtagagggaaatttatagcactaaatgcccacaagagaaagcaggaaagatccaaaattgacaccctaacatcacaattaaaagaactagaaaagcaagagcaaacacattcaaaagctagcagaaggcaagaaataactaaaatcagagcagaactgaaggaatacagacacaaaaaacccttcaaaaaattagtgaatccaggagctggttttttgaaagaatcaacaaaactgatagaccgcaagcaagaccaataaagaaaaaaagagagaagaatcaaatagacacaataaaaaatgataaaggggatatcaccaccgatcccacagaaatacaaagtaccatcagagagtactacaaacacctctatgcaaataaactagaaaatatagaagaaatggataaattcctcgacacatacactctcccaagactaaaccaggaagaagttgaatctctgaatagaccaataacaggatctgaaattgtggcaataatcaatagcttaccaaccaaaaagagtccaggaccagatggattcacagccgaattctaccagaggtacaaggaggaactggtaccattccttctgaaactattccaatcaatagaaaaagagggaatcctccctaactcattttatgaggccagcatcattctgataccaaagccaggcagagacacaacaaaaaaaagagaattttagaccaatatccttgatgaacattgatgcaaaaatcctcaataaaatactggcaaaccaaatccagcagcacatcaaaaagcttattcaccatgatcaagtgggcttcatccctgggatgcaaggctggttcaatatacgcaaatcaataaatgtaatccagcatataaacagagccaaagacaaaaaccacatgattatctcaatagatgcagaaaaagcctttgacaaaattcaacaacccttcatgctaaaaactctcaataaattaggtattgatgggacgtatttcaaaataataagagctatctatgacaaacccacagccaatatcatactgaatgggcaaaaactggaagcattccctttgaaaactggcacaagacagggatgccctctctcaccactcctattcaacatagtgttggaaattctggccagggcaattaggcagaaggaaataaagggtattcaattaggaaaagaggaagtgaaattgtccctgtttgcagatgacatgattgtatatctagaaaaccccattgtctcagcccaaaagctccttaagctgataagcaacttcagcaaagtctcaggatacaaaatcaatgtacaaaaatcacaagcattcttatacaccaacaacagacaaacagagagccaaatcatgagtgaactcccattcacaattgcttcaaagagaataaaatacctaggaatccaacttacaagggatgtgaaggacctcttcaaggagaactacaaaccactgctcaaggaaataaaagaggatacaaacaaatggaagaatattccatgctcatgggtaggaagaatcaatatcgtgaaaatggccatactgcccaaggtaatttacagattcaatgccatccccatcaagctaccagtgactttcttcacagaattggaaaaaactactttaaagttcatatggaagcaaaaaaagagcctgcatcaccaagtcaatcctaagccaaaagaacaaagctggaggcatcacactacctgacttcaaactatactacaaggctacggtcaccaaaacagcatggtactggtaccaaaatagagatatagatcaatggaacagaacagagtcctcagaaataatgccgcatatctacaactatctgatctttgacaaacctgacaaaaacaagcaatggggaaaggattccctatttaataaatggtgctgggaaaactggctagccataggtggaaagctgaaactggatcccttccttacaccttatacaaaaatcaattcaagatggattaaagacttaaacgttagaccttataccataaaaaccctagaagaaaacctaggcattaccattcaggacataggcatgggcaaggacttcatgtctaaaacaccaaaagcaatggcaacaaaagccaaaattgacaaatgggatctaatgaaactcaagagcttctgcacagcaaaagaaactaccatcagagtgaacaggcaacctacagaatgggagaaaatttttgcaacctactcatctgacaaagggctaatatccagaatctacaatgaactcaaacaaatttacaagaaaaaaacaaacaaccccatcaaaaagtgggtgaaggacatgaacagacacttctcaaaagaagacatttatgcagccaaaaaacacatgaaaaaatgctcaccatcactggccatcagagaaatgcaaatcaaaaccacaatgagataccatctcacaccagttagaatggcaatcattaaaaagtcaggaaacaacaggtgctggagaggatgtggagaaataggaacacttttacactgttgatgagactgtaaactagttcaaccattgtggaagtcagtgtggtgattcctcagggatctagaactggaaataccatttgaaccagccatcccattactgggtatatacccaaaggactataaatcatgctgctataaagacacatgcacacatatgtttattgcggcattattcacaatagcaaagacttggaaccaacccaaatgtccaacaatgatagactggattaagaaaatgtggcacatatacaccatggaatactacgcagccataaaaaatgatgagttcatgtcctttgtagggacatggatgaaattggaaatcatcattctcagtaaactatctcaagaaccaaaaaccaaacaccgcatattctcactcataggtgggaattgaacaatgagatcacatcatcattctcagtaaactatctcaagaaccaaaaaccaaacaccgcatattctcactcataggtgggaattgaacaatgagatcacatggacacaggaaggggaatatcatcacactttggggactgttgtggggtggggggaggggggagggatagcatagggagatatacctaatgctagatgacgagttagtgggtgcagcgcaccagcatggcacatgtatacatatgtaactaacctgcacaatgtgcacatgtaccctagaacttaaagtataataaaaaaaaaaaaagagagagattcagtaactcatccagagccacacagcctaagtccaataatccttgccatacactctgaacttatctattgttctaccatagagcgtcaattgattttgggtggggccaatcattccatgcttttttaagctcctagatgattccctagtacaaccagaatagagaaccattccactacaggccgaaaccaaaaagaaagcttgctaatgtcgcttggaaagaataatttccctccacatcccaccccaacacacatatacaaaagccaccccatacaggtgtttctcgtctcctctctccgcaaaggacagtgctgttggtctgtcctgagatttcagcctacaggaatttctgaagccatattcaaggtgggggggcaggaatcagccactttcatattttgcttgtttccctggaaaaccacaagctgttataaggattgttattaagaagttatttatcattattgttgctacgatttgaaagtagagggggtcgctgtttgtacttacatggcttcctccagagggaattcccgaattctcagacagctcatttaaagcttccaaaatgacaaatattccacaggtatctgctgcgtcctctcctgtcctgattcctgacttcacatttcagcctttcacaacatgtggctagcacccctgagttctggctgctctgctgaggggcagggccaccgtttatcaccctcagaaatctgagccgcaagtgtggaaccatctcaccactcaagctggggctcatgctcccgcagggtggtgtgggaaaggcggtgtgccgtgaaggccaagggccaggttatgggctgtcccagggcttgagctgcttctccagcagctcctagccatgaaaccacaaacactttgcctcccccttctgagtcttggtgccctcatccataatacggttacaatatatacctcacaggcttgttgttgtgaggttcaaactaaatcctttataaaatgtccctgaaacattgtaggtatgcaacaaatgttggctatctcccccttagtagaaatccgacttcatgtgcactcagaacattctgtgagaaagtaaaattgctctctttaacctcaactttaaaacctagggatatatcttcaagtttccccattacctaatgatgactattatatttttactcaattttgaaatttacaagtcatgttcacatagatcttatctcactctggcctaaaatgctcccataaaattggcagaacaaatttaatcatttttattttatagaatcaggaactgaagttcatagagattaacatgcactttctacaaggacacacccactatcggaacccaggtttcttgcagcaaatctagtattcctctcaaatgccatctaggtttcaccttggctgttactttctagccaacccttgactccactgccccatgtgctcccaaagtatcttgtacttattctttcatggtacttatcgcactgtattgcagggcttctcaagcctgactatctaacagaattatgtgagactttttgtaaaatataatggatttagggcctcacgtgatttaggtcccacctccttaatcaggcgtctatttttgtttaaagttctccaggtgactctgatgcacagaatcatgcttactaaagcataaactctctaatggcagcaaccaaatctattttgttcatcattaggattctgaatccttaaacaatatctggcaatactattcaatattattatcaataacatttactgagcatttactctatgccagacactatgataagtaatgtgtgtgcatttgtttctgttaattctgccaatcgtcctatgaagaaggagttattatcaccctatttaaagagtgggtaactgaggcttggagaggagcttgggaaacatttagtaaatacatcaatgactattagcagtacaattcatgcttcctacctgcttccatgataataactggaaccttcaagaaagtgattataaaatatgtaataaaggactctggtacagtcagctttcaggcacacattagtcattgtctctagaaagtagaatagtaaagcagagccttgggagagcttgggggcagacagcatggccccaagacactatttctgagtcccacaaatagcacattttagttgctgaaccaatagaaaatagcctgaattcctcctagatcatctaatattattgttcaatttaaatacttttggcttcaagtagcagaactaatgtggctgaaacagatggggactgattttctcatataagaaatcctgaaataggtggtcctgatgcgggcttagccatttaacagcatcattaaggcccccaaatccccaaacgcctctcagctttctactctgccaccttctcattgtcagcagtgtttctgttcactgtctcacgatggccacagcagcttcaagcatcccttcacctgaaaacacctgaaaacagctgaaagcagaaggggaaggacaaactcatccatgtacctctctcctttttcaaaggggaaaaatgtttcccagaagccacctagcagacttcctcttcctcctggcagtaggtcacatagccacagttagcccaaaagaagtccagggaagcaagcgatgggcatggtggcatggcattgtcttctctcctgtgagaggtaggacttatcacaaggacagaggagggagaaaaatggttgcttcttagacagtttattatctcagcctcaaataatctttatttaaagtactactaaatcaactagattcgcctttagaatattttcaaaacctgtttggccctatgatacgaatccaatgttgttgaagaaaggggcatgtcagctccagagatctctagacgactgctctatggacagttaaagactttggcaacagcagacatgtgatgatggctaatgctctcctctcctgtttccaggtcaacagcgacctcatttacattacagctaagaaagatggcactcatgtggtggaaaatgtggatgccacccacattgggaaattaattgtgaccaaacaaattggaggagatggcatgatggatattactgatacttacaaattccaagaaggtaatttactaccactgaatgaagatttatttgcccaagtccattgagtacttattcattgtcactcagagatgagttccagagaatgcactggcatttgcagcatttggtagcaacagcagaagtataaactttcacgtgtgaaagacacgtcacatatgcaatttttcattgtagttttctttgctagcttgctttgggcagaattctcattcacgtggcttgtaaaatgatttggtttaaagtcatacctaatttaacagaatatagaatatgttcttgctcacaagaaccttaattttaaataatcctattagaaaacactgtataactaatgtaattttagtccaataatagaaattaaaataactacttcacatttgtttagtactttaccaattatttccacatacattgttctattacattatcatggaagactacaacgtagataatacaatattaataggacaatgcaatctctctaactcaggacaattaggtcgaaggccagtttcaattccaaaataatgtcatggtgggtttttgttaacttttattgcatagaatgtttcaaatggcactactgagtttaattctatctcaatcaatgcttagtgtccgctctatgcctgcaattggtttggtgctggcgattccagcagtgagcaggactcagttcctgtcctggtccgagtgacaggattattgtgcagaggggtctttggaaacaataagtaggggcatttagtccaactgattcagaaaaagacttgagaagagaagtcgtggacctcggttaaagaagctggacaggggtttccagacagtgtgaacatgaccaaagttacagggcgtgcagcagcccggtatgtttagggggatcctgcaggctcagaatgcccagtgactgaagacaaagctgcccgaggccagcagtggccagaactggaggaccgtgagtgtcctgatggggaacatgcaacatattttgcaaatgattcactgccagaggttcttaggagtatttatttttagtaaatggataaaaatgacaagtaattagcatatacctaaatattcattggaatccatgaagtgctaaggagtgcagaatttattttaaatagtttagacagtctccctgctcttatttacaaaagtaatttgcactacaaagaagaagcttgctgaattgagaacacttgtgcatagtctcagaaagtcagaatttttgttatctgaactagtgaattttcactgtattttttaaatgcttcattttcctcttctgttggttatcatccattgcacaacacagatacaaaggtggtatttttttgtcatttggatttttccttaaaggaaaatttaaaacaatataagtgcaaataaaacaaaacaaacaagcaatgccctcttactgtagagttataagcaaaaaaaggtttggagaaacaaaaaagcaagttcatagaaaagttagctgcaacatccactcattcatacatacatccacacgacagctggctcttaccatctgccatcttccagtgctgtgtagagctggatacatgtacagccctgccttcccatgcagctggggagaaaagcagaaggcagccctcactgtgctgggtgagaattgctctggcacagggtggacgggtgctgccgggcacagagaaaggctctcagccaagaatcggcagttggggaagacctcgtggaggaagttagtgatgggctcactaagcccaaaggacacacaagaattggcagatgaagctggggaaagaggtccccaagaaaaggcagtaaggcaaggactgtggtgagaactctcgtatttggaagaagtcctgaccagacagagtagtgaagaaaagttgcacctacaggcagctaggggcagcaggaagcgagctgtccacatgacagatgtctcttggaaaccatggagccgagcacagctgccattagctgtcagcatggaggtgacagtgaaggccaactcaggaatgggacagaatcagatgccacgagaggaaagactaaaacccagtccacgaaacaggagtcaggggcttggctgggggtggataacaaattaaaacaaaatgtgtccgcactgcatgaggaagacatctgaggtccaggcctctagagtttagcaaggaggcaaggctgagggagagggacagtgtggaggtctggtccaactagaagaatccctaaatccacatagatggttgtaagcgacgactcatcctgcttcggggctggagtttgaccccaagtggatagtttcttaatcaagggtggcatacacatttcaaactggaactttggaagtgaccaagtagaatgttgttttgagaagaacaccaagactgcatctgaatgtggcgggtagaaggattgatggccgccattggccactggcatgcagtgaggactcgtcatatccgtggctcagtacttaccaccctgattctcaccgttgaatctcttataatttctctgatccacaaatgctgagtgtagataccaaaatatggaaatgagtagaatcacaggaaacaaattattactagatttaggacttaactattttaatgaattaaatcatggaaagatcaggttcacttcaacttactaaagcttattattaactttataacttttttcaagatatataattaagaaacgataagactttgaaaatcagaatttctgaagacttctcctgtggcaatatatcttctttgataacagtgtcttgattccattccctctttgctccttcagttacttccagggtcactgttatttccacctctccctctctattttctccttccaatcagcatttaagcaggctcaaatatctgctgtgttaaaaacaaaaattacaaaaatctttttcaccactgtctcttcctcctcgcctccttgccgtcctggagcgctgcctggacttgcgtcctgctgtgttccttctccactccttccgcgcacactctgtcctgatttctgctaccagcacttccttgaagttgttctcaaggttgccaagaccacccaattgtcacagggaagaaacattttgcagacttcagcttacttgaccttcctatacttcctggtgctgttgttcactccctttgcttgcaattctgtcttttctttgtttctacaatgttactttctcctggttccaccccctcctgcctgaccctcttttcctacctctttttgactataagcttttcccctttcttcacccttttcaaattccatttcattctaggcatctatccttgggctccattcccacccacctgatgttcttcccacatagctggtgttaatgttcacatatgtaccatcaccccatgtctgtgtctccaccgggactttacctaaatgtcctacagaaacctgacacggaacttcccaaatgacacctctcactctctccctcacctcaggtccgtttctcccactccccctactctggtgaagagaaccaccatccactcaaatttagctacttaagaatgagttaagcaacaaatcctctaaatgtcccctctgaaattgttctcgaatgcatcccctcccctccagctctgtagcctaaaaattaaatattatctggtgtgtacaactcttaatatagtgcctgacacataataagtgtccaataaaagtttcccctattactagtaattctgttattcctgccatactactgctattagtttgggctatgattagttttctcctggaaaaatacttgctctagcttcccaattccacctcacctcctcaggccctccttccctcagtctagcccctgccttgctgccaaagtaatatctgaaatataaacctgagcctctcccagcactgcttaaaagccccacccccccccccctctccctgtggcctccagggcatccagtcctaactcacaaagcctcttgctaagtggcttttcggcacctggtcactgcacctcctgagcatgcccccacaggtattgtatgcagaggccagggacctgccagcagttcctccaacaagccaagccccccacctgcatccctggtcttgccctcgctccaaaaactccgagaggcctcccatgccccttcctttccccatgcactgcaggccaacctccgtcccagcatctgtggtgagcacctgtgtgctgccattgctcttcacgtgttccttctgcaccagtgagggaaagactgtttctcctctgtgcctagtgcctagcacggtgtttggaacattatggggtttccaacagcatgagatgatttgaatgaatggttactggggaggcactttcacagctaggcttagttgaacataaaatgtcctaaactggactattatgaagaggaaagttttgtctctggctgaaagcaaaatgcttctccaaacctcaatccttcagatcctctgtgccaggctgggtttcagggcctggggatgcagaggtggacaacatgtctctgttctcatggagcttgcattccagcaaggaagataatgtcacacagtaactagtactgtgacaaggaagaggaaataaaaccaggtatgtgttagggagagccgagaacactagggtttgaggacacattacacaaggtaagagggggaggacaggggaggtgacagtggagctaaagccagaagaatgagaggcttcgtccaacataaaagggctctcttattacatcctagttaatggaaagatatttttgactttgcacccagaggctgcagaagaatctcagaaaatataatctggctttggatatgtctctcactgcactaaaatgttgcctgtggccctgaattatgtaagatgccagagcacgcagcataactgtagagaaacaggaattactctgccaggctctgggaaagccgtgcagttgttttctcctctctgggcctgcgcttcctggaacagccccagcctgcttctgtttggcggtctccgctcacagaggacagtgcttccccagaaggaagctccaggttcctgcacccatggcaggctgtgaagttgcttgtggctggcttcaaggcttcttctcccattcacctcaccttggccagctcagctcctctctgatgtgttcctgatgctcgaatttccctcctgcattttgcctcaatgcatctctggcccgcatccaaagtgatcatcattaatgttctcttctcatggatctattggccagatgatttctgctaaaagatttcactgcacttcccttgtcctcactcctccttccctttttcttacctccctccgagtgctctagctgatgcttgtcctagaccaactgttcctggcacattcttgcagtcttgacaatcagggaaatcgttaatacacacacacactacacattcacattcgtatgcaatgccttctggcattttttctgtctttgcagagtagcttccatttattatatatctacttcctctaattcacctaataaacctaggatgtagacacccttattttacaaacaaggaaagtgatggtaataatagtgtctgtcttatagtgttgttatgaggattaaatgacacaatgcatcataagcacttatgccagtgcttggcacagagctagccctcagtgagggttctgatgattcattgacctctcagtcaccattgcattttattattaactagataaagtagaagacaatacctttaaactagcataattataaaagctaggattcttattttaaagtgatttttttttcactagccattctcaagcctagtttttacaagccaaggaatttgccttcatcttctcatctctatccttagggatacacaaagataaacccaaaggtatttaggatggaaaagaggatgatgaccatccctcacatctgcatgagccctgtttccaagccaaagccttttgtccaaggctctgtaaggaccgttctcccaccttcccagtgtctgaggcataagctccttctgaggcctgacttgtatctgtattttctgcctcatcacttagacaaagctatgtttttcttcttctggaggttaccctcctctttttcctcccttcatctccaccacaaccactttgcaaaccctgcacaaaacattttcctaaaagcagcacacacacctcgaactgcattagaacttaggtgcaccaccgcctgtcaacagatgtccctcaaaaaactgccctccgtgtcagatgagtttgggaaaccttgtgtaaagaaaggcaaagaggtgtccttgctgctgggcttcacttagaacctctaatttgctaattaaggtggagaacatctccaggaggcgctggacaactagggcatctccaagggatctgaccggagcaccttgggcagggtcgcctttttaatgtcttgccagagcccagcatccttggggactgggggatgcaagttttggtagaaccttctgccatggcatgggtgttgggggcaatggcaattgagtgagatagggaagaacggggcaggagccctcaagggtcagctcagcaaacagcaagtgggacaggcccaagtggaaggagagatgaggaagacaggtcttattggggggcaggtattcacaaatcagagagaaaagttacattgcaggaggtggaatggcaagaggcaattatttccaattattagaggtccccaaattctagccacatggctgggactaagaaaagcaagcaaactgacaccacagtttaagaaaagatagacattgccaattttacctcccaccccctgaaatagtggccccggagaaacccctttctggatagatcccaacactgtcacctcctaacttgcagcctaggctggtcactgactgtctggcaatctgactttgcagaatttataacataggaataatgacggcaccctcctcctggggaggtctgaagcttgtattatagaaacaccccaacaagtgcagtacacggtgcatccattaatgtgactttctctctggtggattgtatttttgcctgtcattatctctggatctcccccaggtcaagaagaagagagattggccctagaaactgccctgatgtacggagctaaaaagcccctcaacacagaaggtgtcatgaaatcaaggtccaacgttgacatggactttgaagtggaaaatgctgtgctgggaaaagacttcaagctctccatcaccttccggaacaacagccacaaccgttacaccatcacagcttatctctcagccaacatcaccttctacaccggggtcccgaaggcagaattcaagaaggagacgttcgacgtgacgctggagcccttgtcctgtaagctaacaatggtgtggttctttgtgagactcgctgtctggcccctgtcttgctaggtgttaatgcccgttatagctttatatcaaagttaaagttccctccaagatctcagaagtgtgagcctcacagggagaacccactcattctgcaaaagcctccactttcttctttttttttatttttattttttgagatggaatctcgctctgacacccaggctggagtgcaatgcgatgatcttggttcactgcaacctttgcctcctgggttcaagcaatcctcctgcctcagcctcccgagtagctgggattacaggcacatgccaccacgccaggcaaatttttgtatttttagtagagacgggatttcactatgttggccaggctgatctcaaactcctgacctcaggtgatccacccacctcggcctgccaaagtgctggaattataggcgtcagccaccgcactcggcccaaaagcctccactttcatcctcacgtctcatgcacagaagtgaacattgaaaatttcaaagcctagagccccatgagttgtgagaattaaatgtaacttcttgctactcaaagtgtggtccatgagccagctgcatcagcattccccaggagtttgaaaaaaatgtagaatctcatgtcccaccccacaccctctgaatcaaaatccatgttttgacaagatcccaagcagactggagtgtacaggagagtttgtggagcatggatctaaatgatccatctcagaaacaggccctctgctggtgcctctcgcccaagttaggaaagtcttttgggggctgtccagaatgaatagtgtgctttgctttcccattcaaaaagatacacgcgctgacataggccgcttcttaaaacgctgtctcctgtaatctcagcactttgggaggctgaggttagcggatcacctgaggttaggagttcgagaccagcctgactaacatggtgaaaacccatctctactaaaaatacaaaaattagcccggcgtggtggcaggcacctgtagtctcagctactcaggaggctgaggcaggagaattgctcgaacccgggaggcggaggttgcagtgagctgagatcgtgccactgccctccagcctgggtgactgagcgatactccgtctcaaaaaaaaaaaaaaaagaaaagaatggaggctggaaacaaagctgtgtcatctaggaggggcctaggaagaggttttctgcctctgccatctcttgtggggcctctttctcgtccttgcatgcacatccttccaagcattttcatcactgtaaaaactcagaatattttaagcagatcagggtccacgtgctacagcttgccttggggattacaatctcaaaaaatcacatttcctaggatgttcgtatttggtgggcacaacagttgaccacacgatgggcaacacaagtccattggaagaaactggtctctaggcagagaatgagttagagcaggttgcaaaggacctcgatactttggggcaccaatttctgttggcctgacatggggcactgaagagaaaagtgtacaaataataattttgacaaagcaaaggcaagcaaaactaatacgctcccctgggatggtcaagccacaagtctgaattgctctcaagctctctggattttgtggctgtcacagatcatggtccccttactgaggttttggaaaatattcccagaaaaatgagaaactattttttaaaatcctaattccaaggaacttactcaaatttgaaggaagcaaatctccccagcttcagtaatggagctaacaattaagaaatcactatagtggggccaggcatggtggctcatgcctgtaatcccagcagtttgggaggctgaggcgggtggatcaactgaggtcaggagctcgagaccagcctggccaacatggtgaaagctcatctctactaaaaatacaaaaaattagccaggcgttgtggcaggtgcctgtaatcccagctacttgggaggctaagacaggagaatcacctgaactcaggaggtggaggttgcagtgagccaagatcgtgccactgcactccagcctgggggacagagcaagacttcatctcaaaaaaaaaaaacactatagtgttttctttggaaactaaaagctttggcacttttcctattcctagggtagtaaaggtaattttcatggaaaagaatagtcagtgtaaaggactgaagaggacaacagtcatggggattgtttaaaacaggcagccacatttgatttcagagagttttgcaaatagacaattctggatgtaagcgatgactgtgtcacctaccagctgtgtttcctgagcaaggtacttaagcactctgagctgtctctcctcatctgcaaaggggaaaaacagcacacacaccccggggttcttgattcattcccctaacctttatttagtgcttgcaagtccaggttctgttttatgctggagacacagcaatgcctattcttactgaatttctgatctcatgggggaaccaaacaaacaagtgaatctatagtatagttatatgggtaatagaaaaatacaaagcaggttaaggaaaacggggagtacctgtggagatggtcagaaaaaaaaccctctctaatggggtgacatttaacagagacctgagtgaaggtcagaagtgagcattccagccagaagaaactgtatgtgcaaaggccctggggccagagcatgtctgatgtgttcaatgagcaggaaggagccagaatcaggaacaaaggtggcaagggggcagtgctgggtgcagaccatataaagaattgtaggcctttataaggcctttggtttttattttgagtgagctgaggagcctttagagagttttgagcagaaatgtggcataatctaacttaggttttgaaaagaccactggctgctgtgttgagaagagactaaagaggaagtagggcggaaggttagagactggtaggatgcttctgcaatcactccactgaaaggggttgatagcagtgatggaagcagcgagaaccagtccgatctgggcatgtgctgaaggtggagcccgcctgattggctgagagactggatatgtggtgtgagagaaggaaggtatggaggaagccaaatgagtgatgaatgtgaaatgtgtgccacatggtagaatcttagtaaatggtaacttccaacatgtttacatttggggaaactgaagctcgagagatgagtcgatgtgttcaagcccccacacagcaatgagaggcaaagcagataatagagtagacagataatagcagtgacagtgagccagttcagggtaaacttggccccaagtgggccaggtcccttccttgtgctcccattacctggagtctagcacagatccttagacaaagaaccaaatgccagcccttttcccacctcacaagtgtcctgtctcataatctccttccccttccctctttaatccaattaaagaatgagcttgtatgggtgagtagaatgatatcattctctcagtcatcgacctagggacagctgaccaaacctatgcctgagtccataggaacacatctcccattcgcttggccagccccaggttgtcctgaataacttgaagggaactggagactctttgttcctttgccctgcaggcaggtggtattaactgtgaccaataaattgtatattgaaatataaattaaattgcagtgtattgcaaaaagccacataacttcaggccttgatcaagcattcttagatgcctctgctgcaaagaaagctttccaagtagaatgggaggcatactttccagattgatgattaaagggaatgtgtgtgctggaatcagcttgggagatctgaataacttaaacctctccgtaccttcaaaggtgctatcatttccacttggctatatttagttttctttgctttttggaaaagagatgaggcagctccagtctgtgtctcccttggctttccccagacaccgtaaatgatattggcagcatcccagccctaccgctcatagagcgaaaacctattcctccttctcctgccacgtttaataaactttatctagaacaatttcttgtgcagtggcaaaacacagcacttacataacatactatttcagaagcactgttctcttgggctctgaagcacagcctggtttctttagtgctatgatttagggagtgttctacctcagagaagaaaggggtcctgatactgagattataaaggtagcaagagcctctgtaaagaaatcatatcccattagccaaaagaaatccagtggtcaaacatagtcctctagaaatagtcagaagaagtcattttattattgttattactggaaacagctagaggcaaaaggcatcttcttcgaggccttccaccttgccacttcatccattctatctagagacacgataaactgaccatttgtgctcatctgaggctgtaaccaatagagggccagaacctcactcatctaaacaattaattgcaaggggagccatggaggaagcagggtccaggcttaggtccaaagacagcaatacgagagcgggtcattccaaaaggcaggacctgggggccaaggtcaaggcaaggtcatagctttaaagagtcagctctaaatggaatagctctgccccaggaatcaagccaacaaagctagctctttagcgcttgcccaaaataggccaatacattctaataatccacctgccctatgcggggtttcttggtttcagcaccattgacattatgggctggatactttgttgtgggactatcctgtgcattgtaggatgtttaactgcatttttggcccctatccaccagattccagtagtaacccaccctccaccccagttgtgacaatcaaaaagttctccagacattgccaaatgtcccctggggataacattgcctcctattgacaactactagtctaggatgaccaacctttctagttttccagggattgatggggttctcaggatgcaggcctttcaatttaaaacccaggtagttctcagtccaccctaactctgccctaacttaccccttctgctgttagaacctcctgtctctcagagtatctcacacttcaataggcattgtctggggtcttattcaaatgcagatcctgacttcactggtgcagtaagaagtcagagaatctgcatctgtaacaagctcccaggtgatgatggtgctgctggtgtgcagaccgcaggaggaacagcaaagacctggactggaaagccatcccttccactggaacccaggctgtctgcagggctgattctacagggatgcccctggttgttggagtggcccttctcaaccctggctgcacatcagagtcagctgcagagctgttaaaaatacagatgtctaggtcctccaaggctctgatttaattggcctggaatgagagccagcttggtaggtctttaagggtccccaggtgattgtgatatagagccatgactgagaactcttcaatcagaagtcctggaagcaaggcacagcacttacgcatctgtaaagagacttccaaatagaagtgctgcccaagacagaggctttcccagcctcttggtcttcaaggtccagagcaagctgctgcagatccatcgcaggtgtgagagttcctccacagatgatgggcatggctcaatgcacccacaccttcgagccagtggggagtcaggggccctgccctctgctctggtgcatgcccatccacaggcaccccaccctgctgcaaaactgctgttcagtacagcaggctaaaatgaattaccctctgtgctcaaactgttggccatgaagctgtttccttcaataacttccacaggaaggggaagtctttggcaaaagccagaaactgagaaggaaagcagtaaagacattcagttctgtgaaggttcatagagtctgttctctgtggctggggatggaggaatgagtcacccattcacctgcggagtctgccagctgtcggcacatacaggcatctggctccaaccaggtagcagtgggtgcacacctgggctcagcctacagaaaaactgcccattgctctctagaatcctggacagtgggaaatgggagttagagagaaagtgagccagagccacaagatagaactcaccatcctcagcccagatggtaattggaggggagccaggaccactctccatcttccaaatgccattctcattggcttgtccccaggacctagaaatctgacatcagtgactggtttccattgagaaaacaattgtttggcacagaggtcttctaaatcacaaacagaggttcggagatagttgaatgcctttggtagaaactggtttcaacagcttccttctcttaaatagaaaaatcatatcagattggagagaaaatgtggaatgctacagagaaaatgtgtaggtagttgacaatttagtctgagtgtggcccatggcctaggtgagacacttcttatttgacaagggatcctatgtggaatgggggccttggacttcagcaccccacatgttccattttgggatgatcccggcccaaatcaaagccaccattaaaacccattggtccttctttgccatgaaaatcacatcttttccatggcatttcttttacaacagcaaaagaactgtttggaaggtttgacacattttctccagtgagacttcaatgaatattaaatttccagcacattctttacctaagaagcaggacagcttatccccaattgactctttgttccacttgccccttacctttgctgtgttcctggtggcttccaggctaatgtgggaggggtagggaaacttggagaaaagtaaagcagaccctgtctcaagtcttgatgccaggcctgtgtgtgttttctcctactagtcaagaaagaggcggtgctgatccaagccggcgagtacatgggtcagctgctggaacaagcgtccctgcacttctttgtcacagctcgcatcaatgagaccagggatgttctggccaagcaaaagtccaccgtgctaaccatccctgagatcatcatcaaggtcagtcttagcgtctcatcctggaacagagacaaaggcacgcagacttagtgttcatgtgtgcatatgcgtgcttgtatgtgtgtgtgtgtgtgaatgaatgtcctgctcaaaaaaaaaaaaaaaaaaaaataccagtgctaggatcctcttgttctttgaaagaagtaaactgccctatatatagacacatacatataacactttcctctcctctccagatttaaatatatagatgtggctgcagatataaatataacctgtgggtataaacacacttgtggaggaagataaagatgtgtaatggctacagatacttagaactttcagtgtctccagaataaagtgggtcaggcatgctataagaggtagataaactgcctgcaacattttggacagtaatattgtttatggaggtataattgtggatagtagattgcacagatcaaaatatacagcttgatgatgattttgtatgtgcgtgtgccttgcaaccacaagccagatgaagaaatggaggatttccaacacccctagaaggttccctcttgccttttacagccaataaccccctagactatcaccaagatagtaacttttctgacttttatcaccataggtttgttttgcccatttgaccagtagttttcatgatgcctctccagtgatcaccagaaatctctgcccaaatggctcaagagacttggcagaggaaggccgagggttgatgagagtggaagataaatgtgggagcctctgtgctcctacttctcaggcccacagctgtagcttctgggggcatctgtggttgcatccatgagacgccttcctgccctggaagcaggaacccaggcttctggcagtgaccctgaggagtgacatctcatgcagcccttatccaggtcttagagcccttccctagtctctggagaacaatcttcttgaagtgattaagagcaattagcacagatcctgctaaactacattgctctaaagtggtagataaatcaaagctttataaagttgatcacattttaatggtcctagaggtgggcagggtgagggtaggtagtccttgcttctcgtgaatcctttgctgtgagtcatttggaaagccaatgactgctgtgcagcattcagaatggcagtgtttcttgggtaactactgggctccagacgctgttcttaaagcactttacatggttgcattttcaaccaccaacaaccccacaaggtaaagagtactggcatcactttacagatgagaaaactgaagcacagagaggttctataactcctccaaggccatacagccagcaaatggcggagctgggcttccaaccccagcaggctggctgcaaaagcagggctgggaaccagctccttcaactgaacgttcttatggtctggtcctgtgtaattgacacagtgagccaccccaaggcaagtcccacccaaactcacgggcatgtaatgcccatcagggagcagaacaccaggcccttcttttctacaaaggcctacattgtcatgtctctttgtttccttcgcctctgtcatggcccacaggcccaccatggcgttgtgtgcacaggacgcctgaaaagaatgaaaacgaggctgtgcagggttggcaggcaaagggagaaacaaatgcaaaatggagaggtggggattagggttgctgcagaggtaccatcatccatgagaacgtgaagttaatagcttaaggtgcaggatgccctaaccccgaagctgttcttcacagctggctcttcctatagacatgtgggaccccctgctgcaggcctgtcccagctgcttggtggaagcagcttttgctacccttctgggctattgcgcaggtttcatttatgagctcaaccctgaaccttccctgacagcagcaaggcctgtgtgcgtacctaattatgaagtgacggcctgtccctgtgaaggtctcaggagagaggcttcccaagctgtgaagtgctcaaaccacagcagaaaatagaatttaattgcaccactgataataaaccggatgtatgaaggaaactgataactttcatcttttaggcactattaatttgcaggattatttgttagttatcttctgggtttacttaaagagcagtttaattccccagggcacaatcagaataccttatcccacaagttagcagacctgggcatgtagagagtactttaaatggagagttatattgttttgtgtttccttccacaaagcaaccagagatgctgttcctggaggaaacttatttagaggtagggacatttgatagggaagagagcatgagagagatggagattctggcttctgtccatgccaagtttgttcaaaaaggtggaatggggcatcatcccataaactgtcctttaaccattagcccaactaactccaaggataacctaaatccaaatggagtagaagtgctcctgggtaaagcactcacaccctaaggaccacccaggagtcacggagctgtgagaggccctgagtgcagaagctccggcctgtggactggggacctgcctagcctcctggagaggtgaaatgcagagtcatagcaggggagggaaggagggaggggaagggagggagaggagagaagaacagaggggagaggagagaacagaggagaaaaggatggagggaggggaggggaggggaagatggagaggagaaaaagaggaaagaaaagaggaaggcacaggaggggagaggagagaacagaagagaagaggaagggacaagagggaaaaaggagcgagaatgggggggagaagagaaaaacggggagaggagagtaataagaaaacttcaagttgaaatattccaaaggaggcctagggagaggggtcagataaattgtataaaacacaactcaattaagagttattttttctccttccttccttccttcctttcctgtctttctatttttattttagatttgagggtacatatgaaggtttgttatgtagataaacacgtgtcacaggggtttgctgtacatattgttacatcacccaggtactaagcccggtacccagtagttatcttttctgctcctctccctcctcccatcctccccactccagtagaccccagtgtctgtttgtttccttctgtgtgttcgtaagttctcctcatttagctcccacctataagtgagaacatgcggtattacgttttctgttcctgcattagtttcttaagaattatagcctccatgggctttttttttcatatgcttgttggccatatctatgttcatgtcccttgcccactttttaatggggttgtttggtttttttcctgtaaacatgttcaagttccttatagatgctggttattggcaacatcaccaatcatcagagaaatgcaaatcaaagccaccatgagataccatctcataccagtcagaatagctataattaaaaagtcaaaaaataactggtactcgtggggttgtggagaaaaaggaacacttatatacggttggtgggagtgtaaactagttcaatcattgtggaaaacagtgtggccattcctgaaagagctaaacacagaactaccatttgacccagcaatcccattactgcgtagatacccaaaggaatataaatcattctatcataaagatacatgcacatatatgtttattgcagcactattcacaatagcacacacatggaatcaacctaaatgcccatcaatggtagactggacacaatgcagccatagctgtaaaaaaggatgaggtcatgtccttcgcaggaacacgaatggagccagagaccattatcttagcaaactaacacaggaagagaaaaccgaatactgcacgttctcacttataagtgggagctaaaagatgggaacatgtggatatatagagggaaacaacacacacagggtcctattggagggtgcagggtgcggcgtgggaggagggagaggatcaggaaaaataactaatggctactaggtttaatatctttgtgacaaaataatctgtacaaccctcatgacatgagtttacctatataacaaacctgcacatgtacccctgaacttaaaataaaaggttttttaaaaatgaggacttggaaagggagctaaatgcagtaaaagtacgaaaccacaatggctcagaggtccagaattacataggatatgtttctctaaattctaagaaaacgctcacaccctttttcaacctctttgagcctggatggacacacaactgactgagcctcaaggttgctgtgggcaaatgtgccaggcacagggtgaaattatgtgagagacagagaggagaccacagcccttcctgctcagctcagtcaagataagggttgggaccagcccctggtgattatgatgacagcagctatgatttattaagcactacattattaaacgcctctcttctatgatcttatttaaccctctataccatcctacaaggaggacgttactataaccctattttactgattagaaaactgagaggaccagagaaggcagtgccttgtagcacagtggtcagaacatgggctctggaaccaaatcatctgagtttaaagcttgttttctgaacatcataactgtgtaaacctggacagatcatttcacctctgttggcttctgcattctcatctgtaagtcaaaagcaatggtaactctcctcctggggtccttgtgagttttttatgagtcattggatgcccgagtcacagtgcacacctacatatgttggttgctgctattattgccattattgctgtttattagtaactggcccgtgatcacgtgcctgttgagggaaggagagacacttctggcccaggtcttcctgacttggaagcctgtgctggcagccgctgggctacaatggaactatcacaaaaagcagaggtggtcattgactttgcagagagttttgtattcaagggaggagagatcacacacacttgagtggtgtgggacatcaagaattaagactgtagaaagatgaatggtctccaatgaacagataacgttcaaccagtagagatggatggagagaccccttcagatactaggaagaaaatgttagcaagggctagaggggaggtggacggcagtatgtagagcagtgagaagcgtgccttggctggggtggaggctgggagcagggatgagtaagggtaacctgaaaaagatagcttgaggctatgtggaggggagtctacaattttggatgagagctttatcatcgactctctgaacaaagaggcttcaagggagtttctagagtgggaatgtaacatgattgtcaactctgctctcccacaagtcggagccgctttttcttcctcccttctcttcaaagcctttgcccaaagcattgtcttctccaggaagtacccaactcagccttggaactggagtttcctaaaagctagtttccagctgttcttacctgattcccctttagatcaaatctaggccaatctggaacaatactgggctcacatgtctgaatccaagtcaccgtcaaccaaagcaggccagtggcttcctgtttgtgcatcccagtggacccagtcgtggattttactggtccctgtggtgataaagatggggcctgggctcaatagtgctcccagtcaaccattcccagcacccaccatgtgtgagtcagagtgtgtgatcctcacatggaaacaggcagagagagacagtcattaaactttaatgagcacacgtctctttccccatgctatcaaaatattttgatgagaaaagaaaatttcattacaatcagacatagaatttttctctgccttcccatgtgttgcttgttctctctctctctctctctctctctctcacacacacacacacacacacacacacatcctctctctgaacttcagtatcccctttgcaaagtgaatacactatgattatactgctccttctattaagtacagtcacatataaaacactgcactggggggattgacatctgtagcaatgtttgtgagaatgcatggcccacgtccagacctagtagctgttggtaaatgttctttctcctctgtagtcccatcaatgcatgggggttgcttagggcagcatgtgggccactggcctgaagtgggccagtggcctgagtgtggccctcacctagtggcatggaatctcttgaatctctggtcaccaggtgttgagtgtatgcagcattccctgtggaatggggccttcctcatgcagggaggcccgccttggagatcctggagtaaggcctaggggagagaggagacactcacatgttcctccaatgatctctactcagtacctgccattctaaagcagctcaggagccagcacttgtgtggtattatcatgtggaaaaagtcctgcagcctttgcaggatgtcaggaagcaccaatagaactaattttctcatgtgaactaggaacaattttgctaggagaaaacataaccattttttatgtgtgtgatttttaaagttacaagcataagcaaacagatgtctccaaatttttcaaaaaaaaaaaaagcttttaaaatgaggacaattgactgtttccaagagtttttaaaagtaagcgtttgctctgtatttattttgtccattagctgaaagactttctagtttttatttatctctttatttagtcactcttgcattcatccattcttcatatagttatttggtgcccactctgtaaataaattgtagcaaatgcctagagctttcaaaaccattatcagagaggccgggtgcagtggctcacacctgtaatcccagcactttggaaggccaaggtggctggatcacttgaggtcaggagtttgggatgaacctgaccaacatggtgaaaccctgtttctactaaaaataaaaaattagccaggctgtagtggtgcgtgcctgtaaccccagctactcaggaagttgaggcaggagaatcacttgaatccaggaagcagaagctgcagtgagccgagatcccgccactgcactccagcctgggtgacagagcaagactcaaaaaacaaaacaaaacaaaagcaaaacattatcagagaaaaattcaacagtgagaacattttctttctttccttttttttttttagatggagtctcactctgtcccccaggctagagtgcagtggtgtgatctcggctcactgcaaccttcgtctcctgggttcaagcaattatcctacctcagtctcccaagtagctgggattacaggcgcccaccaccacgcccagataatttttgcatttttagtagagacagggtttcaccacgttggccaggctggtctcgaactcctgacctcaggtgatccacccaccttggcctcccaaagtgctgggattacaggcgtgagccactgcgcccggccaacagtgagaacatttttgttgcatttttctgaaatggggaaaggttgcgccactttctttcagcactggcccacctggaacagctccaggagtgcagttgctctgttttaacctgagctaaccagcacttacacagagcctggggtgctcctcttgcaaagacagtgtacatggggcctgtgaaagatgcttaacccacagaaatcgacttcaacaagcagaatatctgcatgaccagcactgattggtggggaattgtatagataacacaagatccatgggaagtatcactgttgaccccggagaggaggcagggaccttcctctgggcggcttccctccaggccagcactcacccctgtgcagattgtgcccatctgcaggtgggaaggagacagtgaggggacccagtccagcccactcgccaaccatcaagccctgcagcctggcatggagccacatccccccaaaaaagggggttcccttttccactttgcacagttgcatcctggctccagccccatgtccagatctcttccaacttgggacactagcttgttttttcttaacaaccatcctaatgttgtgttctaactggagcttttcatgagatgcccacaatttttaccgaggttaacagtagaatcctcttcagtctccctacggctcacaccctggaaacccaccgggatggaccaaggaagggtgggtggctgtggtggctgctgatctcactcctcccacatcccattcatacaactttatcccagaggacacattaaaattggggaaaccactgggcacggtggctcaagcctgtaatcccagcactttgggaggccgaggtgggtggatcacgaggtcaggagatcgagaccatcctggctaacacggtgaaaccccatctctactaaaagtacaaaaaattaggcaggcatagtggcgggcacctgtagtccctgctactcgggaggctgaggcaggagaatggcgtgaacctgggaggcagagcttgcagtgagctgagatcacaccactgcactccagcctgggcaacagagcaagactccgtctcgaaaaaaaaaaaaagaaagaaaaaaaggggaaaccacttgagatataatgagtgccccaaacaaagtacatgacagtgactggctacactgtgagacttaactgtagtttcatttagtgctgtaaatatcacaaacttcattaaggtggaaaatgggaacagactatgtgttctaattattgctgaaccctgaccattttcccctccatgtccacaaccgagcacgttctctctccagcctcctgcactctctgtggctccatcgcactctcgtcaccaagattcacccctgcccacacccacacccttcatggggaggccggggatgggaaccaggaggtgggcttcttcacctctcccctttgtggctctcttctctaacccctgagaaaccgaatccacgtcattctccatagaagaccctataggtgaggaggttctcagggtcaccctggcaacatgttctccctttaaacctcatatttcattaatgctagtatgtgtcagatgctctgttgtatgatattacattgagtcaccccactaactgcataagaagctgaggcccagagaagtcaagcgacttgtctaaaaactcaaagtggcagccccggtcttcagcccctgcatccagcttgctctcccttcagcttggcctggaatagcaccactgtgtgcatcccagtcacctcagttatgtccgtgacactgtttcaggttatttgtggagtaaatcagaggtatctacctatgagtcctgagggactctgagcaaggaaagcctgcttaccccaggggaccctaggaggggacaccttcagccctgctcccatagctgactctccatcccctcgtggctactttcacagaggattgtggccgtgggaccaaaccgtgggtgcccttagccaggatagatgatcgtaaactatgtctatgagtgagccctcctcatcgaaggtgttcatttccatctctctcttcaggacagctacagaacagtgcacattttagaatgaaaatgaggagtcactggtaactgcggtacctaaaacataatttgctctgtgcatttcatgtttgctatttttttgaatcttaaaaagagacacacatgagaataaccaatctcacattccagtcctgtaatcccagtatgtttgggctactgattctctttttaaaagtggcatctctcatttttaaaagagaaaatcctagatagtgactcctattatcatcaagtaatatatatcaaggccccaaggctaccttgtcacattttactctggcatagaaatctaattccttctctataaagtcaaaaagagagaggtgagttatagatgttttctaatttagtttagggtcaacttataatcctcgtcctcaactgatggtttagcgataacttaaaaggtgatgctgcaaatgattctttgctggatttcagaaaataaagaagctattccagcaaaaaaaaaagtttctatttttacctgtattctgtcagggatcacagtataggtagttttgaagatgaatgttttagagtcagaaagacctggatttatatccaacttccgccagattcctaactctgtaggctttttatttatcttctaaatttcaatttcacgtaaacagaatgggattaataatcatgtctacccccaagaccatagggctgtagagaagattaaataaggtagtgtaagtaaactgatgaacagaatgcctgcattactaagtaaacactaactaaataaatgtaagttacttgttattattgttgtcattaaccagagtcaggatcacgtgttgctgagcaacggctatggccccagactgtctacatttgaatctctcctaccctacttactaatggtgtgaacttgagcaagttacttaactcctctgtgcctcagtttcctcatctataaaatgaagactcctaatatttacctcttagtgttgggaggattaagtgagttgatagaactttctagggtaatgggaacattttaaatctgctccatccaatgcagtagccacgagccatatgaggcttttgagtccttgaaagatggctcgtgcaactgaggaactgaattttttacatttcacttaattttaattaatttaattataaatagccctaggtggctagtggctactatattggaaaaatatagactgagaacatttcctaaccaccctagaaccattagcattggtcagtaagtgttcatctaagtgtcagctaaaagcaggggcagtgcctgtggtgatgagcagagtttgcaaacaagaaattgcccattatcaaaaatgatcacaggccaagggggagggaaaaatacagtttccagaaatacgtgcaatacatgattgaaagtacttgaaataagagctgttaggtgtgctaataaatcatgtatttcaaattgccaacctcacttattgttactctttctcaaactttttccttcatttcagtttcaattttgaatacagttatgtatttttaaagcatatgcttagtggaagatatcttgtgatttctaaaaaagtaatttctttccaaaaagtttatataagagaaagagagtatgtgtgtgttagtaactttcttgtttaccaaagaatcagagtagcagctcattatcatgaattagtataaaggacaggaatgtcaatatcagtaagtgatatgtaacttgaaaaagcatactacgggttgatttttttaaaacagagagagatattttcaatagaatattgagaaaaacttaaggccatcaagtatatgcaaaagcatttgacgtcaccaagtaagacatatgctttattcttttctctggcccaagtaatgaatactcttctctaaagcaaatacacataaaagtttcttcttgaactaaccttctctaaattgcctgaaggctccctttatttaaggttttatgagagcaagaaaatgaaaaatatgactgtgaaaatgaaatgaaaatatgactatgcagatatggaattatgctttcagcaataaggaaaagggagctttgcagattcctaaaataatgtgatgcaaacagatattttctccccaaatagtcattgttctcagcattttgtaggtaccatagcatggtgcatcactgaaatcaacacataacgtgaaaacactatgtgttggcagcattttcctcaaaagaagcaaggagagggagacacctccagttacatttcccaagcagaacacagtgatgtcgagcattgggtaggtttttacatttagtttggtttgagtgtctaaggctcattatcatcagtagtcagggacaggaagtttacattctcggtgcaggagacaagtgtcagaaaagggacactggtctttgttaattgcaaaagaaacacactacaaccagagaagggcttctcctctcacccctccccatccttctccctgctccccactccagcatcagggaaatctgggcagaattgatacacccatgccagcatctaattacagagacaatactggaagcaaactgattaggcatgacatatgaaattacctgagaaggtttaatgtcctgaacatattcagatctgaagcctatctatgatggcccaattgcatgggccagtttctcaaatactaagcattccttctcactgtcatcagtgacctggaagggtgtatttcactttccacagcgtaggaggcttcatgtagagccagtctactggtatgggaagggttcttaatctagggttcatgggcccctagaaaaccatgtatggacttcataggtctatagtgcatcccctaaaaatacatgcccatattgtatatatcttgtatttgtcactgtgtatgtctgtgtagaggaaaggtcagtagctactatcagatatacttttgaaggggcttatgcccatccttatatagcataccatggagaagacagatggctccaaaatattttttccagaaagaatatagtgatcatagcaaacacttttgccaataatgtctctgtggcagctccatcttcttcagtttagagagcttttgtaaatgctatctttattttgtattttttaaatccaaagatgtttttgaaatgtttcttaatgcaggaaaaaatatattggacacacttgagaatgaaatcagggacaccatgtaaagtattctgatgtattgctacaccttcaatatctaaattgattgaggcagggcctctgggaagaaagtgaaaaattcagtctgtcttccacatgttttgtctataccagtggtttccaactggagggcaattttgcttactaaggaatatttggcaattgctggagacacttttggttgtgatggctggggtgcggggctgctcctggcatgcagtgggtagacaccagggatgttgcttaacatcgtacctggcacaggacagctctgcaacaaagatgcatccagcccgatatgtcagtagtgttgatgctgagaagccctgatctagatcatgattactgtttttgccacagccttcaaaccaggcttctctctccacaccccatgtgccagccagcctaaaagtaacttctggttcatgttctagtttgcctgtcattgaaccagtctcctccccattaggccttatccattctcagtcttgtcagtgtggcttcaaatccaatgttgctcccaccggtttgaaaatctcccttactttctgactgccgttttttttttttttttttggacgtcagtacgaaacagttttggttgtcttgttattgctgagttgttggcttttccagctcctctgacctcagagtagcactctatcttagagttcaagatctccagttagacagactttaacttcaatcccaccttggtcatttggcagcttcaaatcctcattcaagttacctattttcctgaaccacagttttctcttttataaaatgaaatgcctggcaccagtgatcctgccctagaaaacctccttcttcttaagggaataactattattatagtctgatcgagctgatacaaatatagcccttgtgttgtgaggcttatgtgagaatatatgtgaattatggttgtcagctggggctggttctttgtaatcaacaggggtgcctcaaataaatgaattacaggatccacccattaccagactgaggattgctggttaaagtgctggactccctgcctggcacacgatccatgctgtctaggtgcacctgctgttgttgctaccatgaccatcgtctgcccctctcctagttcccctgaatccagctctccaccactgccctccaggagatgcggatttaaatgtaacaaagtttagggagttggctgaaagtttcgtttttcttatagacttaagaaatcccatagccataaatttagtcacaaagcatggcttgatgagtaaagccataagagtgtattcttcttttaatcgatatataataattgtacatatttatggggtacatgtgatttttcaattcatgcatacagtgtgtaatgatcagatcaggaagattttattcttgactgtagcataagtaagcaagggtcctcttctctgggcaatgtccttcctctttacgtccattcttaaaaacgcctcatttccatatattttctcccatattatatagtggctaaaggaacatggaatagtaatggctgtgttgtcatctggaagatccagacatccagtaaattccatttttgagccattgacttaatttaataaatatttactggacattggtattgaagtactaagtattggagttaaaagtgggctgaaatataaggtgaataagacaaactacccagagcattgctaccctaaaaagcatcaactgtaatgcattgggcctttgccatgtgccttgcaatatgtttgccgttttatgagcatttttcattccaaacctttcttgcaagggaagaactattattcttatcttattcccaagttacttagagcttatacagatccattcatttggtatacatagctcctaaacaaacaaacaagtcttatagccacctggcattttgcggcacattgcgtttatgttggaaaagcatatggttctaaagtgtgtggcatacagtaaacacagcttaaggtatagtaataataagagcattctacatagatcgccccataaaagtgtcagcccattttaaagacaagaaaactgagtctcagaaagcctaaatcacctgagtccccactgttaataagtgttgaacctggcactgagctctggctgtctcctgtggtgttcttccaaatacctgatacttctgagagtcataatagatcaactcaccaacaaataaccttttattttcctggactctggtactgtggctgtagaagaaaaatctcctttacttattttagtatccaggttcctcttcatgttcaacagtaaggactccatccttggcatatttcttgcgaatgtgtctaaaactaagaaggcacatgtgccctgaagcattttctacttcttaaactcaggaatcccctttgtcccagcaggaaacttgatgcctatccagaagcaaagttcacttggccgccctcaccgtggaaacgtgttgccacaccaaatgaacttccccctcctgctgtcaaagagcagtcagtggccaccgctattgacctgagctctaattaggctggttttataatgaggaaaagagtgcgattctaattagtaaatttccatctctttctcaataggtatcctccagtcaaagcaatcagctatcctcatcacactggttccattgccaaaaaaataactgtatcataaaactctagtaaaagtgatgatggttaagacaacaagagagcagaacgaggttttatttggtgctaatgacctgcattctctctcttaggtccgtggcactcaggtagttggttctgacatgactgtgacagttgagtttaccaatcctttaaaagaaaccctgcgaaatgtctgggtacacctggatggtcctggagtaacaagaccaatgaagaagatgttccggtaaaccttgggttggggagaccgggcaggcagtgcagggctgtgggaagctttctctgtgtgtgtcttttccaaacatagatctgctccccagtgaaaatgtcttggaagctgcctcctccttgccgaccatttctgtagggcgtggagtaaaactagggttggtttgaccagcactttcatcatttaatccttaaagacaccctacgatgtagatactgctattatctcccttctgtagctgaggaatttgaggctttgagaggttgactggttacacaggttcagttacacagtttatgaaaacagagccaagattcagactcaggctggtgaattccagaacccaagtttgaaccactttgctgtactacctactcacgtatggtctcttctcatctttattgagctcctaccacgtgtcagatattatgctgagagatacccccttttcatgggtgctttgtctccagcctcacctcacagattttaccatcccaatcagtgtctacaactgttggattcaggtttttttttagttgagcctaaagagctctagatggttccccattcaggggaccaaagacaaccccaggttctgtaatgatatgaatgaaactcagcctcttccacacacaggccacttcaaattgtgcttgacaggtctcagtttctgtgacttctactaacaaagagtgtgacccaacaagataacccattccatggtcaggtagctctaacagtaaggaaacaggtttttctaccatttgatcctgccaatgatcctaattctgccatctggactgacagaaagtaaggcccatctcttttccatctgatggtttgcaaatgtttgcaaacagctgtctcatcttccttgaatcttttctacctggggacaaatatctgtcctgactttatttccctctcctctaacatggtttcagctctctctctctctctcccacacattccaatttgtcactactcctcttaaagtgtgacacccagaatggatcccaatctttgaggtttattactttcatttctaccacaaataagtccttgtcagcatcaatcaatctagcacatttcctgtggagtgaccttctaaggcatagaaagggaggtagaggactttggaaactgcctcatgaccagatatgtcaagaattttcccgacaccctttatggaagcgaccccactctggaatctgtgggataaatgcaaggcctcacttataccctctggggcaactttattgcccataaagggctctccgcatttctttcaaattacaatgctcgtagcttctgcatctcatcatttaagagatgccttattgcagatgcaataaacaacagagaaaataatcttagtgcttttgaaacaacgcaagcacaaaacatagcaaccttcctgtgctaacaggaaagttacaggaaaaaaaaataagtaaattagtaatcaaccccagctacatagagaggtcagcagccatacccctgctttcgtcagaaacgacagtctcactcacccattctcgcaccttcccactcaaatcagatgcaagaatcgttcaggcaaagtgaaacacgtttcctcttccatacagccccctgctgtatccaactttttccttcccagacagtaaacccacaagctttatctgagtgtaccggaaacttctctatctttacaccttggctatccccctagaattccaccttggtcaaggccaacacatgaaaaaagacactgtgtgtcttagacaaaagatgaattattacacagtgaattattacacagtgcaatgacccactatttgggaggcctcaggctcaaaataggttaaatctccagatggtttgtttattgttaatgtctgacattggagtggagcaaagtggagtgaatcgggagaaaggatggataaggccagtcccttcttggacacagatgtcctgcccacacactggcttaaggtactgttagtagttactgcaacacgtaagtctaggcagacaagtagatagacagagagctagctgctcttagtcagtttgagctgctgtaacagaaatgccatagactgggtggcttatacaacaaacatttatatctcacacttctggagtctgggaagtctgaggacaaggtgccgaccaattcggttcctgatgagggctcccttcccagcttgcagatggctgtcttttcactgtgtcctcacatggggcagagagagggagggcaagttctctggcacctcttcttcgaagggcactaatcccatcatgagccccaccctcatgacctattctaatttagttacctccccaaagctccatcgctaaatggtatcacactggagtttgggtttcaacaaatgaatgtgtgaggaccacaaacatttagtccgtaacagtcctcaatctctctttttaagttttttttactgacacattgtaattctacatatttatgtggggcaatttgatgtttcgatacatatatatgttgtataatgatcaaatcggagtatttagtgtatccatcaccccatgcatttatcatttctttgtggtgagaacattcaaaagcctgtcttctagctcttttgtaatatacaatacctactgttaatcatagttaccttatcatgcaatagaacaccagaacttattcctcctatttaattgtcactttgttctcattggccaacctcttcccatcttccccttcatgttctcctcctcagtctctggtaaccactgttctgctctttgcttctatggtataataatttttttttttttagtgtctacatgtgagtgaaatcatgtagtatttgtctttccatgtctggtttatttcacttaccatgatgcccttcctccaagtctaattcatgttgttacaaatggcaggattttattctttttatggctgaatagttacagaaacccagcttcagggtggaatatctcccagacaagagaagctttatttctcagagacagtcaaaacttgggctaaaaatcatgacatagaaaacatttgttatctaagatgggcttacaacttggagcaagtgccactttctctgtttactcctcactccagcacacaccttcacaaccaagacctgagccagtccgtgcccacttccatatggtcagataattagaagcactccactgtgccctatgttgccaagatctgatctaggagcgccagatccatgtaacaacttggacgcctagaaagtgcaattccacaaaaccaaaatcctttgcaagaccgtatttctttctagaatacagctcttaaatagttggggaatcaccacccccactcattcacccacaccctgccagatgtggtgtctagaaggcaggggttattgaacccaaagcagagggcctggaaggtgaggagctggtaaacagggaattggagccaggaacaaagaaggcggtgctgtgtctcacccctcactcgcagtgagccaactctactctgaaatggtttatcttcctgctcttcccccactgcctccggcctgtctcagatgtgcagaggttccacctccacagactcttaactttctgcacttgatgcttccagagcgtcaaataatttatcttccagatttattttgctctttagaaaatgatccagttcaatatgttatttcaagagaaaaactcccccactttgtgatttgggcttaaactttaagtttctcaaataggacagaagctaaggtctagaagcacagaggacaaaccatgggcagttgcagtttattgtaataataatcttatttgcctgcgtgcattcaagatgataaatggccggtatctcctgatggctcagcacgttactgagaatcgtttatcacaacatccatccccagaaaataggattactccaacattgctccacttatcaaaatacttttttctctgttatgaatttatctgtatgtaaaatagcatgcatacgtatcttcatgtatgagtattttcatgtatgagttttttcgtatgtacacatcattatgccggatggttttatgagtaagagaaaatgataagagggggctaaatacttagcttctatttgaggtggttatctacagtacatggtctcaggtcgggtccttaaccagggccactgtttcacaaagtgcttctgattgatcacttgggggaaccagaggagagagaatgaatggatacaggtaacaatagcacagctgttgagaaataaatatcccaaacttatattggtattgaattgagcactgagaattttctctctgcatacaggcaggagaaactttcctaaattatcttgcaaagagttcaatgaatcctccatgaacacttccaggacactcttattactaagtcaaaaagtatctttcctgcttgagaaataaaacctatgaaaaagtaagcacaatggtcagaaaaagccttttcttcttttctttttttatttctataggtttttggggaacagttggtgtttggttacatgaataagttctttggtggtggtttctgagacatttggtcacccatcacctaagcagtatatactgtaaccattttgtagtcttttatccctcccacctttcccctgagtccccaaagaccattgcgtcattgttcattgttatgcctttgcatcctcatagcttagctccagcttatgagtgagaacataggatgtttggttttccattcctgagttacttcacttagaatactggtctccagtttcatctaggtcactgtgaattccattgtttcattcctttttatggctgagtagtattccatggtatatgcataccacaatttctttattcactcattgatgggcatttgggctggttccatatttttgcaattgcacactgtgctgctataaatatgtgtgtgcaaatatcttagaaaaagccttttcttatagaacatatggtgtacacttttatgaagtgcagtgaagaggagcagaaagagtatgaatatgggactcagaaaaacccgggttcaaatttcatctctgcccatttaccaattatgtgatcttgaaaaagggacttcactggttaccttccatttttcttgatcataaaatctgctgaatagtatctgcctcaaagaactgtcatacatataaaacctgaatataatctcccaaggtttataggggaggctatatgtgaagcaccccagagaacactaaatctcaccaaccctgattagtctcagtctgcactgatgtgggcttgttcgtgacactcaggaagacttcagggcaaaggctgggaggaagaggagaacactagaaccatgaaaggctatgtcattagccgcatacattagggcattggcaacaaatggtagcagaaagttgcataggtggaggggcccaatttggtggttgaaataggaatttgaattacagaacatgaagattctcaaagtcaaatggcagcaggcagggctatattccagatgctgagcctgggaacaaggtctatcccaagggagttggcaaaagctaattcgagtgtcagggcctcagcaaaggcagctgggggattcatataggactgtaattccaggaggaaactagtggcaaaaactgagctgaggctcagaagatcagtcacatagataaggctactatggagggcttggagacaagctagagttcagttgattaatggttggatgggaatcagcccagctcctgatggccactgggaggctggcggatgcatcccagtggaaggaaccatgacccaataagactgtcagtgacaggttctgcagagctttatgtgggggcctcatttggggcataacttgctgaatcagccagtgagagtcttcagtgtcctaagcaccaactgagagaaagaaagcaagtgacttaggcaagagttttcattgcttcctgatcaaagtggaaagctggatcttccaacctctcctctcttttccatcctttcagtgaaatccggcccaactccaccgtgcagtgggaagaagtgtgccggccctgggtctctgggcatcggaagctgatagccagcatgagcagtgactccctgagacatgtgtatggcgagctggacgtgcagattcaaagacgaccttccatgtgaatgcacaggaagctgagatgaaccctggcatttggcctcttgtagtcttggctaaggaaattctaacgcaaaaatagctcttgctttgacttaggtgtgaagacccagacaggactgcagagggccccagagtggagatcccacatatttcaaaaacatgcttttccaaacccaggctattcggcaaggaagttagtttttaatctctccaccttccaaagagtgctaagcattagctttaattaagctctcatagctcataagagtaacagtcatcatttatcatcacaaatggctacatctccaaatatcagtgggctctcttaccagggagatttgctcaatacctggcctcatttaaaacaagacttcagattccccactcagccttttgggaataatagcacatgatttgggctctagaattccagtcccctttctcggggtcaggttctaccctccatgtgagaatatttttcccaggactagagcacaacataatttttatttttggcaaagccagaaaaagatctttcattttgcacctgcagccaagcaaatgcctgccaaattttagatttaccttgttagaagaggtggccccatattaacaaattgcatttgtgggaaacttaaccacctacaaggagataagaaagcaggtgcaacactcaagtctattgaataatgtagttttgtgatgcattttatagaatgtgtcacactgtggcctgatcagcaggagccaatatcccttactttaaccctttctgggatgcaatactaggaagtaaagtgaagaatttatctctttagttagtgattatatttcacccatctctcaggaatcatctcctttgcagaatgatgcaggttcaggtcccctttcagagatataataagcccaacaagttgaagaagctggcggatctagtgaccagatatatagaaggactgcagccactgattctctcttgtccttcacatcacccatgttgagacctcagcttggcactcaggtgctgaagggtaatatggactcagccttgcaaatagccagtgctagttctgacccaaccacagaggatgctgacatcatttgtattatgttccaaggctactacagagaaggctgcctgctatgtatttgcaaggctgatttatggtcagaatttccctctgatatgtctagggtgtgatttaggtcagtagactgtgattcttagcaaaaaatgaacagtgataagtatactgggggcaaaatcagaatggaatgctctggtctatataaccacatttctaagcctttgagactgttcctgagccttcagcactaacctatgagggtgagctggtcccctctatatatacatcatacttaactttactaagtaatctcacagcatttgccaagtctcccaatatccaattttaaaatgaaatgcattttgctagacagttaaactggcttaacttagtatattattattaattacaatgtaatagaagcttaaaataaagttaaactgattatatttgcatctgtgcagaagtgaatgcttttaattttcaatataacacactactaatcacaacttcttgagaaaccatccttcc

SEQ ID NO: 23733 - DNA, 3474 bp, Homo Sapiens
cgcgtccgtcgcgagcgaccgggccgaggggaggccagcgaagccgagtaaaaccgccgcccgggagaagactgaaggagcagttgccgccgttggcggcggcccgagcagttttcgctgctgctacggctgttgccatgaggcgaggctagggaggacctcacttccccggggtgtaataatgttaactgaggccagtctatccatatggggatggggaagccttggcattgtcctttttctgataacctttggaccctttgtaatattttatttgacattttatatcctctgctttgtgggtgggggtttagtggttactctcctgtttggaaaaacaaactcagagaagtacctagaacagtgtgaacactcatttcttcctccaacatcacctggggttcctaagtgcttagaagaaatgaaacgggaagccaggactattaagattgatagaagattgacgggtgccaatataattgatgaacctctccagcaagttatccagttttccttgagggattatgtccagtattggtattatacactaagcgatgatgaatcttttcttcttgaaattaggcagactcttcaaaacgcactcattcagtttgctactaggtcaaaagaaatagactggcaaccttattttactacacgcattgtagatgactttggcacacacttacgagtattcagaaaggctcaacagaaaataacagagaaagatgatcaagtgaaaggtacagcagaagatcttgtagataccttctttgaagttgaagttgaaatggagaaggaggtttgccgtgatctagtgtgcacttcccccaaagatgaagaaggattcctaagggatttgtgtgaggtcttactatatttattgctacctcctggagatttccagaacaagatcatgcgatactttgtcagggaaatccttgcacgaggaattcttcttccattaataaatcaactcagtgatcctgattatattaatcagtatgtcatatggatgatccgtgattctaactgcaactatgaggcctttatgaacattattaaattgagtgacaatattggagagctagaagcagtcagagataaggcagcagaagaattacagtatcttagatctctagatacagctggtgatgatatcaacactatcaaaaatcaaataaatagcttactattcgtaaagaaggtatgtgactcaagaatacagcgattgcagtcaggcaaagaaataaatactgtgaaacttgcagcaaactttgggaaactttgcacagtccccctggacagcattcttgtagacaatgttgcactacaattttttatggattacatgcagcaaactggaggtcaagcacatctattcttttggatgacagtggaaggataccgggttaccgcccaacagcagctagaagttttattaagtcgtcagagagatggaaaacatcaaaccaaccaaaccaaaggtcttttaagagcagctgctgttggaatttatgaacagtatttatcagaaaaggcatctccaagagttactgttgatgactatttagtagcaaaattagcagatactttgaatcatgaagatccaacccctgaaatctttgatgacattcaaagaaaggtatatgaattgatgctacgagatgaaagattttatccttccttcagacagaatgcactttatgtgcgcatgttagctgagcttgacatgttaaaagatcctagtttcagaggatccgatgatggggatggagaatcttttaatgggtctcctacaggaagcataaatttgtctttagatgacctttcaaatgtttcttctgatgactcagtacaacttcatgcctacatttcagacacaggcgtttgtaatgatcatggcaagacatatgcattatatgccatcactgtacaccggcgcaacctaaacagtgaggagatgtggaaaacctatcgtcgttatagtgacttccatgacttccacatgagaatcactgaacagtttgaaagtctctcaagcatattgaaacttcctggaaaaaagacttttaataatatggatagagattttttagaaaagagaaaaaaggatctaaatgcatatttgcagttactgttagctcctgaaatgatgaaggcatcccccgctttagctcactatgtgtatgatttccttgagaacaaagcctacagtaaaggaaaaggggattttgctcgcaagatggacacttttgtaaatccacttcgcaattcaatgaggaatgtttcaaatgcagttaaatcccttcctgatagcttggcagagggaatgactaaaatgtcagacaacatgggcaaaatgtcagaaagattaggtcaagacataaagcaatcattttttaaggtgcctcctttaattcctaagactgattcagaccctgaacatcgccgagtttcggctcaacttgacgataatgtggatgacaatattccacttagggtaatgctgcttctcatggatgaagtattcgacttaaaagaaagaaatcagtggttgcgaaggaatatcaaaaacctacttcaacagcttattagagctacatatggcgatactattaatagaaaaatagttgaccatgttgactggatgacttcacctgaacaagtagccgactcagtgaaacgtttcagagatgcattttggccaaatggcattttagcagaggctgttccatgcagagataaaagtattcgaatgagaacaagagtagcaggaaaaacgaaattacttgcaattatgccagatgagctgaagcacattattggggctgagacaacacggaaaggtattcttcgtgtttttgaaatgtttcagcacaaccaattaaataggagaatggtttatgtcttcttggaaggctttttagaaaccttatttccacagtataaattccgtgaacttttcaacaaactgcattcacggtcaaagcagatgcagaaatataaacagaaacttcaaactactcaagcgccttctttgcagaaaaggtgacactccactctatgaagctggtgttcattttgtccaggactaatggtatggacagatcttctggggcttaactcaaatactgttgtgtctgcaccagtcttttagtgtctcaaaatagattattaatacatccataagtctgtggttcttctcattctcatctataatccaccactaccaagagagatttctgtgtcttaaatgatttggtgcatattttgcaacattgagagaaaactgcccccatctcaagcaagaatggcgttggtttcttccatttcaaactaatcagcattctccagcaatgacaaagtgccagagtgtatatatgaaataaccttatacctgaattacagttttgtgatataaaataaagctgagtataaaataaaaccaatcaaaaaaaaaaaaaaaaaaaa

SEQ ID NO: 23734 - DNA, 3802 bp, Homo Sapiens
caacggaaatagtgcttaccagcaccttagaatgatgctgctcaggaccagtccaacactgaatgtatctgcactgtgaggagaatgttcatagaagcctgttgtgtgcatatttattcacatttttgttaaatgttaaatcgtttagcacggtaatctgagtgcacagtatgtcatttcattccgtttgagtttcttgttttcgttaaatgtctgcagagttgctgcccctttcttgaactatgagtactgcaatctttttaattctcaatatgaatagagctttttgagctttaaatctaaggggaactcgacaggcctgtttggcatatgcaatgaacatcaagaaaccatcttgctgtggaagcataattatttttcttctccctttttgaaagatctttccttttgatgccagttttcttccttgtttacacaagttcaatttgaaaggaaaaggcaatagtaagggtttcaaaatggcagagaaatttgaaagtctcatgaacattcatggttttgatctgggttctaggtatatggacttaaaaccattgggttgtggaggcaatggcttggttttttctgctgtagacaatgactgtgacaaaagagtagccatcaagaaaattgtccttactgatccccagagtgtcaaacatgctctacgtgaaatcaaaattattagaagacttgaccatgataacattgtgaaagtgtttgagattcttggtcccagtggaagccaattaacagacgatgtgggctctcttacggaactgaacagtgtttacattgttcaggagtacatggagacagacttggctaatgtgctggagcagggccctttactggaagagcatgccaggcttttcatgtatcagctgctacgggggctcaagtatattcactctgcaaatgtactgcacagagatctcaaaccagctaatcttttcattaatacggaagacttggtgctgaagataggtgactttggtcttgcacggatcatggatcctcattattcccataagggtcatctttctgaaggattggttactaaatggtacagatctccacgtcttttactttctcctaataattatactaaagccattgacatgtgggctgcaggctgcatctttgctgaaatgctgactggtaaaaccctttttgcaggtgcacatgaacttgaacagatgcagctgattttagaatctattcctgttgtacatgaggaagatcgtcaggagcttctcagcgtaattccagtttacattagaaatgacatgactgagccacacaaacctttaactcagctgcttccaggaattagtcgagaagcactggatttcctggaacaaattttgacatttagccccatggatcggttaacagcagaagaagcactctcccatccttacatgagcatatattcttttccaatggatgagccaatttcaagccatccttttcatattgaagatgaagttgatgatattttgcttatggatgaaactcacagtcacatttataactgggaaaggtatcatgattgtcagttttcagagcatgattggcctgtacataacaactttgatattgatgaagttcagcttgatccaagagctctgtccgatgtcactgatgaagaagaagtacaagttgatccccgaaaatatttggatggagatcgggaaaagtatctggaggatcctgcttttgataccaattactctactgagccttgttggcaatactcagatcatcatgaaaacaaatattgtgatctggagtgtagccatacttgtaactacaaaacgaggtcatcatcatatttagataacttagtttggagagagagtgaagttaaccattactatgaacccaagcttattatagatctttccaattggaaagaacaaagcaaagaaaaatctgataagaaaggcaaatcaaaatgtgaaaggaatggattggttaaagcccagatagcgctagaggaagcatcacagcaactggctggaaaagaaagggaaaagaatcagggatttgattttgattcctttattgcaggaactattcagcttagttcccagcatgagcctactgatgttgttgataaattaaatgacttgaatagctcagtgtcccaactagaattgaaaagtttgatatcaaagtcagtaagccaagaaaaacaggaaaaaggaatggcaaatctggctcaattagaagccttgtaccagtcttcttgggacagccagtttgtgagtggtggggaggactgttttttcataaatcagttttgtgaggtaaggaaggatgaacaagttgagaaggaaaacacttacactagttacttggacaagttctttagcaggaaagaagatactgaaatgctagaaactgagccagtagaggatgggaagcttggggagagaggacatgaggaaggatttctgaacaacagtggggagttcctctttaacaagcagctcgagtccataggcatcccacagtttcacagtccagttgggtcaccacttaagtcaatacaggccacattaacaccttctgctatgaaatcttcccctcaaattcctcatcaaacatacagcagcattctgaaacatctgaactaaaacactcagcagacatttatctttgtattcttcatgaaatgtgttttgtctttttttattactagtgtttaagtcattttttacttgaatcagatggtgtcatttagtaaggattttatgagttcttgttttttaaaatccagactttctttttctacatgtgagatagttttcattttaactggcatgtcatttgcacacaaaaataaagactagagcaaaataatgcaacgcaggaggagaaaagaaatgcactaagacaagaacattctctcatagaacattgatctgttttacaggaaacaaaccttgccttgaaatttacacagtgagactgtacataattgcatgaaaatagctatttttttcctaagacatttttcattcatgaatattttcaagtttttcatactgtacacatttcttaaaacacatgataccagcagcaactgaaaatgaatgccgaatttggtacacatgtgttatctacctcaaggtaacaagagtatgtggcaaaacatataccacccatagtgcttcacaaaatgcacttctatttagccagcgtttattgtagtaaactattcttaataaaactcactcactgtttataaatgttctggtatgcattctttatagtgaagtgttaatacatcacatcttatttattttagcaaatcagtatattttctgtatttaattataaaaaattaacttagtttttaaaatttatttgcaaatatactttactttttccatttggcactatggtttgttgcctacctagctgcatctataatgtcagcttatcctaaggctgtccacgtacttaatttacttaagtgttcattttaagtaacgtgctcactgtgtataggaatttgtattttggaggtgcttgatctatctacaaaagaaaaaattaattaggaattactttattataaaatgctcctagaagtcttaattgtgtttattttttaaaaaaacaaatgttagacttgtgtgcatggaagtaattaaggtacatcattattgtagtttgaaagttgtacatgataagacattttgtttttactgtatgtttttactgaatgatctattccccatcccaaggcaagcatgaataaaattaggttaaacgtaaaaaaaaaaaa

SEQ ID NO: 23735 - DNA, 1401 bp, Homo Sapiens
ggtacctgtaccccacgtagtcgccggttaccgatcggactaagttccagtggtgatttacaagtcaagttaaaatgtccccagaagtggccttgaaccgaatatctccaatgctctcccctttcatatctagcgtggtccggaatggaaaagtgggactggatgctacaaactgtttgaggataactgacttaaaatctggctgcacatcattgactcctgggcccaactgtgaccgatttaaactgcacataccatatgctggagagacattaaagtgggatatcattttcaatgcccaatacccagaactgcctcccgattttatctttggagaagatgctgaattcctgccagacccctcagctttgcagaatcttgcctcctggaatccttcaaatcctgaatgtctcttacttgtggtgaaggaacttgtgcaacaatatcaccaattccaatgtagccgcctccgggagagctcccgcctcatgtttgaataccagacattactggaggagccacagtatggagagaacatggaaatttatgctgggaaaaaaaacaactggactggtgaattttcagctcgtttccttttgaagctgcccgtagatttcagcaatatccccacataccttctcaaggatgtaaatgaagaccctggagaagatgtggccctcctctctgttagttttgaggacactgaagccacccaggtgtaccccaagctgtacttgtcacctcgaattgagcatgcacttggaggctcctcagctcttcatatcccagcttttccaggaggaggatgtctcattgattacgttcctcaagtatgccacctgctcaccaacaaggtgcagtacgtgattcaagggtatcacaaaagaagagagtatattgctgcttttctcagtcactttggcacaggtgtcgtggaatatgatgcagaaggctttacaaaactcactctgctgctgatgtggaaagatttttgttttcttgtacacattgacctgcctctgtttttccctcgagaccagccaactctcacatttcagtccgtttatcactttaccaacagtggacagctttactcccaggcccaaaaaaattatccgtacagccccagatgggatggaaatgaaatggccaaaagagcaaattccaggaggcagcatttgccaatggaaagctctaggaaacaccagtcttgagaggtggccagccagactgcctgtccacatgcgtgtcagcacatacagccgcttcctggaagccgcctggaatgtcttcacggcagcgttttgctcacacagcagcttttgcacgccccaggcagccccgactgctgaaatccaacttgagctggctggtggtccctggatcctagagcccttcact

SEQ ID NO: 23736 - DNA, 3536 bp, Homo Sapiens
gcagcaggagcgagtggggccgcccgccgggccgcggacactgtcgcccggcgcccaggttcccaacaaggctacgcagaagaacccccttgactgaagcaatggaggggggtccagctgtctgctgccaggatcctcgggcagagctggtagaacgggtggcagccatcgatgtgactcacttggaggaggcagatggtggcccagagcctactagaaacggtgtggaccccccaccacgggccagagctgcctctgtgatccctggcagtacttcaagactgctcccagcccggcctagcctctcagccaggaagctttccctacaggagcggccagcaggaagctatctggaggcgcaggctgggccttatgccacggggcctgccagccacatctccccccgggcctggcggaggcccaccatcgagtcccaccacgtggccatctcagatgcagaggactgcgtgcagctgaaccagtacaagctgcagagtgagattggcaagggtgcctacggtgtggtgaggctggcctacaacgaaagtgaagacagacactatgcaatgaaagtcctttccaaaaagaagttactgaagcagtatggctttccacgtcgccctcccccgagagggtcccaggctgcccagggaggaccagccaagcagctgctgcccctggagcgggtgtaccaggagattgccatcctgaagaagctggaccacgtgaatgtggtcaaactgatcgaggtcctggatgacccagctgaggacaacctctatttggtgtttgacctcctgagaaaggggcccgtcatggaagtgccctgtgacaagcccttctcggaggagcaagctcgcctctacctgcgggacgtcatcctgggcctcgagtacttgcactgccagaagatcgtccacagggacatcaagccatccaacctgctcctgggggatgatgggcacgtgaagatcgccgactttggcgtcagcaaccagtttgaggggaacgacgctcagctgtccagcacggcgggaaccccagcattcatggcccccgaggccatttctgattccggccagagcttcagtgggaaggccttggatgtatgggccactggcgtcacgttgtactgctttgtctatgggaagtgcccattcatcgacgatttcatcctggccctccacaggaagatcaagaatgagcccgtggtgtttcctgaggagccagaaatcagcgaggagctcaaggacctgatcctgaagatgttagacaagaatcccgagacgagaattggggtgccagacatcaagttgcacccttgggtgaccaagaacggggaggagccccttccttcggaggaggagcactgcagcgtggtggaggtgacagaggaggaggttaagaactcagtcaggctcatccccagctggaccacggtgatcctggtgaagtccatgctgaggaagcgttcctttgggaacccgtttgagccccaagcacggagggaagagcgatccatgtctgctccaggaaacctactggtgaaagaagggtttggtgaagggggcaagagcccagagctccccggcgtccaggaagacgaggctgcatcctgagcccctgcatgcacccagggccacccggcagcacactcatcccgcgcctccagaggcccacccctcatgcaacagccgcccccgcaggcagggggctggggactgcagccccactcccgcccctcccccatcgtgctgcatgacctccacgcacgcacgtccagggacagactggaatgtatgtcatttggggtcttgggggcagggctcccacgaggccatcctcctcttcttggccctccttggcctgacccattctgtggggaaaccgggtgcccatggagcctcagaaatgccacccggctggttggcatggcctggggcaggaggcagaggcaggagaccaagatggcaggtggaggccaggcttaccacaacggaagagacctcccgctggggccgggcaggcctggctcagctgccacaggcatatggtggagaggggggtaccctgcccaccttggggtggtggcaccagagctcttgtctattcagacgctggtatgggggctcggacccctcactggggacagggccagtgttggagaattctgattccttttttgttgtcttttacttttgtttttaacctgggggttcggggagaggccctgcttgggaacatctcacgagctttcctacatcttccgtggttcccagcacagcccaagattatttggcagccaagtggatggaactaactttcctggactgtgtttcgcattcggcgttatctggaaagtggactgaacggaatcaagctctgagcagaggcctgaagcggaagcaccacatcgtccctgcccatctcactctctcccttgatgatgcccctagagctgaggctggagaagacaccagggctgactttgaccgagggccatggacgcgacaggcctgtggccctgcgcatgctgaaataactggaacccagcctctcctcctacaccggcctacccatctgggcccaagagctgcactcacactcctacaacgaaggacaaactgtccaggtcggagggatcacgagacacagaacctggaggggtgtgcacgctggcaggtggcctctgcggcaattgcctcaccctgaggacatcagcagtcagcctgctcagagcgggggtgctggagcgcgtgcagacacagctcttccggagcagccttcaccttctctctgggatcagtgtccggctggccgacgtggcatttgctgaccgaatgctcatagaggttgacccccacagggtcacgcaggactcggacactgccctggaaacatggatggacaagggcttttggccacaggtgtgggtgtcctgttggaggagggcttgtttggagaagggaggctggctgggggagaaacccggatcccgctgcatctccgcgcctgtgggtgcatgtcgcgtgctcatctgttgcacacagctcactcgtatgtcctgcactggtacatgcatctgtaatacagtttctacgtctatttaaggctaggagccgaatgtgccccattgtcagtgggtccacgtttctccccggctcctctgggctaaggcagtgtggcccgaggcttaaaaagttactcggtactgtttttaagaacacttttatagagttagtggaaggcaagttaagagccaatcactgatccccaagtgttccttgagcatctggtctggggggaccactttgatcggacccacccttggaaagctcaggggtaggcccaggtgggatgctcaccctgtcactgagggttttggttggcatcgttgtttttgaatgtagcacaagcgatgagcaaactctataagagtgttttaaaaattaacttcccaggaagtgagttaaaaacaataaaagccctttcttgagttaaaaagaaaaaaaaaaaaaaaaaaaaaaaaaaaaaaa

SEQ ID NO: 23737 - DNA, 2889 bp, Homo Sapiens
gcgggaagaacaaggcacacaacatcttcccccacatcacactctgccagttctttatgtgcgaggacagcaaggtggatgccctgggggaagccctgcagaccacggtcagtcgctggaaatgtaagttctcggccccgctgcccctggagctctatacgtcgtccaacttcatcggcctctttgtaaaggaagacagtgcggaggtcctcaagaagtttgctgctgactttgctgcagaggctgcatccaaaaccgaagtgcatgtggaacctcataagaagcagctacatgtgaccctggcttaccacttccaagccagccacctacccaccctagagaaactggcccagaacattgacgtcaagctagggtgtgactgggtggctaccatattttctcgggatatccgatttgctaaccatgagacattacaggtcatctacccctataccccacaaaatgacgatgagctggagctggtccccggggacttcatcttcatgtctccaatggagcagaccagcaccagcgaggggtggatctatggcacgtccttaaccaccggctgctctggactcctgcctgagaattacattaccaaggctgatgaatgcagcacctggatatttcatggttcttattcaatcttaaatacatcgtcgtccaactctctcacgtttggggatggagtattggagaggcggccttatgaggaccaggggctcggggagacgactcctcttactatcatctgccagcccatgcagccgctgagggtcaacagccagcccggcccccagaagcgatgcctttttgtgtgtcggcatggtgagaggatggatgttgtgtttgggaagtactggctgtcccagtgcttcgatgccaaaggccgctacatacgcaccaacctgaacatgcctcatagtttacctcagcggagtggtggtttccgagattacgagaaagatgctcccatcactgtgtttggatgcatgcaagcaagactagtgggtgaagccttattagagagcaataccattatcgatcatgtctattgctccccgtcccttcgctgcgttcagactgcacacaatatcttgaaaggtttacaacaagaaaatcacttgaagatccgtgtagagcccggcttatttgagtggacaaaatgggttgctgggagcacattacctgcatggatacctccatcagagttagctgcagccaacctgagtgttgatacaacctacagacctcacattccaatcagcaaattagttgtttcagaatcctatgatacttatatcagtagaagtttccaagtaacaaaagaaataataagtgaatgtaaaagtaaaggaaataacatcctgattgtggcccacgcatcttcccttgaagcgtgtacctgccaacttcagggcctgtcacctcagaactccaaggacttcgtacaaatggtccgaaagatcccatatctgggattttgttcctgtgaagaattaggagaaactggaatatggcagctgacagatccaccaatccttcctcttacccatggaccaactgggggcttcaactggagagagaccttgcttcaagaataaaccacaccagtgaacaagaaggaaaggccttttggagtgtgtctttctgtgtgtttaaaaacagtggaaaatccacaccacactctaagtggacagctcagaataatttagcatatttcctttcacacttaaagttcttaagatgagactgtgtaaatgagagaaagacttgattcagaggaaaaaaatgtgttctctctggactcttgcctagctcacaaggctttggagaattgtcttcctaaatcggggcacctgctacagaagagaatgtttcgttccctctgggtatgcacagctaaggggcctcatttctcccagagggagctgctggcccgctctaaggggtgcaagaggaaggagtgtgcccagaccagctgggggagcattgaaaggacagcttggggatggaatttttttttttttatctccattttccagttaggtagagccaagctgaggaatccttttaagattattagaaaacatgccctgaagagagttgttcttaggttacacatgaaatcctaccgtcactagcccccatacaccagtgttgctggctgaagatacccgcttaaggatgctaacatttaccctggtactgccacattttctctagagcagctggcccttcttgctacagccctatcccccctccttgcttctgtgaaatggggagacaaagcacttttgctctccaaagcacttttggatactcaggaggaaagataagatacatgtttgaagtattcaatcataggagcaaagaacttgcaaaatatgaagtgacttggaattaaccatgttgtagcctaacgtgctactgcatttctaaatcatcaatatttgcttgtctttgcccctagactctagactatgttaactagttaaggatgttacattttgaaaggatgtatgttagatatattatttgcagcaagaagttcattctgtgcaatatggacatgtttgcaaaccataccaagggtcaggttgttgtacacttacagtacgtgtcaaccataatggaacatccacaaatgcatcaattataccagggatgtatagtaagtcagggaactaatataaatgatgacagtcatggctgcactgctacttgtgctgtcgttttgtttgtttttctatgataatttaaaatacataggtagggctactgaggaaatttggagagccacattctgtggtttctcattatacttacttcctgcatttagagggagtttatttaaaagaaataaatgacaatcaaaccaaaaaa

SEQ ID NO: 23738 - DNA, 3813 bp, Homo Sapiens
atggacagtttagaagaacctcagaaaaaagtctttaaggctcgaaaaacgatgagagtgagtgatcgtcagcaacttgaagcagtgtacaaggtcaaagaagaactgttgaaaactgatgtcaagctgttaaatggcaaccatgaaaatggagatttggacccaacctcacctttggaaaacatggattacattaaagacaaggaagaggtgaatggcattgaagagatttgttttgatcctgaaggaagtaaagcagaatggaaggaaacaccctgtatcctaagtgttaatgtaaaaaacaagcaggatgatgatttaaattgtgaacctttgtctccccataatataactccagaaccagtctctaaactgcctgctgaaccagtttctggtgatccagcccctggtgatctggatgccggagatccagcctccggagtactggcctctggtgattccacctctggtgatcccacctctagcgagccctcctctagtgatgctgcctctggtgatgcaacctctggtgatgccccttctggtgatgtgtcccctggtgatgccacctctggtgatgccactgctgatgatctctcctctggtgatcccacctctagtgatcccatcccaggtgaaccggtccctgttgaacccatttctggtgattgtgccgctgatgatatagcctctagtgaaataacttctgttgatctggcttctggagcaccagcttccactgatccagcctctgatgatctggcctctggtgatctatcctctagtgaactggcctctgatgatctggccactggtgaactggcctctgatgagctgacttctgaatcaacctttgatcgtacctttgaaccaaagtctgtaccagtttgtgaaccagttcctgaaattgacaatatagaaccaagtagcaataaagatgatgattttcttgaaaaaaatggagctgatgaaaaattagagcaaattcagagtaaagactcattggatgagaaaaataaagctgataataatattgatgctattgaagaaactctagaaacagatgatacaactatttgttcagatcgacctcctgaaaatgaaaagaaggtagaggaagatattatcacagagcttgctcttggagaagatgctatatctagcagtatggaaattgaccaaggtgaaaagaatgaagatgaaacttctgcagatcttgtagaaacgattaatgaaaatgttattgaagataacaaaagtgagaatatcttagaaaatacagactctatggagacagatgaaatcattcctattttggaaaagcttgcaccttctgaggatgaacttacttgcttttctaaaacatctctccttccaatcgatgagacaaatccagatttggaagagaaaatggaaagttcttttggttcaccatctaaacaagaaagtagtgagagtttgccaaaagaagcctttctggtcctctctgatgaagaggatatttcgggtgaaaaagatgagtctgaagttatatcgcaaaatgaaacgtgctctccagcagaagtagaaagtaatgaaaaggacaacaaacctgaggaagaagagcaagtaatacatgaagatgatgaaagaccttctgagaaaaatgaattttctagacgaaaacgttctaaatcagaagacatggacaatgtacagtctaaacgtcgtcgatatatggaagaagaatatgaggcagaatttcaagtaaagattacagccaaaggagacattaaccagaaacttcaaaaggttatacagtggttgctggaagaaaaattgtgtgcgctgcagtgtgctgtatttgataagactttggcagaattgaaaacacgagtggaaaagattgaatgtaacaagaggcataaaacagttctcactgaactacaggccaagatagccaggttaaccaaacgctttgaagcagccaaagaagatcttaaaaaaagacatgaacatccacccaacccaccagtatcaccaggaaaaactgtaaatgatgtcaacagcaataataacatgtcttacagaaatgcaggcacagtgagacagatgctggagtccaaaagaaatgtaagcgagagtgcaccaccatcctttcaaactcctgtgaatacagtatcttcaaccaatcttgtcactcctccagcagttgtcagtagtcaacctaaattgcagactccagtgacttcgggttccctcacagcaacgtcagttcttcctgcacccaatacagctactgtagttgctactactcaggtgcctagtggaaatccccagcctacaatctctttacagcctttgccagtgattttgcatgtacctgttgcagtatcctcccagcctcagcttctacagagccatccagggactttggtgactaatcaaccatctggcaatgttgaattcatttctgtgcaaagcccacctacagtgagtggtcttaccaaaaatccagtatccttgccatccttgccaaatcccactaaaccaaacaacgttccttctgtgcccagtcctagtattcaaaggaaccctactgccagtgctgcaccattgggaacaacacttgctgtgcaggctgttccaacagcacactctattgtacaagccacaaggacttctttacccacagtgggcccatcaggactctatagtccatcaactaatcgaggtcctatacagatgaaaattccaatttctgcatttagtacttcgtctgctgcagaacagaacagcaataccaccccaagaattgaaaaccagacaaacaaaacaatagatgcttctgtcagtaagaaagcagctgatagcacatcacagtgtggaaaagccactggcagtgattcaagtggtgtcattgatctcacaatggatgatgaagagagtggagcttcacaagaccccaaaaaactaaatcacactcctgtatcaaccatgagttcttctcagcctgtgtcacgaccattgcaacccatacaaccagcaccgcctcttcaaccatctggggtgccaacaagtggaccatctcagaccaccatacacttactacctacagctccaactaccgtgaatgtaacacatcgtccagtaactcaggtgaccacaagactccctgtaccaagagctcctgcaaaccaccaggtggtttatacaactcttcctgcaccaccagctcaggctcccttgcgaggaactgttatgcaggctcctgctgttcggcaggtcaatccccaaaatagtgttacagttcgagtgcctcaaacaaccacatatgttgtaaacaatggactaaccctgggatcaacaggacctcagctcacagtgcatcaccgaccaccacaagtgcatactgagcccccacgccccgtgcacccagcacccttaccagaagctccacaaccacagcgtctgcccccagaagctgccagcacatctctgcctcagaagccacacttgaagttagcacgcgttcagagtcaaaatggcatagtactgtcatggagtgtcctggaggtggatcgaagctgtgccactgttgatagctaccatctctatgcttaccatgaggaacccagtgccactgtgccctcacaatggaaaaagattggggaagtcaaggcacttcccttgcccatggcatgtactctcacccagtttgtatctggtagcaaatactactttgcagtacgagccaaggatatttatggacgttttgggcctttctgtgatcctcagtcaacagatgtgatctcttctacccagagcagttaa

SEQ ID NO: 23739 - DNA, 1038 bp, Homo Sapiens
atgggactcttggtatttgtgcgcaatctgctgctagccctctgcctctttctggtactgggatttttgtattattctgcgtggaagctacacttactccagtgggaggaggactccaattcagtggttctttcctttgactccgctggacaaacactaggctcagagtatgatcggttgggcttcctcctgaatctggactctaaactgcctgctgaattagccaccaagtacgcaaacttttcagagggagcttgcaagcctggctatgcttcagccttgatgacggccatcttcccccggttctccaagccagcacccatgttcctggatgactcctttcgcaagtgggctagaatccgggagttcgtgccgccttttgggatcaaaggtcaagacaatctgatcaaagccatcttgtcagtcaccaaagagtaccgcctgacccctgccttggacagcctccgctgccgccgctgcatcatcgtgggcaatggaggcgttcttgccaacaagtctctggggtcacgaattgacgactatgacattgtggtgagactgaattcagcaccagtgaaaggctttgagaaggacgtgggcagcaaaacgacactgcgcatcacctaccccgagggcgccatgcagcggcctgagcagtacgagcgcgattctctctttgtcctcgccggcttcaagtggcaggactttaagtggttgaaatacatcgtctacaaggagagagtggaggccgccttcaccctcattggcctgcccttcaacaatggcctcatgggccgggggaacatccctacccttggcagtgtggcagtgaccatggcactacacggctgtgacgaggtggcagtcgcaggatttggctatgacatgagcacacccaacgcacccctgcactactatgagaccgttcgcatggcagccatcaaagagtcctggacgcacaatatccagcgagagaaagagtttctgcggaagctggtgaaagctcgcgtcatcactgatctaagcagtggcatctga

SEQ ID NO: 23740 - DNA, 1533 bp, Homo Sapiens
atgcccctgtccctgggagccgagatgtgggggcctgaggcctggctgctgctgctgctactgctggcatcatttacaggccggtgccccgcgggtgagctggagacctcagacgtggtaactgtggtgctgggccaggacgcaaaactgccctgcttctaccgaggggactccggcgagcaagtggggcaagtggcatgggctcgggtggacgcgggcgaaggcgcccaggaactagcgctactgcactccaaatacgggcttcatgtgagcccggcttacgagggccgcgtggagcagccgccgcccccacgcaaccccctggacggctcagtgctcctgcgcaacgcagtgcaggcggatgagggcgagtacgagtgccgggtcagcaccttccccgccggcagcttccaggcgcggctgcggctccgagtgctggtgcctcccctgccctcactgaatcctggtccagcactagaagagggccagggcctgaccctggcagcctcctgcacagctgagggcagcccagcccccagcgtgacctgggacacggaggtcaaaggcacaacgtccagccgttccttcaagcactcccgctctgctgccgtcacctcagagttccacttggtgcctagccgcagcatgaatgggcagccactgacttgtgtggtgtcccatcctggcctgctccaggaccaaaggatcacccacatcctccacgtgtccttccttgctgaggcctctgtgaggggccttgaagaccaaaatctgtggcacattggcagagaaggagctatgctcaagtgcctgagtgaagggcagccccctccctcatacaactggacacggctggatgggcctctgcccagtggggtacgagtggatggggacactttgggctttcccccactgaccactgagcacagcggcatctacgtctgccatgtcagcaatgagttctcctcaagggattctcaggtcactgtggatgttcttgacccccaggaagactctgggaagcaggtggacctagtgtcagcctcggtggtggtggtgggtgtgatcgccgcactcttgttctgccttctggtggtggtggtggtgctcatgtcccgataccatcggcgcaaggcccagcagatgacccagaaatatgaggaggagctgaccctgaccagggagaactccatccggaggctgcattcccatcacacggaccccaggagccagccggaggagagtgtagggctgagagccgagggccaccctgatagtctcaaggacaacagtagctgctctgtgatgagtgaagagcccgagggccgcagttactccacgctgaccacggtgagggagatagaaacacagactgaactgctgtctccaggctctgggcgggccgaggaggaggaagatcaggatgaaggcatcaaacaggccatgaaccattttgttcaggagaatgggaccctacgggccaagcccacgggcaatggcatctacatcaatgggcggggacacctggtctga

SEQ ID NO: 23741 - DNA, 3569 bp, Homo Sapiens
aggcggctgaacaaggttgtgggggtaggaagctagggttagaggcaacccgtgaggctagaaccccgaacgtggtcggttggagaaaatatgtccctccggaggcacattgggaaccctgagtatctgatgaaaaggataccacagaacccaagataccagcatatcaaatcaagactggacactggtaacagtatgactaaatatactgagaagctcgaagagattaagaaaaattatagatacaaaaaagatgagcttttcaagagactaaaagttacaacttttgcccagctgatcatccaagttgcttccctctctgatcaaacactggaagtgacagctgaggagattcaaaggctggaagacaatgattctgcagcttcagaccctgatgctgaaaccactgccaggaccaatgggaaaggaaatccaggtgagcagtcgccgagccctgagcagttcataaacaacgcaggagcaggggactccagccgctcaactcttcagagtgtcatcagtggtgttggggaactggatctagacaaagggccagtgaagaaagcagagccccataccaaagacaaaccttatcctgactgccccttcctgctgctagatgtgcgtgatagagattcttaccagcagtgccacattgttggagcttacagttacccaattgcaactctgtctagaacaatgaacccttattcaaatgatattcttgaatataaaaatgcccatggcaagatcatcattctgtatgacgatgatgaaaggctggccagtcaggcggccaccaccatgtgcgagcgtggatttgaaaacctcttcatgctttccggaggtctaaaagtcttagctcagaaattcccggaaggactgattactggttccctgccagcatcttgccagcaggcccttcctcctgggtctgcccggaaacgatccagccccaaagggccacccctaccagctgagaataaatggagatttaccccagaagacttaaaaaagatagaatattatctggaagaggagcaagggcctgcagatcatcctagccgactgaaccaagctaactcctccggaagagagtccaaggtgcctggtgcccgaagcgctcagaatctgccaggtggcggccccgccagccactcaaacccccgctccctcagcagtggtcacctgcaaggcaaaccctggaagtaaagactttgtctcacttaggcaaataaatgttcttcctcttttcagaacccctgagcatttcccaagttgggtcatttccagaaacttctgcagaggaaagaccatgacatatgtatgggataggcctcttccctgtccctgtctccagttcctctcccctcaggaggccacctcaggaaggattttgacaggtgaccataaaaaccagaggtgtgacaggctctagtctcctccctgttgtttacagcatatttaagtcttgtgaaactgtataggaaaaaagtatctacgtttttagtttttttgttttgtttttttttaataaggtccagcttgttgggtctctctgtgttgttttgtaaatacttcagtcacatctgcccgtgtgcctgtccctgccaccttttcattcactgttcttgacttcatgaaggcttctccgggcagtcttggtgtgagaagctgtttccaagggtgcagatgagccttaggttccagccgcctgcagaccccaccccagcaggctcactcagcaaggagctctctgcccagcatattgcaggccctgttttgagtatggaagccagtgcctgtgtactcactgaaattgaagatgaggaaagtagctgtacactcactgaatgctcccccttactagatatttcctggagccagaaaggtatgcatgtgggtgtcttcacaccggggaggagggcctctcatgggaaagccctggccaccacaccggcctgtgccccttgaagcccaccaaagcggccctcacttgtggtcagtatatcagttatgacgcccattgcccagcttcagtccatccatgttagatggacagaaattatggccagttgaaaataccagctttggttggacaactgtggacacacaaggtgaagaggactccgaagtcctttgtcagggctgacaacctcgtaagcccttgcttagaaatacagtattagtctaattgagtaattagtgcaatttcctgcttacttttcattctcatgactgaactgtgattaggaagttgtgattatagattctggttttggccggaattttgaatcagcattaattgaattgctaaatgactgacattcattccatttaattgggggaacaaaaggcctcaggtaaggatgaggaactctgaaatcagatggaaaagagcggtgttaatttttatggtctgtgatcgtagctgtgataagggactgaggaataaattgtgctctttgtcatggcaaccagcttctgaaaagcccactgaaaattgcctgtcctgctggtaactgctacggggtaagatttgccttaacagtactattttctcgccaccaaaaaaaaaaaaaaaaaaaaaaaaaaatgcaccacagtatttctagcatgggggctgtgtttgtatgagaaataaacgtaataaatatctcatagagacatatggaaaaataactttcagattcagcccagttctgttttagagtgtgtttattcttctctacttgatttccaaagtgcaacattttccgatgctttagaaatcaaacaaaccagggacattgttcagatgtcaagccatgcccaattttccacaagattcaagaatcttgtataaaattcagccaacgtacacatagctttaatgaggagcctgtcatgtttccccataaatttattgcctgagaacttagttcagcctttgctaatgccaaaatgctctggctttgtattttctttacagcatagatagaaaaatgcacatttttccacactcagctttcccctagcatggacaagattttcagccatttttgccacatatacatttttaaggaaaaaagatttttctctgtaagaaagttctggttatgctgttttaaaggtgacttgtcaggagttgagacttccctgccggattctattttgaaagtaaatggtcttccctccttgttccgattctgcgttcccatcgtcagacaactttggagtattagaaaccactgtatatatgtggaaagccaggtcagccagacctgttagaattggtgtgcactcacctgagagatctggcaggttggatatatttatgtgtatttctccacagtgcttgctttgccctgttggtaaggattttaaataaccatgctcaaaagagctgttctaatctgcgttttgcatgttaagtgttaatatcaaacattctttacgtgctcgaggtattgcttttaacattctactttgccagtttcttcattagattaattgacatgtattatttaaatgaccagtgatgctttgtgcaattatgaatgttgaagattaaagtacatagttactaa

SEQ ID NO: 23742 - DNA, 1761 bp, Homo Sapiens
  misc_feature (1262)..(1262): n is a, c, g, or t
aggagagatgtgagcctcgtaccaggaagatcatactgaggccaccaggttgagagccgcctggctggggggcttgtccggggacagcaggggcagaggcatggaggttcacagccaggaaatcgtgcagtgaacctgtcccctccggtcacaacatcaagagctgaactgggactagaagtcatcgccccagagctttttgctaccagaactgccgggtgaaaatctttggaagagaagtttgagaacctgttaaacaagctctctaggtaattctgtgcacgttcagtctgagaactgctgcatctgaagagatttgaacatggaattcaatccttcagatcatcctcgggccagcacaatattcctcagtaaatctcagacagacgtgagagaaaaacgcaagagtctcttcattaaccatcatcctccaggacaaatagcaaggaaatacagttcctgctccaccattttcctagatgatagcacagtcagtcaaccaaacctcaagtatacaattaaatgtgtcgctcttgcaatatattatcacatcaaaaacagggacccagatggaaggatgctcttagatatttttgatgaaaatcttcaccctctttcgaaatccgaagtgccaccagattatgacaaacacaacccagagcagaagcagatttaccggttcgttcggacactgttcagtgctgctcagctgacggctgaatgtgccatcgtcaccctggtgtaccttgaaagacttttaacatacgcagagatagatatctgtccggccaactggaagcggattgttttaggggcgatcctgctggcctccaaggtgtgggatgaccaggctgtatggaatgtggattactgccagatcctgaaagacatcacggtggaggacatgaacgagctagagcgacagtttcttgaattgctgcagttcaacatcaatgttccttccagtgtctatgccaagtattattttgatcttcgttctctggcagaagcgaacaacctgagctttcccttggagcccctgagcagggagagggctcacaagcttgaggccatctctcgcctctgcgaggacaagtacaaggacctaagaagatccgcgaggaagcgctcagccagtgcagacaacctgactctgccccggtggtccccagccatcatctcttaactacggaggcccgccggaggccacaccatcccttagtttctcctttagtttgagaaaagacagacttggggtgggnttgtttttctttccttttctttttttaacgcatagctccgtcaagctgcctggatgagcgcccatgcagcaaggctttggaggaagcgtcagtgccctggagatcccagctcgctctccccactgtcagcaacagcacttccttcgtggaggaagtggactcgaatcctggaggaggaaataaagggaaagggaagtcgtggagaggcagggaaaatggttaagcagcccggccctctggaggtcccatgggggcggtagctgaagttggcgagcgcagcggtggatgcagagctggctgcacccagggctgggccagtgtgtcctgtaagacttcttgcattccttctgctgcttttttgggatgggggtatttttgttcatttgtttttgccctgttttgattttggtcccacagagcaggggatgtagtttgtacccaccatggcgcagacttccaaataaatagtactggtcatttctctctgcactaaaaaaaa

SEQ ID NO: 23743 - DNA, 3440 bp, Homo Sapiens
gcggccgcgggccagtttctatctcctcatccagggcttgcgggcgaggcctgttttaagtctccagtaaccgagcggaggcccggcaggcgcgacccgggctgcgtacgtcagagctgcctccgaagtggtaaaatgtgctgcgagaagtggagccgcgtggcggaaatgtttctcttcactgaggagcgggaggattgtaagatactgtgcctttgctccagggcatttgtggaggatcgaaaattgtacaatttgggattaaaaggctattacatcagagacagtggcaacaattcaggagaccaggcgacagaagaagaggaaggtggttattcctgtggtactgcagaatcacatgacagcaaaggcataggcctggatgaaagtgaacttgattctgaggctgaactcatgagaagtatgggattgccacttcaatttggtaggataactgcacataaggattttgaggtatctatgaatactagaaataaagttaaaataaaaaagaaaaaacatcaaaagaaatacttagatgaaattgtgcaagaatcttggagaaaagaatatgaagaagacgacattttggcttcagatgatccatcttcaattgaacagtatgagaacaccagaacatatgaacttcaaagcaaaaaagatactgagacagaaaatcctccagttgaaaacacattatctccaaagctagaaattacagagaaatgggaaaagtattggaatgaatatggaggaggactattgtggcaaagttggcaagaaaaacatccgggtcaagcactatcttctgaaccttggaactttcctgatacaaaggaagaatgggagcaacattatagtcaactttattggtattatttggaacaatttcagtattgggaagctcagggttggacttttgatgcctcgcaaagctgtgatacagatacttacacatctaaaacagaagctgatgacaagaacgatgaaaaatgcatgaaagttgacttagtatcttttccatcttcacctattatggttgataatgatagctctggtacaagtgataaggatcatagtgaaatacttgatggaattagtaacataaaactgaattcagaggaagtaacacagagccaattagattcctgtacaagtcatgatggtcatcaacagctaagtgaagttagtagcaaaagagagtgccctgcttccggccaaagtgaaccacgtaatggaggaaccaatgaggaaagcaactcatcggggaatacaaacacagacccaccagctgaggattcacagaagtcttcaggagcaaacacaagcaaagacagaccacatgccagtggtactgatggagatgaaagtgaggaagacccacctgagcataagccaagcaaactgaagaggagccatgaactggacattgatgaaaacccagcttcagactttgatgacagtggttcccttctaggattcaagtatggctcaggacaaaaatatggtggaatcccaaatttcagtcatcggcaggtcaggtatttagagaagaatgtgaagcttaagtctaagtacctagacatgcgcagacaaataaagatgaaaaacaaacacatcttctttaccaaagagtcagaaaaaccatttttcaagaaaagcaaaattctgagtaaggtagaaaaattcctcacatgggttaataaaccaatggatgaagaagcatcacaggaatcatcttctcatgacaatgtgcacgacgcttccacaagtagtgattcagaggaacaagacatgtctgttaaaaaaggtgatgacctactggagactaataatccagaacctgaaaagtgtcagagcgtatcttcagctggtgaacttgaaacagaaaactatgaaagagacagcttgctagcaactgttccagatgagcaggattgtgttactcaagaagtgccagactcccgccaggcagaaactgaagctgaagtgaaaaagaagaagaacaagaagaagaacaaaaaggtgaatggtctgcctcctgaaatagctgctgttcctgagctggcaaaatactgggcccagaggtacaggctcttctcccgttttgatgatgggattaagttggacagagagggctggttttcagttacacccgagaagattgctgaacacattgctggccgtgttagtcagtccttcaagtgtgacgttgtagtagacgcattctgtggagttggaggaaataccattcagtttgccttaacaggaatgagagtgattgccattgatatcgatcctgttaagattgcccttgctcgcaataatgcagaagtttatgggatagcagataagatagagttcatctgtggagatttcttgctgctggcttcttttttaaaggctgatgttgtgttcctcagcccaccttggggagggccagaccatgccactgcagagacctttgacattagaacaatgatgtctcctgatggctttgaaattttcagactttctaagaagatcactaataatattgtttattttcttccaagaaatgctgatattgaccaggtggcatccttagctgggcctggagggcaagtggaaatagaacagaacttccttaacaacaaattgaagacaatcactgcatattttggtgacctaattcgaagaccagcctctgaaacctaactatgcagcagtgcgaggacaaaagatcatggagtggtcaaaatattcagatgagacatttggcatgtcttcctttattcactgatattttctacccatggtcttatatcaccgtatgaaatggaaacttacaggacttaaatatcagtgaaatattttgagatctttgaataattcctttagaggaattatacaaaattaatatatatgagtcctttgtaatttatttttttttgagacaggatctcacttttaccgcccaggctggagtgcagtgccatgatcacagctcactgcaggttcagccttctgagttcaagcaatccttctgtctcagtctcctcagtagctggggctttaggtgggcactgccacaccgtactaatttttgtattttttgtagagacgaggtcccaccatgttgcccaggctggtgtcaaactcctgggctcagtcagtccccccatctcaccctccccaagtgctggaattacaggcgtgagctactgtgcccagccttacggacatccttttgaattatctttttcactcatagaatatgaatacatttatttagactttttctagaactttcctgttttcatgtctttgcttcatctggaattggcttaacacccttttataaagtttgtgtttgtaaaatttccattgtgacatcaatacgcaatatattttgtaatataggagtttctatttttttattaaaatggcaatgaaagcaa

SEQ ID NO: 23744 - DNA, 2008 bp, Homo Sapiens
  misc_feature (268)..(268): n is a, c, g, or t
cgaggggagagagaggggaagagacaaagtgggtgtgtggcctccctggctcctccgtctgaccctctgcggccactgcgccactgccatcggacaggaggattccttgtgttttgtcctgcctcttgtttctgtgccccggcgaggccggagagctggtgactttggggacagggggtgggaaggggatggacacccccagctgactgttggctctctgacgtcaacccaagctctggggatgggtggggaggggggccgggtgacncccaccttcgggcagtcctgtgtgaggattaagggacggggtgggaggtaggctgtggggtgggctggagtcctctccagagaggctcaacaaggaaaaatgccactccctacccaatgtctcccacacccaccctttttttggggtgcctaggttggtttcccctgcactcccgaccttagcttattgatcccacatttccatggtgtgagatcctctttactctgggcagaagtgagccccccccttaaagggaattcgatgcccccctagaataatctcatccccccacccgacttcttttgaaatgtgaacgtccttccttgactgtctagccactccctcccagaaaaactggctctgattggaatttctggcctcctaaggctccccaccccgaaatcagcccccagccttgtttctgatgacagtgttatcccaagaccctgccccctgccagccgaccctcctggccttcctcgttgggccgctctgatttcaggcagcaggggctgctgtgatgccgtcctgctggagtgatttatactgtgaaatgagttggccagattgtggggtgcagctgggtggggcagcacacctctggggggataatgtccccactcccgaaagcctttcctcggtctcccttccgtccatcccccttcttcctcccctcaacagtgagttagactcaagggggtgacagaaccgaagaagggggtgacagtcctccatccacgtggcctctctctctctcctcaggaccctcagccctggcctttttctttaaggtcccccgaccaatccccagcctaggacgccaacttctcccaccccttggcccctcacatcctctccaggaagggagtgaggggctgtgacatttttccggagaagatttcagagctgaggctttggtacccccaaacccccaatatttttggactggcagactcaaggggctggaatctcatgattccatgcccgagtccgcccatccctgaccatggttttggctctcccaccccgccgttccctgcgcttcatctcatgaggatttctttatgaggcaaatttatattttttaatatcggggggtggaccacgccgccctccatccgtgctgcatgaaaaacattccacgtgccccttgtcgcgcgtctcccatcctgatcccagacccattccttagctatttatccctttcctggtttccgaaaggcaattatatctattatgtataagtaaatatattatatatggatgtgtgtgtgtgcgtgcgcgtgagtgtgtgagcgcttctgcagcctcggcctaggtcacgttggccctcaaagcgagccgttgaattggaaactgcttctagaaactctggctcagcctgtctcgggctgacccttttctgatcgtctcggcccctctgattgttcccgatggtctctctccctctgtcttttctcctccgcctgtgtccatctgaccgttttcacttgtctcctttctgactgtccctgccaatgctccagctgtcgtctgactctgggttcgttggggacatgagattttattttttgtgagtgagactgagggatcgtagatttttacaatctgtatctttgacaattctgggtgcgagtgtgagagtgtgagcagggcttgctcctgccaaccacaattcaatgaatcccctctccccttggttctgcactgttgccaataaaaagctcttaaaaacgcaaa

SEQ ID NO: 23745 - DNA, 3076 bp, Homo Sapiens
cggcacgaggctacggcggcggcagcggcggcgcggttgcgattccgagccgttgagacgcctctgcggcagctggtggcgcaggtggcttgcgtggacgcgggtagaggcgaccggccagcaaccgcagcgtcggcgcccgcggccccggcaggcgcgtcgggacgccccgaggcatcctcccccgcccgcgggcccggtagctgggcccgcgtccgccgcccgcatccccgcgccgccgcatctcctcgccgcctcccgggcttcggacccccggtctcgcccccgaaacatgactcgcgatttcaaacctggagacctcatcttcgccaagatgaaaggttatccccattggccagctcgagtagacgaagttcctgatggagctgtaaagccacccacaaacaaactacccattttcttttttggaactcatgagactgcttttttaggaccaaaggatatatttccttactcagaaaataaggaaaagtatggcaaaccaaataaaagaaaaggttttaatgaaggtttatgggagatagataacaatccaaaagtgaaattttcaagtcaacaggcagcaactaaacaatcaaatgcatcatctgatgttgaagttgaagaaaaggaaactagtgtttcaaaggaagataccgaccatgaagaaaaagccagcaatgaggatgtgactaaagcagttgacataactactccaaaagctgccagaagggggagaaagagaaaggcagaaaaacaagtagaaactgaggaggcaggagtagtgacaacagcaacagcatctgttaatctaaaagtgagtcctaaaagaggacgacctgcagctacagaagtcaagattccaaaaccaagaggcagacccaaaatggtaaaacagccctgtccttcagagagtgacatcattactgaagaggacaaaagtaagaaaaaggggcaagaggaaaaacaacctaaaaagcagcctaagaaggatgaagagggccagaaggaagaagataagccaagaaaagagccggataaaaaagaggggaagaaagaagttgaatcaaaaaggaaaaatttagctaaaacaggggttacttcaacctccgattctgaagaagaaggagatgatcaagaaggtgaaaagaagagaaaaggtgggaggaactttcagactgctcacagaaggaatatgctgaaaggccaacatgagaaagaagcagcagatcgaaaacgcaagcaagaggaacaaatggaaactgagcagcagaataaagatgaaggaaagaagccagaagttaagaaagtggagaagaagcgagaaacatcaatggattctcgacttcaaaggatacatgctgagattaaaaattcactcaaaattgataatcttgatgtgaacagatgcattgaggccttggatgaacttgcttcacttcaggtcacaatgcaacaagctcagaaacacacagagatgattactacactgaaaaaaatacggcgattcaaagttagtcaggtaatcatggaaaagtctacaatgttgtataacaagtttaagaacatgttcttggttggtgaaggagattccgtgatcacccaagtgctgaataaatctcttgctgaacaaagacagcatgaggaagcgaataaaaccaaagatcaagggaagaaagggccaaacaaaaagctagagaaggaacaaacagggtcaaagactctaaatggaggatctgatgctcaagatggtaatcagccacaacataacggggagagcaatgaagacagcaaagacaaccatgaagccagcacgaagaaaaagccatccagtgaagagagagagactgaaatatctctgaaggattctacactagataactaggttgacatacctggaatatagagaacacttgagaagtttgtaatggttttcatttgaaatagactgctgaaagttttaaatttttataagcataggtttgatgttgaaaacttgttttgagggagaaaatccctttgttttaaagtaaagtaaacattatcgctaagtgtacttgtgcagtattaacagctacattatacagtaaatgtgggataaaatccatttagaaaatgttaaactgcttttccagacatggttgtagcatattttcaattagtgtgtgtatgttaatgtgtaattgatagtagaacaaagttacatttttaaaactgctacttgtataaaccttgcctcttttcccaaatactgtgggttttgtgcatagtttttacaaaccttggatttaccagactgtcttttcactgtttgtgggttttgtagaagttacacatttttatggtagataaaatgttacttctatacaagtactcactccctttttatcaaaagttaattttaatctcacagtctacattgtgctacattatccagcttctttggaacaatgtgtgctctgtatggttttttttggtatgacaactaattaagcaactgacattgaactgagaattctacaaactataaaacattaatttttgaaggtaatttagttttgtggctgggcattcagtgaagtcttaggacttctttgcagacaactgactgggtatatataggaatgaatctggctttagggttaaatcatttaaggtccttttataggcaggcactagtaactaaaactgaaaactaagtaagtttatttttgaggaatgttgttaaaaatgtctttaggaagtcactaaaacttaattggaagaaaaaatcatgatgcttatccaataaatatgaataaatgttatataaggaaactcacctatttgaaatcatggctatattgtttttattttctagattccaaaaatacaaacactagttgttccagcattgtactttgataagtctgtacattgacgtgtatggactaaatccagggtaaaatcaatgttacaaaatttaagggtatgttaactaaaggatagcatttctaagatattttgaatattagggtcatttggcacttctcagcaagtaggatacttctcatgttttgaaattatatgaatatgg

SEQ ID NO: 23746 - DNA, 3060 bp, Homo Sapiens
atggcggcgcgggacagtgacagcgaagaagatctggtcagctatgggaccgggctggagcctctggaagaaggtgaaagaccaaagaaaccaatccctcttcaggatcagactgtcagagatgaaaaaggaaggtataaacgattccacggggcctttagtggaggtttctctgctggatacttcaatactgttggctcaaaagaaggatggacaccctctacctttgtgtcttcacgacagaacagagcagacaaatctgttcttggtcctgaagattttatggatgaagaggatcttagtgaatttgggatagcacctaaagcgattgtcaccacagacgattttgcctccaaaaccaaagacagaatacgagaaaaggctaggcagttggccgctgctactgcccctattcctggagccaccctccttgatgacctcataacgccagcaaaattatctgttggtttcgaattgctaagaaaaatgggttggaaagaaggacaaggagttggtcctcgagtaaagagacggccacgccgacagaaacctgatcctggagtcaaaatctatggctgtgcattaccccctggaagctcggaaggatctgagggtgaagatgatgactacttgcctgataatgtgacctttgcacccaaagatgtcacacctgtggatttcacacctaaagataatgtgcatggtctagcttacaagggcctggatccccaccaggcactgtttggaacttcgggagaacattttaatcttttcagtggtggttctgagagagctggcgatcttggagaaattggactgaataaaggaagaaaattgggaatttcaggccaggcttttggtgtaggtgccctggaagaggaagatgatgatatctatgccacagaaactctatccaagtatgacactgttctgaaggacgaggagcctggagacggactctatggctggacagcacccaggcagtataaaaaccagaaagaatcagagaaagaccttcggtacgttggcaaaattttggatggattttccttggcttctaaacctttatcttctaagaaaatctatccacctccagagctgccaagagactatcgaccagtgcattatttcagacccatggtggccgccacctccgagaactcacacttactgcaggtattatcagagtcagctggaaaggcaacgcctgacccagggacacacagtaagcaccaactgaatgcctccaaacgggctgagttgcttggagagacgcctattcaaggttcagctacttcagtgttagaatttctgtcccaaaaagacaaagagagaatcaaagaaatgaagcaggcaactgacctgaaagcagctcagctcaaggccaggagtctggcccagaacgctcagagcagcagagcccagctctcccctgcagcggctgctgggcactgctcttggaacatggcattaggtggtgggacggccaccttaaaagccagcaacttcaagcctttcgccaaagatccggaaaagcaaaagcgatacgacgagttcttagtacacatgaaacagggtcagaaagatgctctggaacgctgtctggaccccagcatgacagagtgggagcgaggccgtgagcgggatgagtttgcccgggcggccctgctgtacgcatcttcccattcgaccttgtcctccaggttcactcacgccaaggaggaggatgactcagatcaggttgaagtccctcgagaccaagagaatgatgtcggggataagcagtcggctgtgaagatgaagatgtttgggaagctcacccgagacacgtttgagtggcaccctgacaagcttctatgtaagagatttaatgtccctgacccttatccagattcaactttagttggcttaccaagagtgaagcgtgacaagtactcagtcttcaactttctgacgctcccagagacagcttccttgcccaccactcaagcatcaagtgaaaaagtatcacagcaccgaggtcccgacaaatcaagaaaaccatccagatgggatacctctaaacacgaaaagaaagaagattccattagtgaatttttaagtttggctagatcaaaagccgagccacctaaacaacagtccagccccttagtaaacaaagaggaagagcatgcaccagaattatccgcaaatcagaccgtcaacaaagatgtggacgcacaggctgaaggagaagggagcccgccatccatggacttattcagggccatctttgccagttcctcagatgaaaagtcctcatcctccgaggatgagcaaggtgacagtgaagatgatcaggcaggctctggggaggccaacttccaaagctcccaagacactgacttgggggaaacatcatctgtggctcacgctcttgtgccagcaccccaggagccgccaccttccttcccgatacaaaagatgcagatagatgaaagagaagagttcggcccgcggctgcctcccgtcttctgccccaatgctcgtcagacacttgaggttcctcaaaaagagaaacataaaaagaacaaagacaagcacaaggccaagaaagagcacaggcggaagaaagagaagaaaaagaaacacaggaagcacaaacacaaaggcaagcaaaagaataaaaaaccagagaaaagtagtagctccgagagttccgacagcagcgacagccagagtgacgaggaaaccgcagacgtgtcgccccaggagctgctgagacggctgaaaagtcttccactaagaaggcagtaattgaatgctgccctggctcgtcctagaatcatttctcctccatgatggaagcccagtgattgttcagttaacgcattgtacagagtgtatttatatgtaaattcctgctgtaaaataatttttaaaaccttgacatttcaaagactgccttgaaaggtcgcagaaattgatttctatttttaatttcagttagtatcgggggaaaaaaatccagactgaacagtttaattaaagtggaatttttctaaaaaaaaaaaaaaaaaa

SEQ ID NO: 23747 - DNA, 750 bp, Homo Sapiens
atggtggatcgcttggcaaacagtgaagcaaatactagacgtataagtatagtggaaaactgttttggagcagctggtcaacctttaactatacctggacgagttcttattggagaaggagtattgactaagttgtgcaggaaaaagcccaaagcaaggcagtttttcttgtttaatgatattcttgtatatggcaatattgtcatccagaagaaaaaatataacaaacaacatattattcccctggaaaatgtcactattgattccatcaaagatgagggagacttaaggaatggatggctaatcaagacaccaactaaatcttttgcagtttatgctgccactgctacggagaaatcagaatggatgaatcatataaataaatgtgttactgatttactctccaaaagtgggaagacacccagtaatgaacatgctgctgtctgggttcctgactctgaggcaactgtatgtatgcgttgtcagaaagcaaaattcacacctgttaatcgtcgccaccattgccgcaaatgtggttttgttgtctgtgggccctgctctgaaaagagatttcttcttcccagccagtcctctaagcctgtgcggatttgtgacttctgctatgacctgctttctgctggggacatggccacatgccagcctgctagatcagactcttacagccagtcattgaagtctcctttaaatgatatgtctgatgatgatgacgatgatgatagcagtgactaa

SEQ ID NO: 23748 - DNA, 1309 bp, Homo Sapiens
ctctgctggagcaggacttcagagtgtttgttttcagcctgcttttaaagtgatttgaagagagcggctttgaagattatcgcggaacacctgcccattaatcttgaccctgttaaaacaataactgcctatccagatatgccacacttctgcctgctgttggcaaccctcctggactaggctgctcttgttaatcacatggatgttatataagagttcggaccgcccagcacacaaggtcagcatgctgctcctctgtcacgctctcgctatagctgttgtccagatcgttatcttctcagaaagctgggcatttgccaagaacatcaacttctataatgtgaggcctcctctcgaccctacaccatttccaaatagcttcaagtgctttacttgtgaaaacgcaggggataattataactgcaatcgatgggcagaagacaaatggtgtccacaaaatacacagtactgtttgacagttcatcacttcaccagccacggaagaagcacatccatcaccaaaaagtgtgcctccagaagtgaatgtcattttgtcggttgccaccacagccgagattctgaacatacggagtgtaggtcttgctgtgaaggaatgatctgcaatgtagaattacccaccaatcacactaatgcagtgtttgccgtaatgcacgctcagagaacatctggcagcagtgcccccacactctacctaccagtgcttgcctgggtctttgtgcttccattgctgtgatgccaccattcctaggagaggcagagaccagcctctaaagcacaagccaaaaactgtgtgaacggtgaactttggagtgaagatcaatcttgcacttggtgaagagtgcacattggacctcaaggcgaaagccagtggtttgcttggataaaatgttcccgcatgaggccacaggactgaggatgggaatttggcagggcctgagaagatggtctgacttccaggcttcctggtcaaagagagctacgtttgggcagttctgcagagaggatcctggcaactagtcccacctgaataggcctttagctgaaaggatttcttgacctccttgactgcctcagaggctgccaggtcaaaccctcttgtttatgtgattagctcagagcatctctatgaaatctaacccttcccctcatgagaaagcagttttccccaccaacagcatagtcaatgagaaaggcaactgtacgaagaaaacttccagtggaactaatatgaaatctatttgcaaattatggggggaaataaagcttttaaattatacaatgtaaaaaa

SEQ ID NO: 23749 - DNA, 2092 bp, Homo Sapiens
aacggagcggacgccatggcgaccaacatcgagcagatttttaggtctttcgtggtcagtaaattccgggaaattcaacaggagctttccagtggaaggaatgaaggccagctgaatggtgaaacaaatacacccattgaaggaaaccaggcgggtgatgcagctgcctctgccaggagtctaccaaatgaagaaatagtgcagaagatagaggaagtactttctggggtcttagatacagaactacgatataagccagacttgaaagagggctccagaaaaagtagatgcgtatctgtacaaacagatcctactgatgaaattcccactaaaaagtcaaagaagcataaaaagcacaaaaacaaaaagaagaaaaagaagaaagaaaaggaaaaaaaatataaaagacagccagaagaatctgagtcaaagacgaaatctcatgatgatgggaacatagatttagaatctgattcctttttaaagtttgattctgaaccttcagctgtggcgctggagcttcctacaagagcatttggcccatctgagaccaatgaatcccctgcagttgtgctagaacctcctgtagtatcaatggaggtatcagagccacacatcttagaaactctgaagccagctacaaaaactgcagaactgtcagttgtatctacatcagtaatctcagagcagtcagagcagtctgtggcagtaatgccagaaccatccatgacaaagattctggattcctttgcagcagcaccagtgcctactacaacactggtgttgaagtcatctgagccagttgtaacaatgtcagtggagtatcagatgaagtctgtgctgaaatctgtggagagcacatctccagagccatcaaagatcatgttggtagagcccccagtagcaaaagtgttagagccttcagaaacccttgtggtatcatcagagacacctactgaggtgtaccctgagccaagcacatcaacaacaatggattttccagagtcatctgcaattgaagcgctaagattgccagagcagcctgtagacgtaccatcggagattgcagattcatccatgacaagaccgcaggagttgccggagctgcctaagaccacagcgttggagctgcaggagtcgtcggtggcctcagcgatggagttgccggggccacctgcgacctccatgccggagttgcaggggccccctgtgactccagtgctggagttacctgggccctctgctaccccggtgccagagttgccagggcccctttctaccccagtgcctgagttgccagggccccctgcgacagcagtgcctgagttgccagggccctctgtgacaccagtgccacagttgtcgcaggaattgccagggcttccagcaccatccatggggttggagccaccacaggaggtaccagagccatctgtgatggcacaggagttgccagggctgcctttggtgacagcagcagtagagttgccagagcagcctgcggtaacagtagcaatggagttgaccgaacaacctgtgacgacgacagagttggagcagcctgtggggatgacaacggtggaacatcctgggcatcctgaggtgacaacggcaacagggttgctggggcagcctgaggcaacgatggtgctggagttgccaggacagccagtggcaacgacagcgctggagttgccggggcagccttcggtgactggggtgccagagttgccagggctgccttcggcaactagggcactggagttgtcggggcagcctgtggcaactggggcactagagttgcctgggccgctcatggcagctggggcactggagttctcggggcagtctggggcagctggagcactggagcttttggggcagcctctggcaacaggggtgctggagttgccagggcagcctggggcgccagagttgcctgggcagcctgtggcaactgtggcgctggagatctctgttcagtctgtggtgacaacatcggagctgtcaacgatgaccgtgtcgcagtccctggaggtgccctcgacgacagcgctggaatcctataatacgaacgttccatgatgtcatc

SEQ ID NO: 23750 - DNA, 6189 bp, Homo Sapiens
cgcgccgcctcgctagccgaaacctgcccagccggtgcccggccactgcgcacgcgcgggacgacgtcacgtgcgctcccggggctggacggagctggcaggaggggccttgccagcttccgccgccgcgtcgtttcaggacccggacggcggattcgcgctgcctccgccgccgcggggcagccggggggcagggagcccagcgaggggcgcgcgtgggcgcggccatgggactgcgccggatccggtgacagcagggagccaagcggcccgggccctgagcgcgtcttctccggggggcctcgccctcctgctcgcggggccggggctcctgctccggttgctggcgctgttgctggctgtggcggcggccaggatcatgtcgggtcgccgctgcgccggcgggggagcggcctgcgcgagcgccgcggccgaggccgtggagccggccgcccgagagctgttcgaggcgtgccgcaacggggacgtggaacgagtcaagaggctggtgacgcctgagaaggtgaacagccgcgacacggcgggcaggaaatccaccccgctgcacttcgccgcaggttttgggcggaaagacgtagttgaatatttgcttcagaatggtgcaaatgtccaagcacgtgatgatgggggccttattcctcttcataatgcatgctcttttggtcatgctgaagtagtcaatctccttttgcgacatggtgcagaccccaatgctcgagataattggaattatactcctctccatgaagctgcaattaaaggaaagattgatgtttgcattgtgctgttacagcatggagctgagccaaccatccgaaatacagatggaaggacagcattggatttagcagatccatctgccaaagcagtgcttactggtgaatataagaaagatgaactcttagaaagtgccaggagtggcaatgaagaaaaaatgatggctctactcacaccattaaatgtcaactgccacgcaagtgatggcagaaagtcaactccattacatttggcagcaggatataacagagtaaagattgtacagctgttactgcaacatggagctgatgtccatgctaaagataaaggtgatctggtaccattacacaatgcctgttcttatggtcattatgaagtaactgaacttttggtcaagcatggtgcctgtgtaaatgcaatggacttgtggcaattcactcctcttcatgaggcagcttctaagaacagggttgaagtatgttctcttctcttaagttatggtgcagacccaacactgctcaattgtcacaataaaagtgctatagacttggctcccacaccacagttaaaagaaagattagcatatgaatttaaaggccactcgttgctgcaagctgcacgagaagctgatgttactcgaatcaaaaaacatctctctctggaaatggtgaatttcaagcatcctcaaacacatgaaacagcattgcattgtgctgctgcatctccatatcccaaaagaaagcaaatatgtgaactgttgctaagaaaaggagcaaacatcaatgaaaagactaaagaattcttgactcctctgcacgtggcatctgagaaagctcataatgatgttgttgaagtagtggtgaaacatgaagcaaaggttaatgctctggataatcttggtcagacttctctacacagagctgcatattgtggtcatctacaaacctgccgcctactcctgagctatgggtgtgatcctaacattatatcccttcagggctttactgctttacagatgggaaatgaaaatgtacagcaactcctccaagagggtatctcattaggtaattcagaggcagacagacaattgctggaagctgcaaaggctggagatgtcgaaactgtaaaaaaactgtgtactgttcagagtgtcaactgcagagacattgaagggcgtcagtctacaccacttcattttgcagctgggtataacagagtgtccgtggtggaatatctgctacagcatggagctgatgtgcatgctaaagataaaggaggccttgtacctttgcacaatgcatgttcttatggacattatgaagttgcagaacttcttgttaaacatggagcagtagttaatgtagctgatttatggaaatttacacctttacatgaagcagcagcaaaaggaaaatatgaaatttgcaaacttctgctccagcatggtgcagaccctacaaaaaaaaacagggatggaaatactcctttggatcttgttaaagatggagatacagatattcaagatctgcttaggggagatgcagctttgctagatgctgccaagaagggttgtttagccagagtgaagaagttgtcttctcctgataatgtaaattgccgcgatacccaaggcagacattcaacacctttacatttagcagctggttataataatttagaagttgcagagtatttgttacaacacggagctgatgtgaatgcccaagacaaaggaggacttattcctttacataatgcagcatcttacgggcatgtagatgtagcagctctactaataaagtataatgcatgtgtcaatgccacggacaaatgggctttcacacctttgcacgaagcagcccaaaagggacgaacacagctttgtgctttgttgctagcccatggagctgacccgactcttaaaaatcaggaaggacaaacacctttagatttagtttcagcagatgatgtcagcgctcttctgacagcagccatgcccccatctgctctgccctcttgttacaagcctcaagtgctcaatggtgtgagaagcccaggagccactgcagatgctctctcttcaggtccatctagcccatcaagcctttctgcagccagcagtcttgacaacttatctgggagtttttcagaactgtcttcagtagttagttcaagtggaacagagggtgcttccagtttggagaaaaaggaggttccaggagtagattttagcataactcaattcgtaaggaatcttggacttgagcacctaatggatatatttgagagagaacagatcactttggatgtattagttgagatggggcacaaggagctgaaggagattggaatcaatgcttatggacataggcacaaactaattaaaggagtcgagagacttatctccggacaacaaggtcttaacccatatttaactttgaacacctctggtagtggaacaattcttatagatctgtctcctgatgataaagagtttcagtctgtggaggaagagatgcaaagtacagttcgagagcacagagatggaggtcatgcaggtggaatcttcaacagatacaatattctcaagattcagaaggtttgtaacaagaaactatgggaaagatacactcaccggagaaaagaagtttctgaagaaaaccacaaccatgccaatgaacgaatgctatttcatgggtctccttttgtgaatgcaattatccacaaaggctttgatgaaaggcatgcgtacataggtggtatgtttggagctggcatttattttgctgaaaactcttccaaaagcaatcaatatgtatatggaattggaggaggtactgggtgtccagttcacaaagacagatcttgttacatttgccacaggcagctgctcttttgccgggtaaccttgggaaagtctttcctgcagttcagtgcaatgaaaatggcacattctcctccaggtcatcactcagtcactggtaggcccagtgtaaatggcctagcattagctgaatatgttatttacagaggagaacaggcttatcctgagtatttaattacttaccagattatgaggcctgaaggtatggtcgatggataaatagttattttaagaaactaattccactgaacctaaaatcatcaaagcagcagtggcctctacgttttactcctttgctgaaaaaaaatcatcttgcccacaggcctgtggcaaaaggataaaaatgtgaacgaagtttaacattctgacttgataaagctttaataatgtacagtgttttctaaatatttcctgttttttcagcactttaacagatgccattccaggttaaactgggttgtctgtactaaattataaacagagttaacttgaaccttttatatgttatgcattgattctaacaaactgtaatgccctcaacagaactaattttactaatacaatactgtgttctttaaaacacagcatttacactgaatacaatttcatttgtaaaactgtaaataagagcttttgtactagcccagtatttatttacattgctttgtaatataaatctgttttagaactgcagcggtttacaaaattttttcatatgtattgttcatctatacttcatcttacatcgtcatgattgagtgatctttacatttgattccagaggctatgttcagttgttagttgggaaagattgagttatcagatttaatttgccgatgggagcctttatctgtcattagaaatctttctcatttaagaacttatgaatatgctgaagatttaatttgtgatacctttgtatgtatgagacacattccaaagagctctaactatgataggtcctgattactaaagaagcttctttactggcctcaatttctagctttcatgttggaaaattttctgcagtccttctgtgaaaattagagcaaagtgctcctgttttttagagaaactaaatcttgctgttgaacaattattgtgttcttttcatggaacataagtaggatgttaacatttccagggtgggaagggtaatcctaaatcatttcccaatctattctaattaccttaaatctaaaggggaaaaaaaaaatcacaaacaggactgggtagttttttatcctaagtatattttttcctgttctttttacttggttttattgctgtatttatagccaatctatacatcatgggtaaacttaacccagaactataaaatgtagttgtttcagtccccttcaggcctcctgaatgggcaagtgcagtgaaacaggtgcttcctgctcctgggttttctctccatgatgttatgcccaattggaaatatgctgtcagtttgtgcaccatatggtgaccacgcctgtgctcagtttggcagctatagaaggaaatgctgtcccataaaatgccatccctatttctaatataacactcttttccaggaagcatgcttaagcatcttgttacagagacatacatccattatggcttggcaatctcttttatttgttgactctagctcccttcaaagtcgaggaaagatctttactcacttaatgaggacattccccatcactgtctgtaccagttcacctttattttacgttttattcagtctgtaaattaactggccctttgcagtaacttgtacataaagtgctagaaaatcatgttccttgtcctgagtaagagttaatcagagtaagtgcatttctggagttgtttctgtgatgtaaattatgatcattatttaagaagtcaaatcctgatcttgaagtgctttttatacagctctctaataattacaaatatccgaaagtcatttcttggaacacaagtggagtatgccaaattttatatgaatttttcagattatctaagcttccaggttttataattagaagataatgagagaattaatggggtttatatttacattatctctcaactatgtagcccatattactcaccctatgagtgaatctggaattgcttttcatgtgaaatcattgtggtctatgagtttacaatactgcaaactgtgttattttatctaaaccattgcttaatgagtgtgtttttccatgaatgaatataccgtggttcatatgttagcatggcagcattttcagatagctttttgtttgttgggaagttggggttttggggggagggggagtattagtacgttgcatggaatagcctactttataatgatgggaatgctttttcttttgttttgggatttttttttttgaagtgaaatttaactttttgtgccagtagtactattatacccatcttcagtgtcttacttgtactgtatcaaattccataccctcatttaattcttaataaaactgttcacttgtaaaaaaaaaaaaaaaaaaaaaaaaaaaaaaaaa

SEQ ID NO: 23751 - DNA, 1633 bp, Homo Sapiens
aaatatctcactagagggctcaccgccatttcctggaaaaattggggctgggactcaacggacgctcgtccagcagcagcgcggagctctgaagtaaaggcgcccgtgaccgagtgctttgtccttacaagcgtggtgttcttgaatgcttccaggcgccttatgaggcccccgatgtacaatctgtgcttaactaaaccccactgtcttccagggtcaggttggccatccgcaggcgtagttgctaggaaggtttgacagatgtccgcctgttgattcagacgttcccaggatttggagcaagaagagcaaggaaggccaggcgcggtggctcacgtttgtaatcccagcactttgggaggccgaggcgggcggatcacgaggtcaggagttcgagaccagcctggccagcatggtgaaaccccgtctctactaaaaatacaaaagaaaattagccgggtgtggtggcacatgcctgtagtcccacctacttgggaggctgaggcaggagaattgtttgacctggcaggcggaggttgcagtgagccgagattgcgccactgcactccagtctgggcgacagagcgagactctgtctcagaaaaaaaaaagagcaaggaggtgttgaaaatgggtttcctggctgggcgtggtggctcacgcttgtaatcccagcactttgggaagctgaggtgggcggatcacttgaggtcaggagtttgagaccagcctggccaacatggtgaaacaccgtctccactaaaaatagaaaaattaactgggtgtggtggagggcgcctgtaatcccagctaatcaggaagctgagacaggaggatcgcttgaacccaggaggcggaggttgcagtgagccgagattgctccattgcactccagcctgggcgatagagtgagactcagcctcaaaaaaaaaaaaaaaaaaaaattcgccaggtgtggtggtgtgcgcctataatcccagctactcaggaggcagaggcacaagaatggcttgaatcacttgaacctgggaggcagaggttacaatgagccgagatggcaccactgcactccagcctgggcgacagagcgagactccgacttcccatcttaaaaaaaaaaaaaaaaaaaaaaaagaagtgtaaagatgtgattatgtggcagggggtaagggttaaaaagaaaacaagaacaagttttcctctgcttagccagcttacttcaaggacagttataacactgaaaagtcgaggccaaaggaatgggctccagacagcctcctccggagcaaagttgaaaagaaaaattcctttactgtctctccttttctgaaccattaaatatgactgtttgccaatggttgtatttagtaagatttgtagactctgtttttcttttgacacagctgcaaggccaacagctgtgcaaagccacaagttatgctaagtcagcagttatgctatagattacatgacctgtgactgtatcattaactgcttttgttttgcttctgtaagtttgcctataaaaaccacactcagtctttgttcaatggtcagcttttcagatacaaatccactgagccggtgtacatctaaataaatcctcctgtttcccgtaaaaaaaaaaaaaaaa

SEQ ID NO: 23752 - DNA, 1222 bp, Homo Sapiens
cctgctcgctccgggtcccggcgccgcgccatgtgggctgcggcgggcgggctgtggcgctcccgcgcgggtctccgggccctgttccgtagccgcgatgctgcgctatttccaggctgcgagcggggacttcactgctctgctgtctcctgcaagaactggctcaagaaatttgcctcgaaaaccaaaaaaaaggtttggtatgaaagtccttccttgggttctcactcgacttacaaaccgtccaagttggaattcctcatgaggagcacctcaaagaaaaccaggaaggaagaccatgcgcgcctgagggccctgaacggcctcctctataaggcactgacagacctgctgtgtacccctgaagtgagtcaggagctgtatgaccttaacgtggagctctccaaggtttccctgactccagacttctcagcctgccgagcgtactggaagacaacgctctctgctgagcagaacgcacacatggaggctgtcctgcagagaagtgccgcgcacatgagcttgatcagttactggcagtcgcagactttggaccccgggatgaaagagacaactttgtacaaaatgatttcagggaccctgatgccccacaaccctgcggcaccacagagccgaccacaagctccagtctgtgtgggatcgatcatgaggcgctcaacaagcagattatggagtacaaaaggaggaaagataaagggctcgggggcctggtgtggcaggggcaggtggctgagctgacaacgcagatgaaaaagggaaggaagagggccaagccccgcctggagcaggacagctccctcaagagttacctgtcaggcgaggaggttgaagatgacctggacctggttggtgccccggagtacgaatgctatgccccggacacagaggagttggaggcagggagaggaggtggcagaacagaggatggccacagctgcggagcaagcagggagtagatggagaggctctgcccatcccacatttgcagggaaaagcattggcacgcaacgcagcatgtggcttcattgaggcagttgatggagttaaaccatctgctcttctgctacttcaacattttctagcttttccgtgtatctaaacacaatttgctacacaagtcactgttttttttccatgcactgtgtgtaatttaaaaattaaatggccatcttatcacagattctcaaaaaaaaaaaaaaaa

SEQ ID NO: 23753 - DNA, 26782 bp, Homo Sapiens
ttggacctattccttcctccttctaggtgcttcctgagctggcgaaaaggagagctggatgctgggattctataaattcggcggtggatgtgagtctagctacagcatggaccctggccagccctggaatctgagttcagagatctttgaaaaaatgccttccgataactgagcacctactacatgctggacactgcaccaggagatttgtgtgcattccctcattgaatcttacaaccaccctctgggatggtttttgctattaagccgattttatagatgagaatactgagggctagaaaagataagtaccttgtccaaggtgacacggccagtaagctgtggagtctggatttgaactaggctctcttggagtttggagcccggtcttttcatttctggcagagacctgtggcttcagggggcggagcccagcccatgggggaagtaagtccttcctgttagatctgtctgaggagtagtgagtttctcatctaggaaaccatcagcaggccaggctggactgccccatttctagccccctttcttctctgcagactgccctgtttctagccccttttcttctctacccttttctgtagagtgcgttagacccattttacagaaggggactctgagaccctttcttctctgcggggcagggtatgtggttcagacgagccgcttccatccccagttctgtccctaagccctgggtgacctcagcattgagcatcgtctctgagcctcagtttcctgtctatatctagtgccaccaggcatcagaaacgtaagtgcttcaaggatcttgggtgaaaagccgctttagcggcgagcatacactaattaataaaatgccttggccggggctgggcagaggaagtaagcgggcagccgaggtgacagctggagggaggagcgggggtggagccgggggaagggtggggaggggatgggctggagctccgggcagtgtgcgaggcgcacgcacaggagcctgcactctgcgtcccgcaccccagcagccgcgccatgagccgtgagtgcgaccccggtgcccggtggggaattttcttggcctcctggtggagccttgaatgccaggctcagcccctcatctctctcctctgcagggagtctcttgctccggttcttgctgttcctgctcctgctcccgccgctccccgtcctgctcgcggacccaggggcgcccacgccaggtaggcggccccatccctccccaagggaatccccggtcttgcgcccctggcctggtttcaaccccctcctttcccctccagcgggcccagcttcccctttctgctcgcggtgctgagaaagactgaggctgagtcttttggtgggatgggggctccctgaagcccccccggcggtgtggccttggctaatgggctatctagttctttcaggggaaacagcagactgggatctggtgccaacttggggagaagggacagtccctatccatccccctcacctgttctgggccccagatgtctaagcagcctctgcacccaacaaccccgctgtttcctataggggcctctttgggaggaagccgcaggcaccaagggaaatgagttccctttctccagcctctaaccgtctgggaacccatcctgattcccattgccagtggagaaggtctcccctggtgaagacttcgggagaacatgggagatggaaatacatttaggagccgggatgcttcatctggggtttaagagatccccattgagcaaatgaggaaaccgaggctcagtaggtgccatgattccccaagctcacaaaatacatggtgggcccaggatctgaactcaggtctgtctgcgtccacacacttcgcaaggtctttccacagaaagctgcttctacccacaatggacccggagccactctgggtttcatgggggaggttgatggggaaattccgcccttccctcccccatgcatgtgccaggttccaggtgaaggaattcagctcctcgctcagccaaccttcctcccccagctcgctgcttgtgtgtgtgcgtgtgtgtgagcatgtgtcccagttggatatagtttcctccaccacctagctgtgtaaaatctctaaaatgaggcccagagagggcaggagggagcagagggagtccgcactttctgctgtgatgctctaaggatctggtgcgtgggggaaagaggaaagatatgtacatggattttggatcagaccaagtttcctgaaacgggctttgggtgggtggcatttaggggacccaaagagaggacggagggtgctctaggaaagggattgcgttgaataaaagtctggtttatgggaagaggaggaggaagactcatgtggccagcactttaaagtttacaaaggttggttgtggacatccacctctttggtgctctcaacagccctgccagagagatgcgttagacccagtctacagaaggggactctgaggcccagagggagtgaagccacttgtctgaatcctcacagtgagctggtggtggggagtagaaggggctcttcaggttgcctcgctgacccatcttgtcagtccctggatcagcccagcacttcctctgaggccccatctggcctcatccaggcactcttggtatacaggtcccacccgtctgtattcttttttagtccattcactaatgcacaatgagccatggtctgtgctattttgttttttgccttttctgtttccttttgtataataaatgtttacacggaattgtttttttttatccccaagggttatttatgccagtctttggctggggcctggagacacggagctgggaggagctgacaggctgatggtggagccagaaatgccaacagactgtcatccaaggggaccagggctgtgcggagctcatgggagggagcaggggtatagggagcccagggaagggagcaggggtgtgcggagctcaggggagggagcagctgcctctcagtgcgaagaattgagggaggcttcttggatctgatgacttttggactggacctcgaaggaggtggcgggtgggggaaacactaagagactcgaccaggaaacaccgtaagggtaatgtggagcaggaggctgaggttggatgcgtaatgtggggatgagactggaggccagaaaactggtaccgaggctcctgcaaggatctaggaaagaacgaatgactggtggagtgcaggggcagaaggtctgggttgccctcatatttccaagtctgcgagtaaactgagggccaagctacttgggcatctgccccaggaagccaaagcctgtcttttgcctctagaggcaaaggagatgaagagatgagggctgcactcacctaagagggcaggcggagggagagaatgctgcttttgcctctctggtgggtgaggagatggaggccagcctggaggcaaggctgtgccgggggcgccctgaatgctcaagtacttcccctctagtctctggacttgactcagtgcccatcttctagatggggatagggcatgacctggcaaccagagctgcatgccaggcagaggagccccaggccagctgacccgggcacatggggcaagatgccagctgtgccaaggctgcccgggtgcctgcacctgctctcgccagcaccagttgggtctgtgggccgggagagggcttccccaccagcaggctcttccagctgctgggcccagttgtctggatctggtgcggtggtgcttaggtgtggggactggggcccaggccaaaccagtcagggttccccaccttttttttttttctctctggctgccaggtccccagagactctctaaatattactctttaggggatttgggtcctgcctcttcactgggcaatcttgcagcctgacacctctgcatcctggaggacttggtgttccctggctgtgcctgtcccctagtcacgctcagtcctggacctggagccctgacttttgggctagggggtgttccttgcccaaacccttggaaaggtcctggaaccaggcagttctggacagtcctcatctgtggggatggggactagcagcttggcctttgggctgcgtgtgtctggtatgcagcgtggtgtgctgatcatctctgcctccgcgtgtcttggggactcagtgagagcaaatgggaaggttctctgctgatggggcagttgtgggagggttgtattgatacaaataatggagagggacagattggctctacccagagtagagggcctggacgtcgaaaggaaggcctcctttagcccgcctgctaaacccccttcatgggatatacagaaaaatgaggctccagaggtgggagggactcacccaagaatgcacagccagtaagagcagccactctctaatacagctctcccaagcaactacttggtgcctggccctgtgctgagtatgggggactcaaagtgaattagacttggtacctgcatctccttggttttctttcttgatgaacaggggtgtcctccactgagcatagaactgagttggcgtgaaaacatgcaggattgaagttagaccgaaggaaggccttcctgtacgaatacttcctaaagatctggttgtggcaggagatggtgatccccctggggtcctggtttcattcgttctggattttcaaggttcactttgaaggaatgtgacaaatccaactcaactgggtcatcctcagtctgcatcaaagcgactctccctttccatcccttccccaaatccagtcctgggtacctccaggagtaggaggaggagggagattaagtcttggctccgcaacttcaaagcagtggggtctgggcaagcctcctgctttctctgggccctacattcctcattatgcaatggggagtctcacctacctctcttagggagtgctggggagataaatgagcgtgggtgtggaaggttgtggacttggtcggctggagccctggctttctggctgggctgtgatggtcaggctgtagtctagtggcacccagtctcctctccgcccaccctgacaccttggggcaccagcggcaggcccactgttgtccttcctgggagaacttttcctgccccagagcagtggtgtttatggaaagaacgtggcgggggaggcgggaggggggaagctggatgggccggactgggagggaggagcctcagctcccgcacagcctctcttggcagggagggtgtgggcagccgttccagcttcagcgtctggagcttgtggctcttctgcctgccgaggcagagctctagggccatggcgggaggccttccggctccacctcagacagctgttgagggcctggaagatgagggactccttttggtcaggctggaggtgaccaatctcctcacttcattttatttattccacaaacattcgttaagctctggctaccacatctggatcccagacctggttaagccccaactgtgtgcatagcctgtgctgggggaagagaaagccttaagggaagcgggggtcccttctcctggaagcttatggtggagaagagcaggttgaattggaacccggagccagggcaagggagagtgggaggagggagtgtggacatttggggaagacttcttggggaggcaaggcgtgggctcagctgatttggaggaaatgtattaaggaggctaacagcctggatgaaggatggagatgctgagggtttggggctaagggaggggctggcgcagaatgttggagctgcacggacctctggagttcattttgagatccctgctgtggcagggatggggaaattgagcctaggggaggcctaacccctgtgcccttagagtggtagaactagaccgtgagtcctagcggaccttgtgtgccagggttgggagctgggcagtgggtgctacaggggctcctgggcaggtgagagagccaggccagcaggaggggcaagaagaagagttctagcagggtgacaagtcctttcttgggggaaccagacctctgagccagcacgggggctgctccagaggcttcttggcctttctgggcctgtggctgggggaggcgggggctggggtactgccaggccctttccctggatcctgcctgccaggtttgcctgtggctgcctgataaagcctttttgtccagccttcttcccctgacccctccctcctacacccctgctggggccattgtggggctgtggggagttgccagggcttaagcaaaactatttgcatgattcttgtggtccttgcttgtgtgtgtgtgtgtgtgtgtgtgtgtgtgtgtgtgtgtgtgtatttgaggtggtgttgccgtcttcgaagtggggaccaagaggactctgctgcccaggtcaagccctgtgctgtgaagtgaggagtgaggagactgagaccagggcaggggatagggggcaggtcttgcccagggtcatgctctctgatcctagcaccctgagatgacagcatttcaccctcagctgctctggcctttcactacccttttgacctgcaataaccagttgcacaaagaatccatattccctgtaacgttggctctgagcccagataaggaagtatgtttgcagaaaggagcccggcgttttctgtgtaaggtcagagatggagcctcctgccaggcgctaggagtttttggtctgcccagctctgttctgtttccttggccaagttatcacctgtccctgaacctcagtttccttcactgaacagggtggtgggggtgatggtggatcctactgaacctgaggagtctgtaactttgctgctaaagaatcactgaggcagatttagcaagggggtggtggtctgagggatctgggttagatgccaagagggatttccttatagagtttctccaggaggcagcagggcggatgccagagctccatgcaccctcccaggagattttctagccctatctctcctattcccttggtctgtgaccttcttctggatcctagagcccagaccccaccctgatgtgggccaagtctgattccatcaggaatgggggctgaggcagctgagaccttggagtccccctcctcctgcacacccaccctctgtccccagggttctggaaaacttctttccttagacttggctgctgaggctgtgggggtggagtggaagtgaagggatgggcatttggtctggtgagacttgtggggtgataggtctggctttccctttttctggcttcaatttccccatctgcaatgtggacattatgatacctgctcttctctaccttctgcagaaatggaggaatggtgagggatctcgttttcctagtgttcatggggtggtggtctgggagaagtccccgtcctcgtcctcgtcccttttctgaccgcccccccaccccccgccccggcctgctcttgctactgaactctgactaggcaggaagtgaacgctctagaagcccgtggctgaggagttttatcagctctttcttaactttcagtgtcacagccggggaatcttctcctgccgccgtttggtggcaatagggagggagggggcgcttcccctgggggcctgatgtgggctaggctggagttccagagcagggcctggaaatgtcaggatgggtggtttatgttcacagaggtgggaacaggggtccccttgggggaaccctgaagccctggcacccagtgattcaggacggagctgcgacttaagtccatgcctctggcccctcattcccccatcaggggctagatgggggtcaggaggccaccctagcatggtctctgacctccatttctcacccacagtgaatccctgttgttactatccatgccagcaccagggcatctgtgtccgcttcggccttgaccgctaccagtgtgactgcacccgcacgggctattccggccccaactgcaccatccgtgagctgggccttcagccctcactccttccgtcttgagcccttctgctccccgggccctttctcctagaccctaacttcctaccctcctctctgaccatggccctgttctccttccttgcctggttctgcccctctccctgacctggcttcagcatgagctctcgctcttggtccaccctcactccctgcttctgagttccatggtgagtcttcaccacatgccctggcccctgtcctcacgcccggttctgtctctgtcatgtgtcattgctcccaaggttccatccttacccacttccccataggtgctactctgttccaccctggcccttgtcctcagtgccccatcttccaccctggctacttctggttctggtaggagggaccaactgagtgactgccattgcccctgcagctggcctgtggacctggctccggaattcactgcggcccagcccctctttcacccacttcctgctcactcacgggcgctggttctgggagtttgtcaatgccaccttcatccgagagatgctcatgcgcctggtactcacaggtgggtgtggggcagggccccctgacctgggggagcaagcaagcctgctagtccttttggattcttggcatctgataagggtagtgggtggggagagtctatgatgcctgataaaataagccccaacccaggaggaggcaagaactgggatggagctgggggtggaaacacccttgtcaccgttatttttgctctctgcagtgcgctccaaccttatccccagtccccccacctacaactcagcacatgactacatcagctgggagtctttctccaacgtgagctattacactcgtattctgccctctgtgcctaaagattgccccacacccatgggaaccaaaggtaaaatggggtgaggagctgggcctggggattacaggaggtgctcagttcttctctttgggaaaaatcaggcgaagaacaattattgacccaattctgcagatggctagaccaaggcaagacatatgacatgtccagagcctgggctgagaacaggcaagggcagcagagggtcttgcctgaggtcacctagagtcagaccaatgtttccatagttccagggtgcctctttgcttgatccttttctaatgatcagttgggtcctgccggggtggaagtgacttagaagttgagatgtaggaaagaatagtgagctatttattgggtgctgtctctgtgtttgggtctttacagatgtaaatagttttacatgcttcaccagtgtaaggtacaaataagccacatttttttctttcgttactcaagacttcacttagccacactggcaggggtcttccttgtaagaccttcccatgccacctgtaattatccaaaaacctgggatattattcatttcagacccatcagttcagcatcaagtacagagaggacaagagaggctcatcagtccactgctgctatactccagttcctgccacatggtggcactgttgaatgccagtcctgtgcagcctcatggttatgtgcttttttgggttcaaaaccttgcaccatgtccctgcttgggtctcaagagcactactgtgacggttttccatcatatggttagctgcttttcccaaagcatgactattctaccaggatagctgagtcttgccaactttgctgaaatcatgcttgcccagtgtcagtgagtgatgattccaaattacggttgacagatcactccctctaacttcccttttggtggattttctttaggggtacttgatattttttcctgccagaggaacccagtcagccatcttaatccaagtaatttccattgatcttgaaccttcaacatcagggctcacatcttgatgcattgtgaagagatgcctttaccagaactcaaaaaattctattcctttctgtgagggcaattgggtgacaactcatttgacactgacataattaaggaaggcctctcaatacttattctaaggatgacttgtctttatgccagacatagaaagattggcatcatttaaaataggttgacacacctattttaaggggagcaagcaagcctgctagtccttttggactcttggcatctgataagggtagtgggtggggagagtctatgatgcctgataggtggtggtgtggtggcacacgtctgtaatcccagcactttgggaggttggggtgggtggattgcttgagctcaggagttcaagtccaacctggatgacatggtgagacaccttgtctacaaaagaatacaaaagttagctgggtgaagttgtgtgtgcctgtagtcccagctactcaggaggctaaggtgggtggatcaattgagcccaggaggtcgaggctgtagtgagccataattgcggcactgcactctggcctgggcaatagagtgagaccctgtctcaaaaataaataaataaataaataaataaataaataaataaataaataggttggcaaactacagcctgcaggccaaattcggcccacctctccatttttgtaaataaagttttattggaacacagccacacacatttgtttatgtgtcatctgtgactgctttcccgctacaatagcaaaaactgaatagatgtgacatgtctgtatggtctgcaaagcctaaaatgtttactatctggctttttccagaaaaagcttgctgacctatgatttaaaaaattctacccactggttctctgccatgcttacattatctctcgcagtcctcagattcactgtatcaaatgggtatcatttgcccctttttaaagatggagaaattgacacccagagagatgagatgatttatctgtattcacacagctagcaaatagcatagtcagttgcaaacacaggctaccttgactcagggcaagggagttcatgtttgtttttttctgtttctttatttctttttggtgaaatgtttcattatggaaaaattgcaaagatacacaaaagttgagagaaaagcagaatgaactatgtacccatctttcagtttcaacatttacccacagtttcttcatcttatttcatttctcccctctcatatttttataaagtattttaaatcaaattctaaaaatcatgccacttaaaattctaaaaatcatgccacttcacccataaatacttctagggtcttttggtagagagtgggttacttggtggtggtggggaggtggtcctgaggaggccactctgggcttcctgcttgggccagtttgcctggtgagcccagatgtccccagggcagcaagatccagataggagaagctactgctgtttcctaccccccaaccagggaagaagcagttgccagatgcccagctcctggcccgccgcttcctgctcaggaggaagttcatacctgacccccaaggcaccaacctcatgtttgccttctttgcacaacacttcacccaccagttcttcaaaacttctggcaagatgggtcctggcttcaccaaggccttgggccatggggtgagtacctaggaggggctcaggactgctctggacctaatttggcacgcgtatgtcatcgacagtgggccggcaccctggtgacctgagggaacccctctctgtccacaggtagacctcggccacatttatggagacaatctggagcgtcagtatcaactgcggctctttaaggatgggaaactcaagtaccaggtagtgctgggccagggggtagggcagagggaggggtctcccatggtcttccctggcaaagactgcttggggcgggggtctgggtcatgtcctgagagggccaaccacgggagtgggaggcttgtgccaggagcgacagtatacgctgggaggaggcagcaggtatgagaagccagggaggagcagacgtggcctcccatgtcagccagggaggtggattttggagctcaacaggagatgaacatttgtagtctgcatttatttatttaattattccacaatattaattggacacgagaatatacctggcacaggtgattgagtagtgaccattatagttaatgggccctgccctcaaaaaaccacaggcaaactctaggatgttcattctatgagggcttttgtttaaatcagaacggtccaacagaaatataatgtgaaccacatacatagttaaaattttctaatgtccatattaaaagagggaaaaagaaacaggtgaaatgattttaataatacattttacttaatgcaatatgtccaggtaattagcattttagcatgtaatcaatacattattaataaaatatgtcacattcttttttcatgctgaagcttcaaaatctggtgtatatttcacactcacagggcatctcaatttggatgctctattttcactggagtgatctaatctgtattaagatttcataaaatgtacagctgaataagtagagtgacatgtccgacttgttccacgcatacttaaaggttttccaatagctgaagtatcagttttaaaattcaaatagaaattaagataaacctaaataaaataaattaagtaacattcagttcttcattcacactagccaaatttctagtgctcagtagctacacgtggctagtggctaccatattggatcgtacaaatcttaggcaagcaccaaaacaaagtttgatgctgaatctttagggctaagaacagtacttggcatgtagtagtctcttggcatgtatttactgaatgaatgaagaagctgccatataattaggtacacttgtagctgccaccaaggagaagctgtgagtgccactagagtgtttggatgatgggtaaaacttccctaggaagttacaaataaacccagagttgcataaaggatgaggaggagttagggatgctaagaatgggagagggctttccaggtagagggtttagcaagtacaaaagcttagaggtggagaacagcttggtgacttggagggagtgtaaaaatgggagcgtttgctgagcctagtgatggagcgtaagaatgactttacaggaaggtggagatgtctgtggggaccgtgttaaggaattctactttctgccaagagcagagagagtatttggaaaggttttaagtcagctcatgatgcaagatttgttgtttttttttttttaagttttttttttcttttttttttttttcttttttgcttgggtgcagtgcagagactggcctgtctggggataggagtggaaatagggagcccacttagggaaaggagtcagagtggaagatgagcgggggttgcttgaggtagtggtggtagagatggagagcaggggactgattttaagagacattttggaggtggaatcaacagccttggctgaggggaactggcagctggaggcaggagtgggagggagttggttgtgggcagctgtgggtgacccccaaccccaggttgccaggtggccccatcccacaggtgctggatggagaaatgtacccgccctcggtagaagaggcgcctgtgttgatgcactacccccgaggcatcccgccccagagccagatggctgtgggccaggaggtgtttgggctgcttcctgggctcatgctgtatgccacgctctggctacgtgagcacaaccgtgtgtgtgacctgctgaaggctgagcaccccacctggggcgatgagcagcttttccagacgacccgcctcatcctcataggtgaggactccagacctgccctgccctggaaggtcattccctccatcctgagaagttgggggcgggggggtacttagaggtggaggctgggattagaatcctcacccttctgcttagtggctagaagaccttgagcaggcccctcaacctctgtgagcctcggtctccaaatctgtacgttggggtgaacgatgattgtaaggatttattgagatcatgaatgggaaggcaactagcacatagcaggccttcagaaaatagatgactgtgatggttgattattagctgggtgactcagcacatttgattagccaccctgagtctcggtttcccctgtgtgctgcgcccggatgcatacttgtggtccccagcacgtgcagggtcaaactgtaacttgcccggccttcaggaatcttcatgttcccttccctgcatgtgtctaccttcctgcagtttggtagcttctaggtgactcagggacaggatatttttgtgttccctatgggggcgagtctgcaacctaaaatgtcagatggtttcctgcctgggagcttggcccctgacatccctgtccagaccatgttcgctctgagtcaccagtaactcccttcccccacctctggcaccactgggcatggctggtcccaattatagagcctaattcactggagccatgaagagccaggcattgggaataggaacagtcattagagggaagaggggctggttctgaagtttcagcgttgcaaagaccttgacctgagagagctggaggctgtccagcacactggctggagatgaagctgtgaccaaaggcaggaccctagggcaccatttaactcccctacaacctcatgagccgggtatgattaccctgtgaaaatcaagattcagagaggtgaagtgaactctccagggacactcagcagatggagacttgaggtctggttgccaccaaaatctatgctacttccactccatcacaaagggggctcttcttgaatgggaaggggttgcaaacctgagtctgatctgtgacatgtgagtattggaaagggattccccctcgcgtctacacttagtattcctacttttggctgacatatatggacaccccgtcttatgccaggcactgtgccagcagttttgctgtattcattgtctacttctctcaacaaccctaatatagtattgcattgatgttattattattattatttgagatggagtcttgttctgttgcccacacagtagtgcaatggcgtgatcttggctcactgcaacctctgcctcccgggttcgagcaattctcgtgtctcagcctcccgagtagctgggattacaggtgcccgccaccatgcctggctaatttttgtatttttagtagagacagggttttgccatgttggccaggatgatcttgaactgctgacctcaggtgatccacccgccttggcatcccaaagttctgggtttataggcatgagccacagcgcctggccgcactgatattattataacacacattttacagttaaggaaagtgagattctgagagattaagtaactcagcccaagctcaggtggctggaaatggtaaagccaagatttgaatccaggtctgctgatcccacagtctgtagctccaggtcgatttccaaaagccaatttgtctaatggctaattggcctgcatatcagtttctttcaatatctagttgcccagttttaattttgttacagaatgttcaatttgcattttccctggctttttgctttctagctggttatagctacaaatggggcagaggaaaaacttatttataagaatcctgttatataagaacatataggaaatatgttttttgaaatatatttagggctaggctccccttctgtcctcagtattctcttttgccactgcagcagctctgagtggtctccttgaagtccccctctatcaccgagggtgtcagcatgatgacagctctcaccagtaaatcctccacttttccatcttttgtagtctctccaccttcttttaatgggcttcaggagggaggtcataagaccaattcttggacacctcctttgcatgtcctgcttagctgggcctagaacctccctctgaaatgtgggagtagctggtgctcttgtcttgagacctcagtcaaaatagaccaaaagttctattttcacatcctgttacaaagagacaaaatggaagaggccaaacaaaattaaacatcaacagcaaggccaggtgtggtggctcacacttgcaattccagggcttttgggaggctgaggtgagagaagtgcttgagacttgcagttcaagaccagcctggataacatagtgagaccccatctcttaaaaaaaaaaaaaaagaaagaaagaaagctgggtgtggtggtacacctgtggtcccagctacttgggaggctgaggtgggaggattgcttgagcccgggaaagttcaggctgaagtgagctgtaattataccattgcgctccagcttgggtgacagaccaagaccttgtctgtaaaaataaaaataaacatcaacagcaacaacaacaataaagagaccaaaagcaagcacctctcatgaactggcctgctttccaagctgggcatctaaatcactgtgcttggctgaccctatttccaatcctgccctgcccaggggagaccatcaagattgtcatcgaggagtacgtgcagcagctgagtggctatttcctgcagctgaaatttgacccagagctgctgttcggtgtccagttccaataccgcaaccgcattgccatggagttcaaccatctctaccactggcaccccctcatgcctgactccttcaaggtgggctcccaggagtacagctacgagcagttcttgttcaacacctccatgttggtggactatggggttgaggccctggtggatgccttctctcgccagattgctggccgggtaagccccagaggagtgctggtgagggcaggtgggctgagggatccagcagacctgggtccaaattccaggttcttcttctgtaaaatggggctgatgtcacttctacagggcagttgtaagcattcctgtgtgagttcattggttcatttgtccattccacaataccagacattactccaggtactggagatgtagtgggaacaagacttttgtggttcttggctcatcttttagtgctcccaccctagaaagtgatggcagtcatacgacagctgacagcattagggcccttactgcgtgtcaggcactgttctaagagcttctcctatgttatcagaattctaagagtatgttataaaccatagtagaaaagcccaccatgctctgggagtcaggaagggacatctgacccagagttgcgggttatgggaaaagaagggatgtccaagcagaaattggaaggagggatagagatttcccagggtaagaggtggtgttagtggcaggggatggctgtgttccagatagagaggacggcatgggtgaaaggcatggaagtcagaggacatggcagtttgaggaacagaaggacattcagggcatggtaatgtatgtaacagtgcccgcctatggtgtttattaaatcataagcctccgctctgggctgaattgtggctcttttaaagttcgtatgttgaaatcctaaccgccagaaccttagtatgtgactgcatttggagacaaggtctttaaagaggtaattaagtttaattgaggtcattaggctgggccctaatccagtgtgacttataagaagaagagattaggtcacacacacagagggaaggccacatgaagatgtagggagaagaaagccatctacaagccaaggaaagaggcctcaggagataccaaccctgctgacaccttgatcttgaacctctggtctccagacagaggaaataatttctattgtttgagccactcattctgtggtacattgtcatggcagccctagcaaacaaacacattctctttccctggaattcccagccaacgccttcctcaatctccccttctccacattcggaagctcccatctgcttcatcgcagtctctggctcccctgttgcctcacagtcctctgcttctctctaatccttgtccctaaaccctgtcatgaagctgtggcacacatggatttccatttccttctggtaatttgactgaaattagcatttgctgccccggtgggcagctgctggctgctttatggcctctttgtcggtttctttatggttctttgtggggacacaagacatgaacagagacaatagcctttgtgtgaggctggatggttttcagaacgttttcaaggaatgaccatgatgatgtacgtgaaaagccccggcgtcgtacctggcacaaggcagaaaggccgcagagatgtatggactgtcaagattttttttcttttttctttttttttaaatagagatggggttttgccatattgcccaggctggtcttgaactcctgggctcaagcgatctgcccgcctaggcctctcaaggtgctgggattataggcgactctcaggatattaagaagagtgagtgatgataagacagggcttcccctgataaccattgtccatggctaccctctcaggggttcccatgtgaccaatactgagataacagctttgcatagtttatcccatttaaattgaccacagccatatcaggtagatgctcttcccttccccatttttacatatgcgggaactcaaacttagcttgaatagctgcccaaggtccctatattagtttcctcaggctgctgcaacaaagtaccacaaactgggaagctcagagcaacagatggaggctagaagtctgaattcaaggtgtcagcagtgccatgttctctctcaaggctctatgcctccttggcatctggtggtggccgacagtccctggcattcctcagcttgcagaggcatcgctctagtctctgcctttatcatcctgtggtgctctccctgaacttgtctttcctcattttataaagacaccagttattggattggagcccaccctaatccagtaggatctcatcttaacttgattacttttgcaaagacttcatttccaaataaggatgcattcacggatgcagagagttagggcttcaacacatatttaatattttagggaacacaattcaaccctcaacagccccacagcttgtaaagctgtaattggcaccatcctctgcttgctttgctcatattatttcatccaaccatgcctttcttttttgcccaattatagttgttgatcaaaatgactatctcttaagcatgaacgttattatttcatcctaagcaccagagctttcttttctttcctttttttttttttttttttgagatacaatcttgctctcttgcctgggctggagtgcagtggtgtgattttggctcactgtaacctctatctcctgggttcaagtgattcacctgcctcagtctcccaaatagctgggattactggcacctgccaccacgcccagctaatttttgtatttttagtagagacgagtctttgccatgttggccaggctggtcttgaactcctggcctcaagtgatccacccgcctcggcctcctaaggtgctgggattacaggcacaagccactgtgcctggtcagcaccagagctttctttagactaatgcgccttaactgttagtaatcagaatctttttctgcagcttttttatcttgccaggttacctgggctttgagttctattttccctcccttcacagggggttacactacctcttggtgtaattcaacggtctggggagcagtgtgagccacaaaagaggtcctcttggcccattccacacttcaaagatgaggaagctgccggatgtggtggttcatgcctgtaatcccggcagtttgggaggctgtggtgggaggatcatttgagaccaggagtttgagaccagcctgggcaatatagtgagacctcacctctacaaaaataaaataaaacaaaattagccaggcatggtggcacgtgtctgtagtcctagctacttgagaagctgaggtgggaggattgcttgagcctgaggaagttgaggctacactgagtcaagatcatgccactgcactccagccagggcaacagagtgagacagtgtctaaaaaaaaacccacaaaaaaaaaatgaggaagctgagactcagaggggcttcctgagagagcatgacagcagcaggcccggggcaggtctgcagcatcacaactgctaggctgcccaacactctccatcctagctcagaagggactcccactggaagctcttgtcccaggaacttacccaggctccaggacagcctggcctggctcccagaccactgctgtgcttctctctcggcagatcggtgggggcaggaacatggaccaccacatcctgcatgtggctgtggatgtcatcagggagtctcgggagatgcggctgcagcccttcaatgagtaccgcaagaggtttggcatgaaaccctacacctccttccaggagctcgtaggtgagcagctgtttcctggatgcagtccctgcccttgagggactggcagcaaagtcagggagacatcaaggaaatagaacgggacaatacatgcggcaatgtgtaacaaccagacttataatgggcgtggaagtgctgtgccagggtggtaaataagcctgcttggggagagaaggtgacttttcagctgggtttggagaacaaatggcattttcagtgggagaagagagggaggagtgttttaggcagagcaatagaaagtacaaaggctgccgggcaaggtggctcgcgcctgtaatcctagcactttgggaggctcaggcgggtggatcacgaggtcaggaaatcgagaccatcctggctaacacgatgaaaccccgtctctactaaaaatacaaaaaattagccgggcatggaggcaggcgcctgtagtcccagctactcgggaggctgaggcaggagaatggtgtgaacctgggaggcagagcttgcagtgagctgagattgcgccactgcactccagcctgggcgacagagcgagacaccatctcaaaaaaaagaaagtacaaaggcatagaggtcagacagcaggtatctagggaaacagtcatagatgtggctggggcaaggagcttatgttgtgggaatgattagtgatgggaggttggggccaaaccgtgtagaatcttggttttcatactaaatattttgagttttatttggtctagtgctttctaagtacccacttacgggccagctgcataaaaatcatttagaaagctgattaagataccaaatctcagatgcctctcctacggattctgattcaaccagcctgggtggtgcccaagaatctgcgtattcatatgaataaagtatatatacatatatatgaatatatatatgaatagagtatatatacatatatatcaatatatacatatacatatcaatacatatatacatatacacacacatatatatgtgtgtgtatatatatactatatatatacatatatatatatacatatatatatatacatatatatatacatatatatatacatatatatatatatatacatatatatatatatatttcccccaatatcctcagatgttgggcagccaagtttccagcccttgtcacatacaatggggagccactgaagcaggtgtgacatggcccatgagagttcccagtggaggatggatttgaggaactgggcagggaagcagggaagctccatatttgtctccccttggccacatgaacatgtggatattgcagagtggagcagattctgtgcatgagctccttgtgatcctggaacagcatcttattctttactctcccatgacaaatggtccccgggggcagaaggaacactgccactgaatttctgtgtgagctcggacatgttacatctttgagctctagtagtaaaagggcttggcccaggctaaggtcttgaaatctgtctgtgaaggaagccagatggggagcattctcccttctgtgatgatcaggtaattagggcccagagttgctcaaggttataggctgtttggtggcagatctaggcccctgactttctctttagtagcattttccttccctagacccagtccctgaggaggggcaatttgtgcttttcctcttgacccttttccccagtgccaaccatgccaaattctagggcacatgctcagttgctcaagttagtctcctggagtccctattatccccagaaaaaggtggacctggaagggtcccgccccaggttgaccttaatggcatcatggatctgatgctagcatttccccttatctccttgtaggagagaaggagatggcagcagagttggaggaattgtatggagacattgatgcgttggagttctaccctggactgcttcttgaaaagtgccatccaaactctatctttggggagagtatgatagagattggggctcccttttccctcaagggtctcctagggaatcccatctgttctccggagtactggaagccgagcacatttggcggcgaggtgggctttaacattgtcaagacggccacactgaagaagctggtctgcctcaacaccaagacctgtccctacgtttccttccgtgtgccggatgccagtcaggatgatgggcctgctgtggagcgaccatccacagagctctgaggggcaggaaagcagcattctggaggggagagctttgtgcttgtcattccagagtgctgaggccagggctgatggtcttaaatgctcattttctggtttggcatggtgagtgttggggttgacatttagaactttaagtctcacccattatctggaatattgtgattctgtttattcttccagaatgctgaactccttgttagcccttcagattgttaggagtggttctcatttggtctgccagaatactgggttcttagttgacaacctagaatgtcagatttctggttgatttgtaacacagtcattctaggatgtggagctactgatgaaatctgctagaaagttagggggttcttattttgcattccagaatcttgactttctgattggtgattcaaagtgttgtgttcctggctgatgatccagaacagtggctcgtatcccaaatctgtcagcatctggctgtctagaatgtggatttgattcattttcctgttcagtgagatatcatagagacggagatcctaaggtccaacaagaatgcattccctgaatctgtgcctgcactgagagggcaaggaagtggggtgttcttcttgggacccccactaagaccctggtctgaggatgtagagagaacaggtgggctgtattcacgccattggttggaagctaccagagctctatccccatccaggtcttgactcatggcagctgtttctcatgaagctaataaaattcgctttctaaagttacctgttatatatctcttttggtcccatcctctaaagcagaggcaacactggaacatggctagcctttcttgtagccatggctgggcgtgctagaggttgcagcatgagactttctgctgggatccttgggcccatcactgtatagacatgctaccactggtacttcctttctccctgcgggccaggcactgcccttttcaggaagctctcttaaaatacccattgccccagacctggaagatataacattcagttcccaccatctgattaaaacaacttcctcccttacagagcatacaacagagggggcacccggggaggagagcacatactgtgttccaatttcacgcttttaattctcatttgttctcacaccaacagtgtgaagtgcgtggtataatctccatttcaaaaccaaggaagcagcctcagagtggtcgagtgacacacctcacgcaggctgagtccagagcttgtgctcctcttgattcctggtttgactcagttccaggcctgatcttgcctgtctggctcagggtcaaagacagaatggtggagtgtagcctccacctgatattcaggctactcattcagtcccaaatatgtattttcctaagtgtttactatgtgccagttcctgtaacaggtgtggggacacagcagtgagtaatcaatacagacaaggttctgcccttatggagctcacactccagtggcagacaaacagaccataaataaggaaacgatgaaataagatatatacaaggtgagtgtgacttcccttctaaccccctctgctctgtcctcccctattgcgctctcaagaccagagacccaacagcagtgatctcagggcagacagccctccactccagctctgagacccttttctcaggacctctgtaggcagcagagagagaggacagaggggtaagatgaggggttgagggaaggttcttcatgatccacactttgggcttagtatttctcaggaagagctatggcccagaaacaacaggggaaactagagttcggtctgacagtccttggggttaagtctcctgtcttatggtccagaaactcctgtttctccttagttggctggaaactgctcccatcattccttctggcctctgctgaatgcagggaatgcaatccttccctgctcttgcagttgctctgacgtagaaagatccttcgggtgctggaagtctccatgaagagcttgtgtcctgtcctttcttgcagattctatttcccctcttctgctaatacctcttactttgcttgagaatcctctcctttcttattaatttcagtcttggtggttctatcaggggtgcattctggccaaggggtgggcctgtgaatcaatcctgggcaatcagacaccctctccttaaaaactggcccgtggagactgagatcactgactctgactcatccccacagctggctctgacaagatggtccatttgttcctgcttccgagatccccagggcagcctggatccctgcccttctcaagactttagcttttccttccatccggtggcctattccaggaattcctcttttgcttaaatcagttggagtttgtgtctgttgcttgtaatcaagcctttatggctgctgggctgagtgacacaagcactttaatggcctggagggacttttaatcagtgaagatgcaatcagacaagtgttttggaaagagcaccctcgagaagggtggatgacagggcagagcaggaaggacaggaagctggcagaacggaggaggctgcagccgtggtccaaccaggagctgatggcagctggggctaggggaagggctttgagggtggaaggatgggatgggttccagaggtattcctctcttaaatgcaagtgcctagattaggtagactttgcttagtattgacaactgcacatgaaagttttgcaaagggaaacaggctaaatgcaccaagaaagcttcttcagagtgaagaatcttaatgcttgtaatttaaacatttgttcctggagttttgatttggtggatgtgatggttggttttatttgtcagtttggttgggctatagcacacagttatttaatcaaacagtaatctaggtgtggctgtgaaggtattttgtagatgtgattaacatctacaatcagttgactttaagtgaaagagattacttaaataatttgggtgagctgcacctgattagttgaaaggcctcaagaacaaacactgcagtttcctggaaaagaagaaactttgcctcaagactatagccatcgactcctgcctgagtttccagcctgctagtctgccctatggatttgaagtttgccaaccccaacaattgtgtgaattaatttctaaaaataaagctatatacagccatcctttggtatttgtgggggatttgtttcaggatctctacagataccaaaatctgtggttcctcaagtcctttatatgaagtggtatagtatttgcatataacctatgtgcaatctcctgtataacttcaatcatctctagattacttataatacctaatacagtgtaaatgctagttgttatactgtattttttctttgtattatttttattgtatttgaatattttgatctgcatttggttgaattcacagatatggaacccatggatatggaggatatgtgcacatatattcaggactgaatatatatattatacatatatatacacacagaactgaatatatatatatatatatacacacacacgactgaatatatatatatatatatatatatatacacacaggactgaatatatatatatatatacacaggactgaatatatatatatatatacaagactgaatatatatatacatatacaagactatatatatatattcaagactgactatatatatattcaaggctgactatatatattcaagactgactatatatatattcaagactgactatatatatatattcaagactgactctctctctatatattcaagactgaatatatatatatatatatttctatctctctaataatacaagaacagaaaaccaaatactgcatgttctcacttatgcgtgggagatgaatgatgagaatacgtggacatatggtggggaacaacacatgctgaggcctgtcggagggtgggaggtgggccatcaggaagaatagctaatgttaatacctagctgatgggatgatctgtgcagcaaactaccatggcacacgtttacctgtgtaacaaacctgcacatcctacacgtgtaaccaatatatgtatattattattcaagttccaataatcaaataatacacaaaccactgtattatttgattattggaaatcaaataataataataataataataataataataataataataatatacatatattctgttggttctaattctctggagaaccccgactaatacaatgggtgattcattcaggactctcaatgcaaacaacagaacattctctagcctgtataagcaggaa

SEQ ID NO: 23754 - DNA, 4452 bp, Homo Sapiens
atgtttgtttcagacacagttctaaaggaacgcctggatccagaaacactggaatcattagggcttatcaaacaatcacaacagttcaatcaaaagtcagttaaaatcaagacaaaactcttttataagcagcaaaaattcaatttgttaagagaagagaatgaaggttatgccaagctgattgctgaattggggcaagatttatctggaagtattactagtgatttaatcttagaaaatatcaaatctttaataggatgctttaatctggatcccaatagagttttggatgtcattttagaagtgtttgaatgcaggccagaacacgatgacttctttatatctttgttagaatcttacatgagtatgtgtgaaccgcaaacactgtgtcatattcttgggttcaaattcaagttttaccaggaaccaaatggcgagacaccatcatctttatacagagttgcagcagtacttctacaatttaatcttattgatttagatgatctttatgtacatcttcttccggctgataattgcattatggatgaacacaaacgagaaattgcggaagctaagcaaattgttagaaagcttacgatggttgtgttgtcttctgaaaaaatggatgagcgagagaaagaaaaggaaaaagaagaggagaaagtagagaaaccacctgataaccaaaaacttggcttgttggaagccttattaaagattggtgattggcaacatgcacagaacattatggatcagatgcctccatactatgcagcttcacacaagctaatagcccttgctatttgcaagctcattcatataactattgagcctctctaccgaagagttggagttcctaaaggtgctaaaggctcacctgttaatgctttgcaaaacaagagagcaccaaaacaagctgagagctttgaagatttgaggagagacgtgttcaatatgttctgttaccttggtcctcacctttctcacgatcccattttatttgcaaaagtggtgcgcataggcaagtcatttatgaaggagtttcagtctgatggaagcaaacaagaagataaagaaaaaacggaagttatccttagctgtttgcttagcattactgaccaggtactacttccatctctttctttgatggactgcaatgcttgtatgtctgaggaactatggggaatgtttaaaacatttccatatcagcatagatatcgtctgtatggccagtggaagaatgaaacttataacagtcacccacttttagtaaaagttaaagctcaaacaatagacagagccaaatatatcatgaagcgcctaaccaaggaaaatgtgaagccttctggaagacaaattgggaagttgagccacagcaatccaaccattttgtttgattatatcttgtcacaaatacagaagtatgataacttaataacacctgtagtagattcattgaaatacctcacttcactgaattatgatgtcttggcctattgtatcattgaagctttagctaatccagaaaaggaaagaatgaaacatgatgacacaaccatctcaagctggcttcagagtctggctagtttctgtggtgcagtttttcgtaaatatccaattgatcttgctggtcttcttcagtatgttgccaatcagctaaaggcgggcaaaagttttgacctgcttatattgaaagaagtggtacaaaaaatggcaggaatagaaattacagaggaaatgacaatggagcaactagaggctatgactggtggagagcagctaaaagctgagggtggttattttggtcagatcagaaacactaaaaaatcctctcagagattaaaggatgctctattggaccatgatcttgcccttcctctctgtctgcttatggctcagcagagaaatggggtaatctttcaggaaggtggagagaaacatttgaaacttgtgggaaagctctatgaccagtgtcatgataccctggtgcagtttggtgggtttttagcatctaatctgagcacagaagattatataaagcgagtgccttcaattgatgtactctgtaatgaatttcatacaccccatgatgcagcatttttcctgtctaggccaatgtatgcccatcatatttcgtcaaagtatgatgaacttaaaaaatcagaaaagggaagtaaacagcaacataaagttcataagtacattacatcatgtgagatggtgatggcgcctgtccatgaagcagtggtctccttacatgtttccaaagtctgggatgacatcagccctcaattctatgctacattctggtcattgacaatgtatgaccttgcagttccacacaccagctatgaacgagaagtcaataaacttaaagtccagatgaaagcaattgatgacaatcaggaaatgcccccaaataaaaagaaaaaagagaaggagcgctgtactgcccttcaggacaagcttcttgaagaagaaaagaaacagatggaacatgtacagagagttctacagagattgaaactggaaaaggacaactggcttttagcaaaatctaccaaaaatgagaccatcacaaaatttctacagctgtgtatatttcctcgatgtattttttcagcaattgatgctgtttactgtgctcgttttgttgaattggtacatcaacagaaaactccaaatttttccacacttctttgctatgatcgagttttctctgacataatttacacagttgcaagctgtactgaaaatgaagccagtcgatacggaaggtttctttgctgcatgttagagactgtgaccaggtggcatagtgatagagccacatatgaaaaggaatgtggaaactatccaggattccttaccatattacgggcaactggatttgatggtggaaataaggctgatcaattagactatgaaaattttcgacatgttgtacataaatggcattacaaactaaccaaggcatcggtacattgccttgaaacaggcgaatatactcacatcaggaatatcttgattgtgctaacaaaaatacttccttggtacccaaaagttttgaatctgggtcaagctttggaaagaagagtacacaaaatctgccaagaagaaaaagagaagaggccagatctatatgcattggctatgggctactctgggcagttgaaaagtagaaagtcatacatgatacctgaaaatgagtttcatcacaaagacccccctccgaggaatgcagttgccagtgtgcaaaatgggcctggtggtgggccttcttcatcatcaataggaagtgcatctaaatcggatgaaagcagtactgaggagactgataaatcaagggagagatctcagtgtggtgtgaaagctgttaataaagcttctagtaccacacctaaagggaattcaagcaatggaaatagtggctctaacagcaacaaagctgttaaagaaaatgacaaagaaaaagggaaagagaaagaaaaagagaaaaaagaaaagactccagctactactccagaggccagggtacttggtaaagatggtaaagaaaaaccaaaggaagagcggccaaataaagatgaaaaagcaagagagaccaaggaaagaacgccgaagtctgacaaagagaaagaaaaattcaagaaggaagaaaaagctaaagatgagaaatttaagaccactgtccccaacgcagaatcaaaatcaactcaagaaagggaaagagagaaggagccatccagagaaagagatatagcaaaggaaatgaaatcaaaggaaaatgttaaaggaggagaaaaaacaccagtttctgggtccttgaaatcacctgttcccagatcagatattccagagcctgaaagggaacaaaaacgccgcaaaattgatactcacccttctccatcacattcctccacagtaaaggacagtctcatcgaactcaaggaatcttcagcaaagctctacattaatcatactcctccaccactgtccaagagtaaggagagagaaatggacaagaaagatttggacaagtcaagggaaagatccagagaaagagagaaaaaagatgaaaaggacaggaaagagcggaaaagggatcactcaaacaacgaccgtgaagtgccaccggacttaaccaagagacgtaaagaggagaatggaacaatgggggtttcaaaacataaaagtgaaagtccttgtgaatctccttatccaaatgagaaagacaaggaaaaaaataagtcaaaatcttcaggcaaagaaaaaggcagtgattcatttaaatctgagaagatggataaaatctcctccggtggcaaaaaggagtccaggcatgataaagaaaagatagaaaagaaagagaaacgggacagttcaggaggaaaggaagagaagaaacatcataagtcctcggacaagcacagataatgaagactttccatc

SEQ ID NO: 23755 - DNA, 5947 bp, Homo Sapiens
cagtgagtgactccctgaagcgctaggactttggggttaggagataagagttggggaggatctttgaagagttgaggatatggctgttgggaacctcccttgacctcctcctaccccccccactccaagttctctcttcctgtcccacactctgcctctgttagaaataggagacttctctctgctaaacctactggcaacgcccaactctttttttccttctcttctctctcttttcctaggtctgcagccaccccagctcatacctctctgcctccccgctctcaaggagggtctgccgcatgtgatgaaagtgtctactctcagggaaagctcagccatggcttccccactgccccgggagatggaggaggagctggtgcctactggctctgagccaggtgacactcgggccaaaccccctgtcaagcccaaaccccgggccctgcctgccaagccagccctgcctgccaaacccagcctgctggtgcctgttgggcctcggcctccccggggtcccctggctgagttgccttctgccaggaagatgaacatgccggcaggaccccagccctatggtggcagcaagcgcccccttccctttgcaccaaggcctgcggttgaggcctccactggaggggaagccacccaagagactgggaaagaggaggctgggaaagaggagccaccccctttgacacccccagctcgatgtgcagccccagggggtgtacggaaggcccctgcccctttccgcccagcctcagagcgcttcgcggccaccacggtggaagagatcctggccaagatggagcagcctcggaaggaggtccttgccagccccgaccgcctgtggggttcccgcctcacctttaaccacgatggcagctcgcgatatggccccaggacctatggcacgaccactgctcccagggatgaggatggcagcaccctcttcaggggatggtcccaggaggggccagtaaagtctccagcagagtgccgggaagagcacagcaagacccctgaggagaggagccttccttccgacctggccttcaacggggacctggctaaggcagccagctcggagctacctgctgatatttccaagccctggattccctcaagtccagccccctcctcagagaatggaggccctgccagcccaggcctccccgcagaagcctcaggctcaggccctggctctccccatcttcacccgcctgataagagttctccctgccactcacagcttctggaagcccagagtcctgaagcttcccaggcttctccctgccccgctgtgactccatcagctccaagtgcagccctgcctgacgagggctcccgccacacccccagcccggggctccctgccgagggggctccagaggcccccagacccagcagcccaccccctgaggtcttggagccccatagcctggatcagccccctgccacctcatcccggcccctgatcgaggtgggtgagttgctggatctcactcggacgtttccatctggcggggaggaggaggccaagggtgacgcacacctccgccccaccagcctggttcagcgccgattctctgaaggtgtgctccagtcacccagtcaggaccaggagaagctggggggctcgctggctgccctgccccaaggccaggggagccagttggccctggatcgtccctttggggcagagtccaactggagcttatcacagtccttcgaatggaccttccccacgaggccctcgggtctgggcgtgtggcggctggactccccgcctccctcccccatcactgaagccagtgaggccgccgaggctgctgaggctggcaacttggccgtttccagcagggaagaaggagtgtctcagcaggggcaaggggctgggtcagctccaagtgggtcaggaagttcctgggtgcagggggacgatccaagcatgtccctcacccagaagggcgatggggagagtcaacctcaattcccagctgttccccttgagcccctgcctacaactgagggcacacctggattacctttgcagcaggcagaggagagatacgagtcgcaggagcccttggctggacaggagtcccctctctccctggctaccagggaggcagccttgcccatcctggagccagtcctggggcaggagcagccagcagcccctgaccagccctgtgttctctttgctgatgcccctgagcctggacaggcactgcctgttgaggaggaggccgtgaccctagcccgggctgagaccacccaagccaggacagaggctcaagacttgtgtagggcatcccccgagcctccaggccctgaaagcagctcccgctggctggacgacctcctggcttcaccaccacccagtggtggcggtgcaaggcggggagctggagctgagctgaaggacacacagtccccaagtacctgctctgagggactccttggctggtcccagaaagatctgcagagtgaatttgggatcacaggagacccacagcccagcagtttcagtccttccagctggtgtcaaggtgcttctcaggactatggccttgggggtgcaagccctagaggagacccaggtctcggagagagggactggaccagcaagtatgggcaaggagcaggggaagggagcaccagggagtgggccagcaggtgtggcatcggccaggaggagatggaggccagcagcagccaagaccagagtaaagtgtctgccccaggggtgctcacagcccaggaccgggtagttggaaagccagcccagcttggcactcagcggagccaggaggcagatgttcaggactgggagttcagaaagagggattcccagggcacttactccagccgggatgcagaactccaggaccaggaattcggaaagagagattcactgggtacctacagtagtcgagatgtaagccttggggactgggaatttgggaagagagattctctgggtgcttatgccagccaagatgccaacgagcagggccaagatttggggaagagggaccaccatggtaggtacagcagccaggatgccgatgagcaggactgggagtttcagaagagagatgtgtcactcggcacctatggcagccgggctgcggagccacaggaacaggagtttgggaagagcgcttggataagggactacagcagtggtggcagctccaggacccttgacgcccaggacagaagctttggaacgagacccctgagctctgggttcagccccgaggaagcccagcaacaggatgaggaatttgagaagaagattccaagtgtggaagacagccttggagagggcagcagggatgctggccggccaggagagagaggatccgggggcttgttcagtcctagcactgcccacgtgccggatggggcactcgggcagagagaccagagcagctggcaaaacagtgatgctagccaggaggtgggagggcatcaggagagacagcaggcaggggctcagggccctggcagtgctgacctggaagatggggagatgggaaagcgaggctgggtcggtgagtttagcctcagtgttggcccccagcgagaggcagcatttagcccagggcagcaggactggagccgggacttctgcatcgaggccagtgagaggagctatcagtttggcatcattggcaacgacagagtgagtggtgctggctttagcccttctagcaagatggaaggtggtcactttgtgcctcctgggaagaccacagctggctcggtggactggactgaccagctgggtctcaggaacttggaagtgtccagctgtgtgggttctgggggctcgagcgaggccagggagagtgccgtgggacagatgggctggtcaggtggcctgagcttgagagacatgaacctgaccggctgtttggaaagtggagggtctgaagagccggggggaatcggagttggggagaaggactggacttctgatgttaatgtgaagagcaaagatttggctgaggtcggggagggaggaggccacagccaggccagagagagtggcgtggggcagactgactggtcaggtgtggaggccggagagttccttaaatcaagggagcgtggagttggacaggcagactggacacctgaccttgggctgagaaacatggccccaggggcagtctgcagtcctggagagtccaaagagcttggggtgggccagatggactggggtaacaatctgggcctgagggatttggaggtgacctgtgacccagactctggaggttctcaggggctacggggatgtggagtggggcagatggactggacccaggacttggcgccccagaatgtggagctctttggggctccaagtgaagccagggagcatggggtgggcggggtgagccagtgcccagagcccggcctgaggcacaatggcagcttgtctcctggcctggaggccagagaccccttggaggccagggagctgggggttggtgagacaagtgggccagagacccagggtgaagattactcctcgtcttccttggagccacaccctgcagaccctggaatggagacaggagaagccctcagcttcggagcaagccctggcaggtgcccggcccgccccccacccttcggctcccagggcctgctggaggagatgctggcagccagcagctccaaggcggtggctcggagggagtcagcggcctcgggccttgggggcctgttggaggaggaaggagccggggcaggtgctgcccaagaggaggtgctggagcctggcagggactctccaccctcctggaggccgcagcctgatggtgaggccagccagacagaagacgtggatggcacctggggctcttcagcagccaggtggagcgatcaggggccagcacagacttctcggcgaccctcccaaggccctcctgccagatcccccagtcaggacttctccttcattgaggacaccgagatcctcgacagtgccatgtatcggagccgtgccaacttggggcgcaagcgtgggcaccgggccccggtcattcggcctgggggtaccttgggcctgtcggaggcagcagactcggatgcacacctgttccaggactctacagagccacgggcatctcgggtgccatcttcagatgaagaggtagtggaggaacctcagagccgccggacacggatgtcgttgggcaccaaggggctgaaagtcaacctctttcctggcctgagcccctcagccctgaaggccaagctgcgcccccggaatcgctcagctgaggagggagagctggctgagagcaagtcgagccagaaggagtccgcggtccagcgttcgaaatcctgcaaggtcccaggactgggaaagcccctcacgttacctcccaagccagagaaatcctcagggtcagaaggatcgtcgcccaactggcttcaagccctgaaactgaagaagaagaaggtctgagaagtcactgaggttcttcccacctggcagtctcaggcagtgcccattcctgtggggtccctgggtgaggagacggctggagccccaccatgccccaggctgcagcctctgtcccctccacctctgaggagcgtctggggaggcacatttatgcactttgtatcaccctccgaactccccccacaccttcccttccctggatttcatcactagtggttgaaggttttgtcccttcctctcctccttccctctccctctctgcttcctcctccagcctcccttgggttttcttttgataccaatttatagcattttttataaaagcctttgatttttataatgggtgggactgtatccctgcctcaccccaggtctccgtctgccccgccaggtaccccacagagaccaatgacattttgccacttgaaacaataaataaagttttttggg

SEQ ID NO: 23756 - DNA, 68639 bp, Homo Sapiens
cagtaagcacagggaaggtgtatccagctcagcattgctggcacaaggagccaaggagctgattctcttagtgaacagaacttggtggatttacagcagcagctctcacactttagtgtgtatcagaatcacctggagtgcttgttgaaccacagacacctgtgccctatcctcagaatttctgattcagctgggtgggcccaagaatgtgcaaatctaataagttcctagaagatgctataatactggtcttggaaccacagtttgagaaccacttaacttagcgaattataaaacgtactgatggctggactctagcagcttataggaaggaggcggtgatactgaaggcagaagcttaaggagcagggattttattgtggagattgtggggagccattaacaggagagtgatggactctcatttgccttttggaaagatcactttgggtgtggtgtggaggatggatcagagtcaagaatacgtggggaccagaaaaccaaataagtggtttattatagccatctaagaaataataaaaacttggagtaggagcaagaagatgaatatccttaggacttggtggccaattggaagtgggaggggcagagagggaggagttaatgagagccatcagatttctggctgtgttgggattgtgtgattcaagacacaggaagagaagtgggtttgaagcaaggttgtggagaaaagcaaaggaggtgagtacgggacatgctggatttgagatgccagcaagatatctgggtggactcccttgtaggcagttttacttatgaaattggaggccagctgcaaggtctggtaagtaatctagccccatccctcctgccacttccatttgatcccccatattgtttgtttggatcaggcattgtatttgtaagcaacaatatgaatataacctttaagggccttgagaatacaaggcactttctcaagaaaacaaatgttctactgttttgattcacggggtaggtgggcggaagaaagagctgaagtgcagagtcttctaacaccagaagaggttaataaagccgccctctgagtggccagtcgaactggaacttggtaagcttgaaaggggcaaaaatcacttgactggtctgcagtgccatatgacaaacagctgagactaattagctggattgtgggtttttacagcgatgcctgttttgaaagttgatggagcgaactgcttttccaaagactcttttgaaaaactttttaagtaggccattctgactttaacatttctctttgtcttaacattagacaaaaagtaaccttcctgaagaggacatgtgattggaagttgtcaattgttgaagcattggtaactccagtctctaacgttttagaaaatcataacaagcggttctctaccctgtaaaggtatggttttgtatttatcttttttttttttggtagtggttttgagctctgtcatgtcaattttcatgcgcttaaattatgtgcaatataacatacaataccattgcacgtactgtttttaaactaaagacttaatgatgtctactaaatttcttgggattagtttgaaaagtgcattttcagtgaccacggagtgggtatgaatactgaccgcattcttcctttcttttctgtacttgaataaagaaacataggtttttactttcaggaaattgttgaatatgagagctgattaggaaattgaattattctgagagtcttgcttatcctctgagggttgtttgacaaaaattcaagcttattggtgttttgtttttgatagtattaatagcttttgttttgttttgttttgttttttaaatttgagacagagtcttgctctgtcgcccaggcttgagtgcagtggtacaatctcgggtcactgcaacctctgcctcccaggatcaagtgattctcctgcctcagcatcctgagtagctgggaccccacgctaccatgcctggctaatttttgtatttttagtagagatggggtttcaccatgttggccagcctgctttctaactcctgacctcaagtgatcttcccacctgggcctcccaaagtgctgggattacaggcatgagccaccgtgcccggcctaaaagtgttaatagttttaatggaggaatgtaagtgtgtgttttagtataaggtttatttcttctgggaattaaatctgcttttaaattagtgttaattctgttaggtttgataagggtattgttatgtaaggaaatgtccatatattttagaaatacgaaatgaagtatgccggagtgaaagatctgagtggtgagtgtgatgggagatttcattatataattctacttctggatattgtattagtttactagagctgccataacaaagtaccataaactgggtggctttaaaactgtgtgatttcaaaaacagaaatttattgcctcacagttctggagcctgaaagtctaagatcaagatgtcagcggggttggtcccttttgaggactgtgagggagaatccgttccaggcctttctgcttagctgtggatggctgtcttctccctatgtctcttcatgccatcctccctgtgttcatgtctgtgatcccagttcctttcttgtgaagagaccatgagggtggattaggacccaccctaatgacctctttttaacttgattccctctataaaggtcctagctccaaaaaacattgtattctgaggtactgggagttagggcttcaacatgtgaattttagggggacacaattcaatccataaccgacatgtctgaaaagcttcttaatatgacattttaaagatttgcctcaaaatgcatgcagtaaacatttgttaagcccagtgcctggactgggctggattttgagtgtgtgaagatgcataagacatggttcctgtctactaacccatggtttaatcaaatatagggatctagctttgtgagtgtgtacgtgtttacttattgcttccattgagttgtagccactctcacacttgtgtgtccctgggagcacaatcagggtcctgacacatggacagcctaaccacaagagacacctggaagggttcccgtgctctgagcacccataagcatagattaagagagtggaaggacttcatattcacccagtccattcttctcattttacagatgaagaaattgaggctcagaagtgctaaagtcatttgctaatttgtattagtgccaaggcatccttcagaatatcctggcttccattccagtgtggtgaccaaacaatactgttttctttgccacaaactcatgcttttcacctgggaatgaaccccaacccccattatcagaagtcattgtgggaaagagccttgataaaaagctgacattctctgtcaaggttcttggattataaataccaaaaaaaaaaaaaagatgttttggggatgagtgtttattcatgagggcattttatccatagaatgaagttggatttaatacattccaaaggagtttacccccatcttggctgctctctctgtctcttaccactttctccttgtcacttgttgaaatagttaagtcacagaggtatgaccctgcagccataagaatacaaacaaccatttttcttctttcttggtgcttctgctgcccacaagacaggaactgtggcagaaagggaacggtctggtgaaatcttgctggctggcaggatggcgtcacggcaactaggctgcctctctctgcggctgtttcagcttccgccctctctggaccctcggtacctgagtgctcataggggaaactgtcttcttcctgcctccatttctgtttttcctcagtaggattaaggcttcttgagatatctgctcatcttttgctattattcctttcttctccctttgaacttgtttgatttagagccagagctcaggctatagcatacgtgatagctgatgagtcatgtgaagcccattaaaagcaaaagctgattatcacaagaaccattatttatttgcgctgtctatgcaacagcacattttcttttgcgcttctggtgttgctgcagcgtggctggggccctgccctcttggcagagcagaggtcctgtggtgtaggctggggggcaggtaggggaagtgggtgatggatgagatggggtgctgcttgagaaatgagctatctttgctgctgcttctctgaaggcagaatctgctttgctcaaacacgggtataaatcatcctttcaagagctgagagcatccatttttgtttgtttttcttgttttccccgtttcataccctatcaggcctcctttcttgatgacatagtctaagctggaatcttttagctatcttttagctagatggtaaatccagcaaatagctcaatgataagtccattcatccagcaaacagtgaatggatttgccattttcacacggagaaggcccagaccacttcaagtttgtacctctgtggtgtggcaactgagccagcctgtggacaatcactgcttgaaaaatctccttcctagtgtccttcttgtatctgtcttgctgctccttacatttttgttctctcttcactctaaatgtccatctcatttttcccatggcctaaggaaatactattatgttgatgacactaaaattcatagccatattcttcttgtgagccctaggtctgttttccaaatgcaaattaaacacaactcccttgatgtccctcagacatgagagatgtttaactggttgtgtaccgtacagtgtaatgtggtagttgagagtgtgtctgagatcacatcttggttctgccatttctggctgtgtgaccttgggcaactttattaacctttctgtgcattggtatttttcatctgtagatttagggaccttatacggttgttgtgaagactaaatgagttagtgctttaaaggatttagaatagtgcttagtgttagttataataattatcatcttctcaaaccatcttttcctttttcagttaatgttataccatttatttaccaaactaaaagttttggttatctttaatttctatactagtctgttaagaagttatattgatttctacctcctaaatatatctcaaattaatcacttcttcttcatccctactgtcaccaacacaattcaaaccctcaaaatctctctccatatgtcttaaccagttcaaactgttataacaaagtaccatagactggatagcttgcaaacaacggaaatttattcctcattgttctagaggctgaaagtctgagatcagggtatcagcatgctcagattttggtgagagctctcttccaggttgcagacacttgacttttcactgtattctcacaaggcagaaaggtagctctctggcctcttcttataggggcactaatccccttcatgaaggatctatcctcaaaacctaattacttcccaaagacctgcctccttataccatcacattggggattagatttcaacatacaaattttggggagacacaaacattcagtcggtaacattagagccttctgatgctctgtgtatttccagtctccatgtggctgccatagagatctttctaaggcacacatctcatggtcctctcctgcataaagagcccgtggtggccttctgttgcccagaggataacacacaaactttttagtgccatgtcacagtccttttagacccaggtctcaaacactttcccatgttttcagcctctgttctggatacattctcccctacctccatgcatcccttcagccacatccactgctgaagtcctttaatgcatcctaagtaaccttagcctcttacacctttgcaagcgcaaaccctcaaacccttacctgcccgcatcagtcagcccaagatgtgttccctcctgacggttcgaaacctggtcttttttttttttttaattttgagcatcaggcattccttaccaaattccatcaaaactcagttacatgttttggattggcatcaagaattatttgcttatagtttctgttatcttgaaaggataatgcttatttggctgacatgtgaggtaaagtcgttccccacattatctagtgcactgtgtaatttttgtccattcacatctgtcacttgtccttatgtgtgcctgtacactcacattctgactttagtccttagctcagatgcccctgtgtgaagtttttctgattccctccttagacattgtgggctccttcttctccctcttgtgctatctccccagccctcccatctccccaacggcttgtgcatacttctgttacagttcttcttcttcttctttttttctttgagacagagttttactcttgtcgcccaggctggagtgcaatgtgcgatctcggctggctgcaacctccgcctcctgggttcaaatgtttctcctgcctcagcctcccaagtagctgggattacaggcatgcgccgccacgcccggctaattttgtatttttagtagagatggggtttcaccatgttggtcaggctggtcttgaactctcaaccccaggtgatccgcccacctcggcctcccaaagtgctaggattacaggcatgagccaccatgccgggccctatagttcttgtttccatgcattttccttgggcatttccacaaacagcttacctattagactgttgctcttctagagccacattcttggtgcttaacatagtggcacatccacaattcttgtttgttagatgtttaattgatgtgctcatgagctactgcttaaatgactgaatgaatttcagtcatttaaaccaggctctctccctcctcagtggcatcaagctttactagtatatctttggatcattggtggaggccaatttacttatcaaacctcatttaaaattattaacagattttggagaggtatatgtatgctattctgcatttaacttctgttatatttgaagtacatttaatatatattttttgggaaatactttcctatgtgttgtgaacactacaaccctttcccacatcctcctatgcttcgtaattttgataatttcacatttgtcatttgagccaagtttatttttctctaaaacagcttaaaatttctgttaaaaaacagatccccatctattctagcttatagaggttggaaaaatgtttaaaatctaaacgtgattaaaggtttgtagaaatcacaaaataaagattttggctgggcacagtggctcacacccaaagtaatcccagtactttgggaggccgaggccggctgatcacctaaggtcaagagtttgagaccagcctgggcaacatggcgaaaccctgtctatactaaaaatagaaaaattaaccggatgtggtggtgcatgcctgtactcccaactacttgggaggctgaggcatgagaatcacctgaatccagaggcagaggttgcaatgagccaagatcggaccactgcactccaactccagcctgggtgacagagtgagactcttgtctcaaaaaacaaaaacaaacaaacaaacagaaaaaataaccctggctatagttgagagactctttggagtcaggtgtggactaaatgttgtattctcttacgatgtttaatgtggttttttgtaagactaaagactccagaattctgttacagagttgtttgctgatttgtttcttttgtgtaagtgcccttttcatttctagatcatggttactctaacatcgttcctcaaatatatgcatttcatggagttaaatgaaatacagactttaggacaattaaacagactaatggaaaaacttggcaaagtttttttaagtgggtcctaaattattagctagaattcagaaatttgggttcggcttctttaattttaaaattaagaagagacatgggctggcctctttaacatacagtgttgaattacagaatgcataaacgttattccttgtctctcttcagatacttggcatttttataatctagtgccctactttctaggtattaaatgggggaacccaagtgctagtagttaaaattaaatatagtactgtgttcaaaagaaaattcggatgatagctaatgcattttcgatgtttctctagagggtgaaacaccatttctgtttaaagcattctactataattcttcctctagtgactgcatctcaagtaacttttttttttaagcccaagacgggagcgacttatataaatgtaatatggcacatttgaagactggttttgggtaaggtcacctcaaggacctggcacctattaggtatttcactttttagccattcaaatatttattaattaccctgagaactacctccctttgctctcccctaccccctggcgaatgcaaaaggaagaaacagaattactttgaaagagaaattctaggtagaaagtatgagaaaagagcagaaaccaggaaagtgagagaagaagctagaagaaaggaaagaaaaatatcaaaggcggaataaatataaaagctggtaaattaacagattaagggaaaaaagtagcagtctccttgatacatgctgaaacaaaatgtgataaagttgacacccattcataatactcgtacttagcaaactaggatagatgaacttccttgacctgataaaaatatgtaccaaaaatctacagcaaatgtcattcttaacagtgaaatgttagaatcaagacatgacgagactgggctgggcgtggtggctcacacctataatcccagcactttagaaggctgaggcaggtgggtggcttgagcccaggagttccagaccagcctggacaagggaggctggggcgggacagtcacctgagcctgggaggccgaggctgcagtgagctgtgattgtgccattgcactccagcctggacaacagagtgagatcttgtctcaaaaaaaaacaaaaaaaaagaaaaaaaagagataagactacctgtatcaccatgtctattcactgtttttttgttttgttttgttcttacctattttttttttttctttgagtcagagtctcactctgttgcccaggctggagtgcagtggcgtgatctcggctcactgcaagctctgcctcccgggttcacgccattctcctgcctcagcctcccgagtacctgagactacaggtgcctaccaccacgcccggctaatttttttgtattttgagtagagacgaggtttcactgtgttagccaggatggtctggatctcctgacattgtgattcgcccaccttggcctcccaaattgctaggattacatgcatgagccaccgcgcctggccgactttttataattagactaaaaggtaagattagaaaggaagaagtaatttatttttacctaatatgtttaacagattgctggaattagtatggctatgtaagaaatagaagatacatgtttaaaagttatcacagtagtgacaaaaacaaagtatcaataagttgaaagatgtacaatatcttcatgaaaagagtttattgaaaacttttttttttttttttgggatggagtctcgccctgtcacccaggccagagtgcaattgtgccattttggctcactgcaacctctgtctcctgagttcaagcaattcttctgcctcagcctcccgagtagctgggattacaggtgcatgccaccatgcccagctaattttgtatctttagtagagatgggattgcaccatgttggccaggctggttttgaactcctgacctcatgatccacccacctcggccttccaaagtgctgggattacaggcatgagccactgtgcctggcccgaaaacttttcaaaaagatgcttttttttttttttttttttttttttgagatgcagtgagtgatctcggctcactgcaacctccgcctcctgggttcaagctattcttctaccttagcctcccaagtagctgggactacgggcacacgcccccaagcctagctaacttttttttttttttttggtatttttaggagagatggggtttcaccgtgttggccaggctggtcttgaactcctgatctcataatctggctgccttggcttcccaaagtgctgggattacaggtgtaagccacagtacccagccaaaaatattcttttcttagagtttatttatttattatttttatttttttttgagacagagtctaactctgtcacccaggctggagtgcagtggcacgatcatggctcactgaaacctctgctgcccgggttccagcaattctcccacctcagcctcctgagtagctgggattacaggtgcctgccaccgcgcctggctaatttttatattttagtagagatgggggtttcaccatcttggccaggctggttttgaactcctgacctcgtgatccacccgcctcggcctcccaaagtgctgggattacaggccaccatgagccaccatgcctggccgagttttagtttttagagcagttttaggttcacagtaatactgagtagaaagtacagtttccatatattcccttccctcccaaaccccccaacatgcatagcctcccccactatcaacatcccataccagagtggtacgtttgttacacatgatgaacctctattgacacattatcatccaaagtccatagtttagattggagttcactcttggtgttgtacattctatgggtatgtatacaaatgtataatgacatctatctatgttatagtgtcacacaaaatagtttcactgccctaaaaatcgtctgttctctgcctattcatctctttcacttcccccactccaacccctaataaccactgatctttgtactatctccacagtttagcctttcctagaatgccacatagttggaatcatacagattggcttctttcagttagtaatatgcatttaaggttcttccatgttttttcatggcttgatagctcatttctttttagtgctgaataattttccattgtctgaatgtaccacagtttatttatccattcatctactgacgaacatcttgttgcttctgagttctggcaattatgaataaagctgctataataaatatcagtgtgcaggtttttgtgtggacatgagttctcccttcatttgggtaaataccaaagaatgtgattggattgtacggtaagagtaagtttagctttgtaaacaactgccaaactgtctataacaaagggcttgtaccattttgcattcctaccagcaatgaaggagagttctgggtttccacatcctcaccagcatttgatgttgtcagtgttttggattttggtcattctgataggtgtatagtgatatctcattcttgttttaatttgcaattctctaataacatatgatattgagcatcttctcatatgcatatttgccatttgtatatcttcttttgtgagatttgagaatatttttaaaggcactaaaaatacgtaaatagatggagaaatatgcatgtacttaggtaggtaaattaaacatcatgaacatgtcaatcttcttaatttgatctatagatttatgtgatcccaatgcaatgcaatgcaattccaataagaatccccatatggtttttgaggaactcagatggaaatgtgaagggttcatgtccttggtaaggtgggtaccagtcgtaacaggtatgaagttatattttagggtcatagtgattaaggcattgtggcactggcccagggatggtcaaaatgaccagcgaaaccaaatgtaaagccctgaaacagatccattcatttattgcatatcactgggcaaaagataattttatgcaataaatggtgctatgacgattgtatatacttaagggaaaaataatgaaattggatccctacatataccttgaattctcagtgtattaaagacttaaataaaaaggcagtatctttataaacataatataaaagaatatctttattgctttagataagaatttcttggctgggcatggtggctcacacctgtaatcctagcactttgggaggctgaggtgggaggatcacttgagactaggagttcaagactagcttgggcaacatagtgagaccccatctctacaaaaaagaaaagaaaattagctgggcgtggcgactcatgcttgtagtcccagttattgggaggctgaggtgggaggatcacttgagcctgagaagttgaggctgtagtgagctatgattgtgccattgcactggagtgagaccgtgtctccattaaaaaaaaaagagactttcttgatatgatataaaataaataactataaaaaagaataaatttgactattttaagattaagagccactaaaaaagtgaaaagacaaaccaaaaacagtaagaatatatttgcaacatacataacttataaatagtatccagaatatatgaagaactgcacatccatagaaaaagaacctggctgggcatggtggcttatgtctataatctcagcactttggacggccaaggtgggcggatcacttgccgctaggagttcgagaccagcctggctaacatgggaaaaccccatctctacaaaaattagccaggtatggtggtgcgtgcttgtagccccagctacttgggaggctgagggatgagaatcacttgaatgcaggaggcagaggttgcagtgagatgagattgtgccattgcacaccagcctgggcaacggagcgagactctgtcttaaagaaaaagaacccaatagaaaaataggagaaagatacaaatgtgcattttaataagaggaaactagatggccaagaaactaataaaagatgctcacactcattagcactcagagaaatgtgaatttagatcacaatgtgttaccattttgagaagtctgacaacaagcaccaaatgttggtgaagatatgaagttgggagtgtaaaacaactatattggacagcaatttgacattatcttgtattactgaacatgtgtgcataggtatagcccaggaatttcacgctttgacgcctaccctagaggaggtgactccccctggtgtgcactgaattggttcagatgtgttgagatgttgaaccctttgtccctcagggtggctggacagggcctggcctttctggggccctaaaacctattgcctttgatcaagagcatatgccctggtaggtcatacaaatatcatgaacaaggttggaaagcaattttctagagaaactcttgctggtgtgcattaggagacaggcacatacatatagcagtgttaagtgagaccaaaaacaggatagacctggtataggtagtgaattcttcttctaggaaaacacagagacattaagtaattagataagggtaataagagaagggttctaacctcttatttcttagtgtcagtggtttcaaggagagtgagaggtgcagagaaggagctggaggaaagtgatactacaactcctcctcactgtgtgtttccttttttttttttttttttttgagactgagtctcgctgtatcgcccaggctggagtgcagtggtgcgatctcagctcactgcaacctgcgcctcccaggttcaagcaattctcgtgcctcagcctggagtgcagtggcatgatctcagctcactgtaacctttgcctcccaggttcaagcaattctcatgccttagcctcctgagtagccgggattataggtgcccacctgcacgcctggctaatttttgtatttttagtagagacagggttttaccacgttggccaggctggtctcgatctcttgacctcaggtgatccgccagctttggcctgccaaagtgctgggattacaggcgtgagccaccatgcccagccagtgtgtgttttcattgagatacattcagatgggtggtggatgatgatgggcaaggcctaagtttggaatctgaggaggtgcctattgcaggctcctaagaggagtgaatgctgtgcaggacatctagctgtcttccctgacatttcctttttactcactgccagataaagaactttacaacagggagatagtatctggaaactgagtttaatcagagcagcagggactgcccatcatgtcctgtgtaattgagtttggctgagagcaccctgctgttatccttggtcttgttcatcctgaactaacagcatgttccctcttctgtggcttgtacagtcatggccctctttttggagctttcactgttggctactctgcctctgtctcaagggcagaggtaaatgtgggccacagggactggggatgattttcaagcatttcttggtcatgtggctttgatgatctctcatgctgaacctgccccgatccaatctcatcatccttcccttccaaaaatctgataccacccacaaacaccttatgcccattccaactctttcccttccccacttcaaatgtcctgcttctgttggcaacattattttggcctcctggccccctaggctttattctttggtgttctctttgctgtgtccttttccacctgatgtggaactctgttctattattttaaaattagtgtatcttggatccccttcttcccattcccatgcggctgccctcatctaggctctcatcttcaaggagtgagaggtgatagaagggacaactgtcaccatgaccccacttaaatttctcatgactaagctttgaactttgaacctggaatcatacagcatagaatgtctgtgttggaaagagaccattgtggtcaaacctcttatttcatatttgataaaacaaggcctgcagagggatggtgacctatcctgggtctaaacagatggtggcagaggaaccccatataccaatggattagtcgtcctgctctcctcaatttgtcacattacctcataagcattcctttgagtttacagccagttttgtacttagaggattatatctgaggcacatttgtatcctttgaaatgattagcaagcctcctcaatacttgttaaattgaagtcaaaacatgcccttgcatgaaacatgctgtgtatcctattcttcactatctagctaaatcttgcctggctttgaagaaggtgctcagctcaggtcctggctcttgctttgagtcacggtcagattgctccctctttctttctttttttgagacagggtctcactctgtcacccaggctggagtgtggtgacatagtcatggctcactgcagccttgaactcttgggctcaagtgatcctcccacctcagccttctgagtagccgggactactggcacaggccacctcaccttgctaattaaaaaaatttttgtacaacagcatctcattatgttgcccaggttggttttgatctcttgggctcaagtgatcctcctacctcagtctcttgaataggtgggattacaggtatgagcctccatgcccgacagattgctccccttttctgacctcccagcctctacttgacttgtaaaacaacgatcttacatgtacccagtagtttacagtttataaaatgcatttcacataatgtaccctttaatccttccaataatcttgctagataaatattcccatattgaggaaacagtgtggggaagctgtctggctcaccacaggacacatagctaggaaggaagtagcagagttcaggtcttttgacttgaagcccctttcacttttgatttcttgtgctggctggtgcacatggtgtaccagacgtttttctccctgataatattgtcttatccgtcctttttcgtaaatgagtacatcattccacctcaccctaattaccaacttcttgaagggagcagttggatcctgtgtttctttcatgccattcgtagttgctagcaccgtactggaaaggtagtaattgcttaccaaatactgttgaattggatgtaaatatggtttaattatcaaaaaagcacagctatcagtggagtccccaaacactttttgagtcacttctaaataaaattggcagggaatggagggaaccagcggaaggaaaaggctattagagaaagcagatgatagacacaattagcatttgagtgacagctggccagttgtctgtccagtggtgaggggtagtggagaagcaatacacaaaatgagactcttcaggaaatatgcaactgtaccaaagagatgaaacacacccatgaggtgggaatggagtacttaaaagtggcagatgacctgtacaagttagccaaagcattcattcatattaataaacattgattaaaggaataccccgaggaggatggatttatgagaacaggcttccagggtgagagtggaagggatagagttgcagtttggtttcagtttgtgatcattctgttaattactggaaccaggagaaaagagacataagtaggtgaggatgttgccgttgaaacaactttctcttccctttcttatactatgtgcagtcaataggacctcagccctgagccctggcagtcagaagtgaaggaaagacaaataattgctcatgtcatctgtgcatagaggtgtgtagtgatgagcaacttgctggattttctggtactgcctcctttaacgtatttttgtgcattttcttcataaatcaaagagatgctttaaaagttctaatacttggacaactaaattgtgtttccaactctgccttttcccaaaagggtcacaaaaatccatagacataagccgcagattttggtttggaaagtcatgctgcattttatctttatgtttgggctgctcccgagttcataaatattttgtgcctgaaagaaatgtaaaaccccttccactgtaatatatgtgaaaaatgtccaatttcttaatagtagaagccaaacattttcttttgtgagtttctgtctcctacagagaacataagatggagggcttttagattagaagtaatagaattttaatatctgttccttcctgtctcagaatttttcacagtttataagtatattataagagctaaaggaatgtatatctaaaatgcttacaagcatcagaaattaatggaaattatttcaaattaattaaaaattataatttttatacaaaataattttatcatgttgtatgctgtagattctaaaagaaaaataaaaaacttttatttcttagacattcatatgtggttttaaagtgatatatctaggaaaatagattagtaccattgaggcctattgttagatgtgttggtttatttttaatgcttgatggctatatagcaattatattttttatgtgataagcaagtatgtataggaaagtaataacttaaaaggaatgtcattataatatttctttctttaaaaaataggaaggtatttctcgaggtcaaaactcaacttacaaaccttgcagccaaatttgttggtatataaagtctaactttatactttaaaatgtggacatactaaaatgtgattgtagaattatgagattgattttcatgtgtgacttctgaaaccttttttactactttacagttatctctcatgcagaatctcatttcaacctcatttaaaaaattaagtgtactgttacttgtttttgtgatttcccctgaacactcaaacatagtttctgaagacttacttattacttatcaattatccatgttataaacacgtggatacttacatcttcatggtttatgctgctcttgtctacaatttcctttatcctcttgcgttgttctcttgctgattcatagtctctttgctaacacaaagtctttatttctgtgttagtaaatctgtattgaggtttattccccgactcttttttttttttaaacaaggctcttgttctttctgagtcaccctcttgcctgcttattttagcccttatgttcttaacctctaggcttcaaatatctttctcagaggcatgttaagaaaataggagctttgtttccatagatggccttatcctgggcttagctgaggacagagacaaggtatggccttgggggactaagttctaacctggatgcttggctttccatctgcctaggtaggaaaacgaaacttagtgaaggaacctagttggaatacttagggagcctttctttttttttttcctttgagacggagtctcgctctgtcacccaggctggagtgcggtggcacgatcttggctcactgcaacctctgcctccctggttcaagcgattctcctgccttagcctctggggtagctggaattataggcacccgccaccgtgcccggctaatttttgtatttttagtagagatgggtttcaccatgttggccaggctggtctcgaatacctgacctcaggtgatctgtcagccttggctttccaaagtgctgggattataggcatgagccaccacgcctggccattagggagcctttctttctttttttttttttcagagacagagtcttgctctgtcacccaggctggagtgcagtggcacgatcttggctcactgcaacctccgcctcctgggttcaagtgattctactgcctcagcctcctgagtagctgggattacaggcacatgccaccatgcccaactaatttttgtaattttagtagggctggggtttcaccatgttggccagctggtctcgatctcttgacctcgtgatccacccgccttggcctcccaaagtgctgggattacaggtgtgagccaccgcgcccggccagggagcctttcaaactggttggcagagtagaggaaagcaagttgattgaataaattgctgtaacttagaaggttagaacatttctctggcttttgataaagcaacaactactatgggtctttttttttgtatatagatagatagatacgtatatctgtatctatctgtctgtctgtctgtctatcaatcaatagcttttggggtttttggctgcatggatgaattattattttattctgtacgtttttttgagatggaatctcactctgtcgcccaggctggagtacagtagtgcgatcttggctcactgcagcttccgcctcccaggttcaagccattctcgtgcctcagccttcagagtagctaggattacaggcacgtgtccccacgcctagctaatttttgtattttttagtagagatggggtttccccatgttggccaggctgttgaactcctggcctcaagtgatccacctgccttggcctgccaaagtgctgggattacaagtgtgagccactgtatccagccacttggatgaataatatagtggtaaattccgagattttagtgcacccatcacctgaatagtgtacattgtacccaatatgtagtttttatatccctcaccaccctcccccggtcttttctagctactgttgctgtgggctctaatgaactgtgttgtctgcccagatgtcctcttgaattcttggaatgctgacctccaagactcccagatccataaactactcttcccctttgttgacctgctccttagtctcttggtgtttgaccttggtatgactttgaacacctgtctgaaaactccctttgtacttaatccctgtgggttggagttgattttgtgctgccttgacatgaagccaggtagggagtgctaggggtttctctgtcccctctacctcatgccgctttctccttccctggaactttgtaatggtttcaagcaagggtactttcatgtaaaacactcctcatgacacagacattagctgagcctaatactagaaatttcttctgaattcatagaaagaaaatgaagttagtagagaaaatctgaacttttactttgatcagtattttaaaaaatttttgtacctctttattcccttctgtgctataatttagtataaagtggcttctgatacagcacaaaataatatattctcagttatcttaaagttgctataccaacatttcattgtgttcttcaaaccacatcttgacttttgagggttcatccatatatagatttttgagcccatcaggactaatctggtcatattttctgatggcctcaaagtgtccatttagatacaagaaaggatcaccaatgtagctggttacagacatcctccctgcagttttctctcttgcccctttaaggacaccagtttcctatcccatggtcgatgctgcttctttggttgccttttgggcagtttggcctcgatttttccaggactcatttccaggaccctttccccaggaatgacgcaatgatggttgttctcaagactcttcctatggtcttctttcattctcttaagctttaaatagctcctcttgcagttctcaccagggacacccaaagcatttcaaatccctcccagataagaagtgtgttaaggtgatatctgagaggtggcatctttaggagacgctgaataaaagagtgtggcagatcttacaaatgagctgtcaactgaagtggttaggcagagaggaagtgtttagggacaaagccaaaggcaaatgagacgattcagagctgcattgtaggtagacctttctgcaatgattttctaaatgtgtacagtgagattcttcttatgtccttgttgggtctatgggcgttggtgtcttgaccttcactcctttcattagaatatcactctgctgccatctgttttatatgttggggtgccatgtaagattttatttgaagaaacagttttattgctaaagaaagtttgcaaccagctgggccagagcagttttctgaggcaatgaaaggtttgttgcaatgacattatgtaggtttcctatgcaggaactgactgtgaagacactcatctgctatgaaaaagaagtagcccaaacccagaatagccctttcatgcttctagaagtcagacaacaaacttcccaaagaataatctctatagtgatctgtaataaaatgttgtgatgcaacatgttgtgttcattctttattgctcaattgactgttgtaacaggatgaaagcaaacatctgctgaaacatgtgcctgagctttgactgccgtttactgaatgtagttcacatgtacttccttaaataatttcacaatagacaaattaatccattctgattaagcaaaggagagaagtctagtgcaaagtacagtcttctcaactaataattataggaattccaaataacatgtatacgttaaaggtagccataaatagcttaacaaagtagcataagtaaataacttggaggtctctaaatttggtatgtaacttatttgactatatacttttttttattccagtttttaaaaaacataatagaaggagtccaggcgcagtggctcaagtctgtaatcccagcaccttggaaggctgaggtaggcagatcacttgagatcaggagtttgagaccagcctggccaacatagtgaaacgccatctctactaaaaaatacaaaaattagctgggcgtggttgcgcaggcctttagtcgcagccactagggaggctgaggcatgagaattgcttaaacccgggaggtggtggtttcagtgagcccgagatcaggccactgcactccggcctgggtgacagagtgagattctgtctcaaaaaaacaaaaaacaaacatagaaaaaaaaatcttaataagtttacagaactcttaaagtattttcatgaatcccagcgtttcatagaaaacagactgaaaagcacaaatttaatgcttctctgaataaggactgcaatgcttgttcttttattatgctttatattcatcctctttaagacatgaccttgggcttattttctaaaaatgaatatgatctaggagtttcaacacacctttcttagaaacagatgaagtagcaaaaagataaataaggatatatcagatcaaaaaccacaactaactagcttgactagaatgtatgtaattttgcatccaactaacagggtgtacagattgttttcacataatcgtggaacatttataaaacttaattcagcccgggcatggtggctcatgcctgtaatttcaccactttgggaggctgagataggaggatcacttgagcccaggagttcaggaccagcctgggcagcaacatagtgacaccttgtcttccaaaaagaattaaaaagaattatccatttttggtggtgcatacctgtgatcccagctacttaggaggctgaggtgagaggattgcttaagctggggaggtcaaggctgcggtgagacataattgcgccagtgcactccagcctgggtgacagagtgagaccctgcctctaaataaatacacttaattcctcttaaattccaccaaatttgttgttaagcagaccacatttagtgatcacaatgcaataaaattagagatggacaacaataatagcaaaaaagccaactgtaatctgacaggctgagttagaaactggctggatggctgtgcattgttgttcctcagtcattttgcataagcaaacgcaagtcacaccccattctataaacagctgctgatagaaatgcaaacagtcagttctgagactctgcatactgaataataggtgaaataaggaaagactttgagaagcaataagaaatatatctgatttgaccttgtccattaggtgagtttcctttttttttggttcagttaaagaatatgatatttagggaaacatttaaacatgtgttgtaaatatatattaatggagacagtagacttgacaaataccaaaaagacctatatatagctggctgtctacagcttattgacaacaaatggaagaagctaagaatcctggcatcattgatttagtggtattaaaacatcaggaaaagccttgatttttctgagcctagtttaatgtttttaaaagaactaagttggcatataataaacatatttatagatactaatattttaaacacgtgatctatttgtatcagaatgctaccttttcattaacattatggtgaaaccaaaactggcatagtattagaaacacttggttttccagaatggctcttttcccatactttgcaggggaaaaactcttcctgattggaaaagtgggagtacctgaagacacagcagcattatgaatttattgaggagggttgaacaccttgaagttgatatagcaactcagtgtgttacaagaaaagcactaatattgttagtttcatgtcactttttgcacatgcaaaccggagtttggcaatagtacctggagatgagggacaggaaagccaggagaggaagaagactgtagagaggttatggcacccagatgatggttggaagtgaggctgttggaacacagcatggggtgtggtagggtggatgtttgactatggaaatgaaaatcagctgtgaagagatggaagtcctgtgtgctttagcatgccaccatgtacctgaagaacatattcctgtgggcagagaatgtatctgcttaaatgtgattagtgcctgtagtctgggtgaggtgatgggcgcctggagtcccagctgcttgggaggctgaggcaggagaatggcgtgaacccctgaggcagagcttgcagtgagcagagattgcgccactgcactcacgcctgggccacagagtgagagtctcaaaaaaaaaaaaaaaaaagtggttagtgaggaagagggtgttgggtaggcaggacaagggaggcatgaagccatacctggtgcctcttagtagtctttgtaagtatctatgtgtcaaattgatggtactcatattctcattttgtacaaagtcaatgataaatgcgcccgtctcttccccagttactgccaactcatggatgtttgtctaattgtttttattatttggacagtcatgtttaacacgtctggctgcttctaattcatcatgtttcttggaaggaaagaagtatcattgctccttcagaaagcaaagggtttgctttttgagttggtgcatttccctaacagattaacatctttcctgtgttgcagcaaacagaaaacttgaggaagttgagatgcaataggagagtcagtctgtgttggtcaaaagctttccatgcatgtttcatgttctaggaagatgagtcttgacagattccttgacactgtttttaggtctgtgttttgcaacttggaaattctctttgcaatgtgaagtcctttgagtgctatctgattttttttttttcttttgagtgctatctgatttgtaattctctcagtcctggctggggtagcagtgctatcatttctatttttttctgcctttgagccttgggcccacaagtttggtggcactctgagataaccaaagcttttcattttacctcttcagagcttgttaataccagaattccctgtacttaccagttggacttgcagatgttctaccttccaggtagcttaagttgttcctcctttttcattttcaggaaatatttccactccattctttgatagctttatgaagtctcagtgtcatcctgaaggtagactggaaaaagccccaggatcagtgctcaagcctggtttaagccttaatctgtcataatcataagaatagctatgattcattgatcttcatcaggcattttgctgttcagtttgtacaggtaggaggtggtatactattatttgaatttaggagaacttgactccgaagtctgtgtttcactgtcttctatgtgctcacaaaaagcaaccactcagtgggagcatactttgtagattttgcactcattccaaattcttggagactgcttgcttcttggtggtggtaagaggcgtgtttagctatgggttgagcagacttttggagtgtcgagtggctgtgtccattctgagactgccgtcacattatttgagatattactaagcaaatcaaacagccacacctgtttccactgtactgcctatgttttaccaatgacatatattctatgtgtgctttttttttttctattaccctatatctatggagcaaggggtacttgtcacaaactataagtactataagacccagtgttttggtgaatttactttccataaatctctataaacattcatattctgatcctggaagagccttgggcaacaaataatgtcttttgggtaaatgaagtcaatggtttcaataaattaaaaaaaaaagccgatatctcatttgagttattgacattggtcttccagaacgttttctgctttcaggaatcatttcaacgcctcttgtttcctaacatacagttgtttgtgttatttgcctactgggttatgttggtcacccactgaggtgatggtaacatttcagaaatagttgatggatttctgggctatgactgcttatttttttcttcatcctggtctttctctttaagaaaaattatgaacatctggaagatgctgttaaaaatgatgtatgttttggtgttttggaagcatttataaatgtgtatatatatttatatgtattatatatatatctatatcatatatatatcttagacgaagtctcactctgtcgcccaggctggagtgcagtggcattatcgcccgtgaacctaccggattcaagtaattctcctgcctcaccctcctgagtagctgggactacaggctaattgttttgtattgttagtaaagtcagggttttgccatgttggttttgaactcctgacctcaagtgatccacctgccttggcctcccaaagtgctggagttactggcatgagccaccatgcccggcccagaaatgtatatttaattcaacagtatttacagataattttattttttgtctgaagaacttgctatagtggaatatcaccatctgctagaagttggtctagcagttttctagcagttggtgagggaaatggaatattcctatgtagcaagtgcatttataaatattaagccaaatgctatagaacttaagatctcaacagtttctagccatgaacttctctgctgcctcaacatcactgttaaggatggacttatgttattattataaaatactgtactgataggaatgcacttatgaatcttaggttataggtgaatataaaatgcagttatctaatattctgaatttagataaaatcaaactcatcttttaataagaaacaagaaagaatcatattcctgtttccttctacttttcaaaggtgttagatttccacttctctccgcctgagattttgcacaaacaagatgagctctttgtttataacatcattttttccactcttgacatattagggagggcgcaaccatatctacgcacatctagaccagaagttgagatgagtaaactgcacggaagacataggctgtgtccacttatggaaatggggttcctgctattgggcagtatgcatcttgcttttgaagtggaagtagctgtgttccacctcagggtgtaggaattgtaatggtctgtgagagttgtggccagggctcatttggtaaatacaagtgtccctactcatatatcttggtacattataaaatgcctcttctagcctgcctcatgccatgtgacttctcttccttgcttttggtgtctctgttatgtgtttccttccagaatgccgggtatgggtccacaatggcattattaaaacaaaaacaaaataaaacaaaaaaagcaagaaaagcctactgctttttaacgttaaacataaaagtactgataaggtttatatttctatgccagtcatttgtatatgaacattttctccaaatcaatcactgaacaaggggatgttaaattatatgaaagaacatgtggtgttataattcacataaatgctgatgttctgtgctatttgaaaagtaatagttatattcatctgctcctgtttctctgcaaaaataattttgcactgcaataagtgaagtccataagctacataggaacactcaaatattgaaccattctaaaaaattcaaaatattttcagataaaaaattctttataatataccttatgtttctctttataaaaatttctcctcttgagctcgggagtttgagaccagcctgggcaacatagggagacgtcatctccccccaacaacaacaacaacaaaaagctgggcatggtgtatggtgttgtgcactgctgtgatcccagctgcttgggaggctgagactggaggatcacatgagcccaggaggttgaggctgtctctttcttctctactgagctttatgtgtttttttgttttgttttgtttgtttgtttgtttttttgagatggagtctccctctgtctcccaggccggaatgcagtggtgctatctctgctcactgcaacctccacctcccaggttcaagtgattctcctgcctcaaccccgctgagtagctgggattacaggcacccatcaccacgcctagccatttgtatttttgtatttttgtatttttagcagagatggggtttcaccatatcagccaggctggtctcgaactcgtgacctcaagtgatccacctgcctcagcctcccaaagtgctgggattacaggtgtgagccactgtgcccgcccaatcttcacacttttattccttttccatgtttattccttttgcatctttgtcaaacatgtgacttaggatatgaattttgatgtcatattgtgttatgtttatgagagaagcttaaaatgttcagaaagatggacttatttgaaaacccaaaggcaggtatagttgttgggagaagttagactgggacatggctaaaactataaggtctaaggtaggcaagagtaagagattttccacattgaatataactgagttggatccccattgtaccctggcacctagcatataataagtattcaatcaatatttattgaatgaaggaaaaagagagagggccagaagtgtccttacagagacatgatgtcagagaaaataatgtttttttttttttgagatagagtctcgctgtgtcgcccaggctgtagtgcagtggtgtgatctcgatgttattcttttgcctcagcctcccaagaagctgggattacaggtgcctgccaccatgcccagccaattttttgtatttttagtagagacagcatttcaccatgttggccaggctggtcttgaactccttacttcaggtgatccaccctcctcggcctcccaaagtgctgggattacaggtgtgagccactgcacctggcctaaaataatcttattcgagaggaaaatacttatttgagagaaaacggggccgagcaattctacaggtaaatgaaaaatttcatgattgctctgcttgcttttcattttgaaaccataggaaagaaagatgatttatgggatatggtacaagtattaagaagagttatttttttttcttggatttgcaatgaccagcaagaagcagacaagctcccaatttatgacttctgtccttggcagagcccatcaggatgaagggcttcttgatagagggactctgagcacagaagtacagatccctcaacccaacctctctgagagcacaagccttaattgtaaagcattttatcactgctataactgctggcactgaagaaaacttttgattcttgaattcaagcagctgtaactgaggtttctcactctgaaggaaggaatacagacagaagaaaaatatgcatacatgactagaatttaggagacatgagatctagattagccccatgtctaactagctggtttatttcagactattcatttaccttctctgggtttcagtttcctcttctggaaattagagcattcaactgatgggtactcctaggtctgaaattaccaaaaatcacccagatacaactcattcttagattggaatgccaaggtagattttgtgatggatagggcgccccaaaatcattgtacttaacttaaatttctttctgtgatttttctgaaggttcaggtactggttacattaagaataggttataaaattacatgccttgctaatgaagaacgtggtgaaactattaataatagtatttttaataagtctcaattattgaacacttagcacagggcaaacaatgtgctaaaagctttctgtgggttatctcacttagtccttaaaacaacccaatgagattagtactgttattatctccattttacagtttaaagaataaggcttagtataaaaaacttggatcagatcatacaaagtagaaaagtcagaatttgaactcaagcctatttgccatcacactgagaaaacatcagtctctatatggtatgagtcttgtccagacatgaagttctttttaaggatgatgagcagataaaataaaatcaagtatatttattacatgttgctgttcagttaatattattcctcccctttcttttgctctgtactaaatatgagtaatagagggaaaatttggctttcagaaaatggctgacctatctagagtagttttagaatgattctgcctaatagtgggggatcctaaggttggagtctatgattcactttaatatgacacttcatggaaaatctgggctgtgatatgtctgtgtgtgtgtagcagagagagagagagggagaaatagaactagatctttccctttcctcttaactaaatctactctcttctatcttatttcctaaaaaacacttaaaaagtatttttaaaaacatttaaaaatctttaagtgttttttccttcaacttaagttcaggggtacatgtgcagttatttttatttattaaataaatttatttaaagatgggatgttaatctgttgcccaggctacaatgtagtgatgtgagcatatcttactgcagccttgaactcctgggcttaagcaatcctcctgcctcagcctcccaagtagctaggactacaggctaatgccaccacacctgcctaatttataaaaaaaaaacaaatatatatacacacatatatatatatatatatatatatatatatatatatatatatatatataaataggtcttgctagttgcctgggctagtcttgaactcctgacgtcaagccatccttctgcctcagcctcctcagtcactggtattacaggtgaaaatatgttttattttaaaaataaggaagatgatagactttctctcaccaggcaattaacaccacatagtacatgttgaggaaatgggtgttccttgctttctattgttaatctgatgatagtgagggtggagagcactttgaaaaaatatttgtataaggaggagagagagaagtgagctgaataagaaagtcttttgcatatcccaaattaaggtcattcttgactttttagaagatatttccttgaggtagatagcacttttctcaaggcagtacagagtttaaatatataaccttggcttcaaatactcttagcagatccttatttttaaaaattaatttttggtttaggggctcaatgtactttcttatacttctaggaaagaaaagaacattgcctgcatattgacccttggaagccagattgctggatgctgctgctaataacagctaatacttacatagaacttactatgtcctgtgcactgttccaaactttgtgtgtatacactagctcagtcctcacaacagccctcagaaatagctttattattgtgcttcattgagtctaaaatatattgatgatgcattcttgaccttgctagaagatgctaacaaaaagctttcacacagttgtatctctattgcaattgcaataatagcaattgcaagatgtcttggattgtaagactgaaatgtaagatgcaccccaattttaaagaagttaaaataagaaagcatgttagaattgataaaatagaatctcttcctgttttacaggtgaggagcccaaggcaaaagagactaaataaattttccaaagttacatgactggactcaaatacaggtggcttggttgtagagtttctgcctttaacctccatttttttttcctgtctctcaacaatagattggaattgtgcccatgctaatatgtgggtagactggccaagactcagttacttatgccctcactgaagcacttacgatagaacagctctagatctttctgagggagacagtgtatatgctatgtatagggcagtgatgaggattgttgtgctaatgtgtgtaaagtgcttgacatgtgggcatctgacctaggtttcagacccattttcagcaagagagtgtcagagggaagcccttgtgaactggcttcccaaacctcagtaggctggagtacaagcaggaaatggtgagcatacaacgttgtttgggtgccccaaatgtcaaattctggtactgtgtgttctcactgtttactccttcctgaaatgaaatgccaacacaaaaatcatttacgttattagatttctgtatttgaggagtggagtattttctttctggaaaacaggccctaggaatactactcaggacttgaataataaataagagaacaaaaattgtttatatgaaaatataccatcaattgagacttaacattaaattgtcttcacctagtagtgataagtagtgatgagaaagccaagtatggacttgcaggatggaggtgggagtatagtctggtatagactagaatgattttctgctgaaagatggggtaattccactaactccaggctttcactaactggactgcaagctcagataagaaggctgtcgccctcaacaccatgcccaaaccttgaaagatctgttattttgaaaacctgcctgcccccaactccctttatttctctgaaattttcttattctttggaattctggtctcttttaacccagaccagcctggtcagcgtgatcagttttgaacaaactctagacagcctccaaatttgctaaaggttttccccaatcagaatcttcattgttgggtcatgggtgaatattttgctgccaggtctttcaggtaaaatgggaggtgaattctcaacccaggaagcctgtgtcactcatcacatatttccctgttatctgtcatcttctcctatgccagtgctcctttctcccaatcctttactgtactcgaacacatacatgctgttcgagtgtgattatacagtatataatggtggagataaatttttggatacagaatatctacaaatgaggtaatttaaaaataaaattttaagtttgttggtttggcacaagttttaaacaccaaactgttgtttttgttgcttctgattgtcattttacatttctagttttgaactgtttgaacatctgaaattaatttgaaacatttcagactgttttgaaccagtctatattggtctaaaccagtaaaaacaattttacagataactatagttatcaaactagtttccagcagttcgatagaggtagaaccagtgtgactcaattgaaagtggatttaatttgtcagcacagtttgatttagtaaaatatactcagaaccaactaaaacttttagaagcctgtcagaacctgcatgtccaagtcagagcctattggaactagctaaaaccagtctgaagcaattaaagctaattacaatgagactccaataattttggttagatatatcaggttttagccaaagtcagaaagttttgtaggagaacctcttttaactcaccgtaaaataatatgaaccagattcttttgaacaactatgaacttgctaaaatggatggtgtattttatatggatttgaacctctttttaagttgatcagaactcttttgaagtaaacatatctgtattaaatgaattgcaaatggttagaaccagccaaaaaggatcagaattatttgaaagtgatctttgttgactcagccgaccactttgagccagttagcaatcgtttgtgctagaaagacatgttttaagctggccagagtcaatctgaaatttgttctagatcttcagacccagtctgaacgtccacaatggggagaataaagtgagccaacagttaagtacccagtatatgccaaccattgtgctgggcactccataaacagtatctcattgaatcctcagaataatggtgtgaggtagtgtatattcttttttatagaacagaaacctggaaatctaaggctcaaagacatccaagtaattggtatctgggagatttgggattcaaacccagctctgcttgacttggtgagtttcctattaggttaccttgtaagataccatactactggtcactttaaagcccaatgtgcatttataacaaaaatgaataatggatatgaagcttggggtagaataggcattggacttggagctaggagatctagattctagatcgtgcaaatcagtctacctctctgggttctgttttaccctttagaaaactgaacccagagagtggaaggtctgaacatttattttcagatcaagaaagcagataattgtcttaaagatacaatctgaaaagtgcaaactatgattaatattgatggtggtgtctataccttcaatttatggtatttggtttgttaacagtccctttatgattacttggtcagtattgctattgtgaatagaaaacaaaactcacgaagatcatttgtagacttacatgtgtgattacccatggaaatgaaacacattagagatagtttcatttaagtctttgaattccacttaagtgagtttagagaattctagaatatgatgccattggtgacagcattttttcctgtaccctaagtgatgtaaaaaacatagttataccaacttttttttcaaattaaaaataaataggaaataaggtagtcacagtgtcttcttgcatcattctcactgcaggatcggtattgttatctgctgctccattcagtttgaggggaagccctcaaatgagtcaacattatctggacttgcttttcaattcttagctcttatttccaataacttagagccaggtgtgatgctgtgatatgacgtgctataatgttgatgtccaagttgtcgttttttggagaggaattctgttatatgtcattaatactggtgacctatacttgcaaatatccaagctataaagacaggtaaggcatcatctgtgaagtgtcactctttatagtgtgcaaatagaattttgaatgtttgtagaggctctgcccttatccacgggctagccatacctgaaacgtgaggttgcagatctgcactgaagcactctgaggaaacacactgcagtggcttttggggctcagcattcaggagttttcagcataaggtgagtccccaagttgaggatggggtgagggaggtaacactgaaaaccagtaaatattcttgtctgagtttttattaattttatggatatatagaaatagtcctacaggaagcactgaatatggcagccaagtttctggatatggtgctgggtaaaaaggggataacgccgggagtcagtagcatccaatgtaggacatctggcatgtgtatagatggataaatatgtatgtttgaatagtcatgtagagtcgtcagtgttaatgagatagctagttgtttttatgattttcaggagagtttattggcattggcgggggaaacggagagaggttggttaatgtgtacaagcatatggttagatggaaagaataagttctaatgttcaacagtagactagggtgactatagttaacaaaaatgtattgtgtattttaaaatagctagaagagaggacttgaaatgttctcaatgcatagaaatgataaatactcgaggaaataaataccctaaataccttcatgtgatcattacattctatgcatgtaacaaaatattacatgtaccccataaaaatatacaaatattatgtatcaataaaattttaatgaaaaagtaaacctcccctggagagagatcccatttctagttggactgatattttgggtttgaatctatttagaaggtaaatacaaatcatgaaaagtgctgattgcaaagaaccaaaaatagccgtggttaggtattgctgatataaatgaatttttcttctttaaggtggacttttgttttagtcggtactgaagagctgaatttttagcagttcttgatagagtacccaggtaaacataggtaagcgagcccttggttgtggcactgtggtctctgagcagtgactgttcaaatctggaactcagttcccaagtgagcagtgatactctagagaagtctggcttaatatgtagtacatattaatagtaatatgtaaggaagcagggactaaatttacttgtgaaataacagtgtctttgaaggaaccgtaataacatgtgaaaatgaatagaataaatgaaattgcctagatgtccatgtaaaaagagagaaaaggcaaggttctagcactaggagactttctttctttcttttttttttatttccataggtttttggggaacaggtggtgtttagttacatggataagttctttagtggtgatttctgagattttggtgcacccatcacccaagcagtgtacactgtattcaatctgtagtcttttatccctcacccgcctcccaccctttccacccgagtccccaaagtccattgtatcattcttatgcctttgcttcctcatagcttcactcctacatatgagtgagaacatatgatgtttggttttccattcctgacttacttcacttagaataattgtcttcaattccatccagattgctgtgaatgccattatttcgttcctttttgtggctgagtagtattccatggtgtgtgtatatatatacagataaaaaaattgtggtgtaccacaatttctttatctactcattgactggtgagcatttggactggttccttatgtttgcaattgcaaattttagcactaggagactttgaaaaaggaggggaaattggaaccacttgcactctaatgattactgttattccttataacattctctttcctctgtttttcttgtattagtttttgttctatatggtctacagataagacttagtgactgttaccttcttgttgattatcattcccacttgaaatttttgtcctaatggtactataatatgtatgtttttatttttatttttatttttatttatttttttattttgagacagagttttgctcttgttgcccaggctggagtgcaatggcgcaatcttggctcactgcaacctccacctcccaggttcaagtgattctcctgcctcagcctcctgagtagctgggattataggcatgcaccaccatgcctggctaatttttgtattttcagtagagatggggtttctccatgttggtcaggctggtctcgaattcccaaccttaggtgatctgcccaccttggcctcccaaagtgctgggattacctgtgtgttaaattaaaactacactgttaattactatttcaatagcttctcatctagctagttattaggtcttcaaggatggtgaacaatatgtatgtaactctcttttcatacaacccgtagacatacaggttaacattaggtgttaaactgaatattgttgtcactttttaaatggataattaatgttttctaatggattttaattaaaaaattttgtgtgtattttacaggtgaactactgagttcttcattatgtctgatggagattatgattacctcatcaagtttttagctttgggagactctggtgtagggaagaccagtgtactttaccaatatacagatggtaaatttaactccaaatttatcacaacagtgggcattgatttcagggaaaaaagagtggtaagttctatatccttctatgtaaaaatgtaatcgttaagtcaacatttgctggtctgtttagtttactttgtaggaattaggaggacaaaggttgggatctgaaattaaaggtacatatgaaagtgagttatgttcaatccaggcaacatgattgaaaaggctgtgctgacagcacttcatataaaaccaggcagacaaagtggaagtggacagttctttaaaatgtcaccttggtactcttttggcttgtatcttccctctgaactccgaaagttatttgtctacctttgtcttgaagcctgccaaccaccttgcccctcatactcttgttttatgggctgtgtcttccacctttggtatcttattatttttaatggcatttctcctaataaagtctcagcagttccacatggaacactaactggcagaacttatcactgctgccaggagggtgaggttggagtaggagtggggaatgccagtagtgaatgtgatgttctgcagaatgttgaagggagaaacttttatttatttattttttaaggactttgagactgaaagttattctagtgttggaggggaaggcagaaggtcatggtgtcacagttgcagatgaggaaagatggctttctccttagactacatttcttgttgaaaaatccattgttggcctgaagcaggtaaaccagttgtcaggaaattaatgacaaaggtcctttaatggatcatattctgtcagggggaaaggtccctggcttttaagacagaagaacattcccttttgcccattctagtattttattctactaccagagaggcttatagagattaagacccactgaataacagtagggccctaatgaaatttttagtattgacgtgtagttgatagaatctacatatatgtatgtgattatttttgttggttacttattgtataacttaaaaaatagatttgttgagatataattcacaaaaaaaggaaatccatccatctaaagtataaaattcggtggtttttaatatattcggagttgtgtggccatcacagccattcaattttagaatagtttcatcactttaaaaagaaacctcatacctattagcaggcattcctctttctacctccccttagccaccatgaattttctatcaatggcttctgcacacaccatataaatggaataatatatggccttttgtgtctggcttcttacattcagcctgatgttttcaaggatcttccatgttgtagcatgtatcaggacttcattacttattatagctacataatattctattgtattgatacaccattttgtttatccatttgtctgttgatagatactgttgtttctttttctattttctagtgcatcattttaattcccttttttgttatatgtttttgagttcttttttaaaaattcccttggggattacaattatcttaatttttcacaatctaattttgattaatagcaacttaattttaatactgtgtaaaactttgctcttatgtggctctgttttctcccatatttttgtgccattattgctatacgaatgacatctttctacattgtgtgccatcatcaatacagctttacaattattgctgtatgcagttaatttttttttcttttttctttttgagacagggtctctctctgttgctcagactggagtgcagtggtgagatctcagctcaccgcaacctctgtctcccaggttcaagtgattctcctgcctcagtctcccaagtagctaggattacaggcacccgccaccacacccggctaattgtttatatttttagtagtaatggggttttgccatgttggccaggctggtctcgaactcctggcctcaagtgatccacccatcttagcctcccaaagtgctgagggattacaggcatgagctatcactcccagcctgcagttaaattttaatctagtggaggaaaagggctacaaagaaaaaccacgtttatactgttttttatatttactatgcagttacatttttactggtgcttattatttctttgtgtggatttaagttactgtctagtttcctttcagcttagtcttgagagttgtctgtagtatttcttgtaggataggtctgctagagatgacttttctcagttttgtcttaatttatcctttaattttagaggaccgctatgttactgatttttaagttctttgaatatatttataattcctgatgtaaagtctttgtctaataagtttaacatctgggcctcctcaggaataatttctattcgttgtttttttcctgcgcatgagccatactttcctgtttctttgtgtgtcttatacgttttgctgaaaactggacatttaaaataatgtgtctattctagaaactcagattctttcccctacctgggtttcttgtttttactgcatatttatttatttttgtcgttgctgtttgtttaattatgtttctgggataattctgcaaaatctgtattctttgtatgcagctactgaagtctctgctcagtcaacttagtggacagctaatgagtggagagagtttattaaattccttgaactaataagtctcttagctttttctgagagtctctgtgtgtttgttggggtatgtgtttaatactactgcaggcagtttacaactctgccttagcttttattttctgcctgagaagaacctcaaagtcagtcagaagtgagagattaggacctttttagatctttcctgggcatttgtagagccctgcccatgaacatggccttttaggttccaaggaatatttgggagcattatagaaatctcatttcctatttttttctttaaattttttttttgttgttgttgttagacttttgttagccctaactggtattgctacctctggtagctgtgatgttaaataattactgctgatagttttcaacaaatgcccttgggatagggctgttctcaaagagcaagctttgagtgaggtcaaagaaagacaaagctggggcatggagctttccaaggggcttcctgacaatttttctcagtatgggacttttagggagctccaaacctgttgttcctctgctgtccacagtggtggctaggctgatgttttcacaacaaccacatttgtgcacatggtttttaagtcttctaaaagcttgagtgagggggatgggaatagggcaaggtaaaaaacacctcaaagcttactgtttttactgatattcggctgtttttcttgaataaatgctccttggaatgttgcaagtctttgttaattcctagagtactgaaaaagttgatttggacaatttttaccactgtttttgttgctattgtggaggaagaaatttttgatggtccgttctctgctgttctaggagtgttgtctataaaattcttttaagagcacttttaaaatttgggatgggacaagggaaaattgttctaccaaaaatacatctgcactcaaatgtttattgcagcactattcacaatagcaaagtcatggaactaaccctaggtgcttatcagtggtggattggatagagaaaatgtggtacatatacatcatagaatactatgcagccataaaaaagtgaaattatgtcttttgcagcaacatggatagagctggggaccattatcctcagtgaattaatgcagaaacagaaaatcaaatgccacatgcattctcacttataagtgggaactaaacaatgggtacgcatggacataaagacagaaacagtagacactagggactccaaaagggggaagggagtgggagaggggctgaaaaactacttattgggtactacattcactgtttgggtgatgaattcaatagatgctcaaaccccagcattatgcaatctatctacgtaacaagcctgcacatgtaccccctggttaaacaaacaaaaaagatgagattgggaaaagccatagaaaagtaatatttcctgaaactagtgacccaagagaactttgaggaaaggtaaactaattattatattttatacaagttgttttgtattcatattttacaatatatttataagatatatatgtatatatttcaatataacttattacattacctggatataattatttgacataaatacaaacatggttgtattccagatggcattctctttggaattttagatgcctttgggatttgtactgaacaaaaaggtgagaaggttcgctggtgttacaagttctcttttgttttctctttcactttgctgttttaggtgtacagagccagtgggccggatggagccactggcagaggccagagaatccacctgcagttatgggacacagcagggcaggagaggtatgagatcttcagttatgtgctccttactgaaggaaagggaaaaatagttacattcttcaaacagtgacctgagcaggaaaaagccagccaattcgttggtttgcacttgaatgctgccaaattagcaggaaatttgtcaagtctgagatgagaatggtggccttatttcatacaaggtcaagggagaggttatgactcttacttgtggacttttttcttttccttcttttaatttttttttgcttagatactttgctccatttccttttgctatttactcaaccacaagaaagtggccaagttacatgcattattcttacctgactgttgaaatctagtgggatatctggttggaattaattcatgtgaccaggggttacttgaccaaaataagccacatgaaatcttgatataaagttgctttcagttagctagaacttctgttttctttcacagccaccttgaaggattttgttttttaactttttattatggaaaacttcaaggatattcaaaagtggaaggattatatgataaacctatgtacccattactcagcttcaacaattatgaaattgtggccaacagaatttcatttataccccttacctcttctcaccccacccccttaccatataatttagaagcaaattccagacactatattatttcatttttaatacttgtggtaatgtagctctaaaagataagagctcttttttgttttttttttgggcggagtttcattcttgttgcccaggctgacgtgatctcagctcaccgcaacctctaccttgctggttcaagtgattctcctgcctcagcctcccgattagctgggattacagatgtgcaccactacacacagctaattttgtatttttagtagagttggggtttctccatgttggtcaggctggtctctaactcctgacttcaggtgatctgcctgccttgacctcccaaagtgctgggattacaggtgtgagccatggcccctggccaagaactctttttaataaaaacattgattaaaagtatttgagaaaaacctaatattgctgattagatgacaaattcataccaatattttcttccctggagcctgcctgtcagttacaggttttacatataggcaaagacgagaggaaactgactggtgatagggtggggttgggggtggggagagagagagagaagacagggaagacagaaggataaagccttggaaggcagagtaccaagacagaataaggtctgagtcaagagattcttaccttcaagccaaacaaatggctatcagagataagagatctctgcatattctgaaattaaaagatcatggaacacattgtaatgtcaagtcaagctttcacaataggaaaacatacactatattgcttttggccaaattaactcataattgtacataaattcttgggtgagactaagatcacaagctggttcttgtcatccctctccagcagcctcggttttcaaatcacatggtctgttaacacttaaactgatataagtgataaataactatcctatatacttttgaaatatcaccatgtagcttgttattggtaaacttttgtaagaggctgaaggcattgcttgtagttttatatttcaggagtggggccgtggtttaactgaccattctgcttttatgttcctaggtttcgtagcttaacgacagcgttcttcagagatgctatgggttttcttctactttttgatctgacaaatgagcaaagtttcctcaatgtcagaaactggataagtaagtgttattgttccccagtgtcctgctacacagtcccctcttatttatagaatgccctcttatgctctacttctgtgacaaatcgttttggaggagatcttagtgcaaatactattttaaggagcaaggtttttagtttagggacaaagataattgaaatactctgcttctccctggtactgataactttgatttgttgagtacttcctgtgctccaggtgcaaggcagcactttatgtgtgctctcctcttcagtctatcccacagaagagactcttattcccatttcgtagatgaggaagtagaagcctagagaagttaaatctctaagtatctgcttgtctattgtatgctatcaattcttctatcatctctggacattaaatgggtattacatagatgcagatagcttttaaagacttaatggatcatacccctggcttcatgtcttttctgtgcttagagtccccttctagcttttagggttagagcatctttcaggaggattctgccatggaaaactctacaactgcattggtaaaagtggtcaccagtgcaatatatgtcaacctttattttggagagattttaacctcctaaatgattggttcatagccatttcgaattctgccacttgactgcataacagctttcaaatgtatattttccctgtttggtcatgttagtgtaaccctagagaatctattagggaaggctgtaatattaaattcttaacatctaaatctttaaaacactgatttaaaaagatctgctacttaaacattactgttttgggattatgaaagggtaattggctgtagttttgatagtagaaaagcttagattaaaaatgagtttaaaaataatttagtgcactgtggttttcacatactttgtatctgatcctcacaatcaccctgggcaaagattcgggtcagtgttgtgtccttatttcaggagaaggacattgagccttaaaaagtaatagacttatccaaggatatgaagctttggctttcctttttaatggccttttttttgcccgttctcaagtcagttggccactaagagttgaagagctattaattactttaaatatgagttccccaaatatagtaatgcttactggggcttcacttcgctagatgcctggctaagttgcctcattatttcccttgtagctgaatgacagtggctgtttatggtctcttactctcagcccgtgttcatcatccctcctttgcatcatcagaacaagttctggggctttttaaaatcaactattttataaggatcactagagagtgcgcatagaatcttagcatcaaaaaataacgcacctgtttttcataggtagacactaaaactctgagacattagataaatattgcctatcctggctaactagttggataaagaacaaaattatgtgaaaatatgtatacatatgtatgtattttgttttgttttccttagagagtaaaagaatccttattgctcagttaggtaaagaacacttatacgtattgaagattttatatatttaatagaaagtattctccaccccctaccatttaaacaaaaaggtgtaatgttcagtgtcagaagtggtaatatcaaatcttaattaggaataaacatttgttaattatctgtacttttatttttttcttcttcctgtcagccttttgagtattacaatgatcattcatttcttatcttttttttttttttttgagatggagtttctactcttgttgcccttgctggagtgcaatggtgcagtctcggctcactgcaacctctgcctcctgggttcaagcaattctcctgcctcagcctcccgagtagctgggattacaggcgcacaccaacacccccagctaatttttgtatttttgtagagatggggtttcacccatctcccggggtttcatccaactcctgacctcaggtgatccacgcgcctcagcctcccaaagtgctgggattacaggcgtgagccacagtgcccggcccatttcttattttttaataaaaataatagcttaatacacacaaatacacactcacacacacacacacacacacacacaaatacataaaaatcagtggtgagtgccagaacacagtgttgcattaaagaagtagctgactcgtgggccctgattggcctgggagaggagagcaggtctatataccctcccctttccctttgctccttgcagacccctccctctcactcaatctctccatgccctcttgagaagggtgataaaagtctaaagtaagccccactcagatgaggagacagaacagaggctgagtcctctgggcctggattgaaatctgaaaggaatttggtagtgtggtagtcactgtcctgtcttcctggagttcagaggagtaagcacgtcatgcccagagtcactcttcatccagtgctagtgtgtttcctaaggaaactttaaagtagcctacatttctaaactttcttctgtagagtcccataagtggtgcaaaaacccaacagtatatattttacatatttttacttctttattttttattcccattattctctctgtctgaaaaaccctttccacacctgcccccattttttaaccaactggagttctgcttattctttaaaacctagcaaagatggcctctgtgagattctctgtaataaacttagttgtgttagatgttttccctccttttaacccctgttacattttatactgtgtatagggtccttattacatccattatcagactgtagttgtttatgtaggtgacttttttcttagtgaagtttttaaaataactgattaatttgctttttagataagcacaatcttagtagaaaaattaggaaaaatgagacaaaaagaagaaatcaccaataatcacacttcctagactacccaaaataaatactgttaaccataattactggtgatacttacatgctcttctaaatgctttaatatattaacttagtagttctcaaatgtgaatgtgcatctcagtcacctggaggactttttaaaacacagatttctagccccatttccagcattcctgattcagtagagctggagtgggacctgagacttgcatgtcaacaaattcttaggttatgctaaggctggtggctcacagtctttacctgcagaatcactggattaattcattttaatccttaccttgactgtataaagtaagtagtatcattatcaccatttacagatggggaaattgaggcagtcaaataacttcatcagggtcacacagctagtaaatggcagagccaggattcatccctaggtacactggatcctgagtctgtgctcatagcatgacactgggcatggacctataacaccttataaggcattaacagagcacagagccactctggagaccagaaagataatgaggtaaccatgaagcaagtcttgaaggaaggttgtggttaagtattcagtgatgtgggaacagcatgtgtaacaacctggaggaaagaaagggcatggcttttcatgaaatggtacacagtttagtctgtcctctgtaggtcttattaccccagttgccccatgagggcaaagaactgttgtgaaattccatgcagagtatcaggcctgtgctaatgctcagtaaacacctgcctacttgactttctcatgataagatatgatgaacactacttcataatgaggaactaaaatgtccacacttttctggttaaccatgatgaaaaaataaattaggccataaactctgaagtatgtcttactgtgaacgtttaggccttaattttattctggggtgtgatgggtaagaaatgaggtgttattttcctactttgaaagattaaactatttagcttagtgaagctctttggtttgagtcaattgctttttataattgtgcctatttgcaggttttcaggtgaaataaaagctgcggaataagaattatagtcctctgcttccacttggctctggtgacagaatcacttactgtttattctgggtcttttcttctcattgaagcctgtatcttgtttgttttaaatgagttgattctgccctaggataatagaaaaatgtgaaaaacattttggatagaaatagattagtttggagaaaaacaattcttttagaaatgtcattgctatggagaaaaaaacacataaaaacagttttaagattagcagtaaaccctaggaactcctgcaactttcttttcaaatagccttcataaaaaagaaaggtgttttgtatgtgtgtgtgtgcatatgtgtgcgtgtgcacatgtgggccctcacacttgagaggtagcacattctcctataaactctccgatatcaataaactggggtatgtgcttaagaatggttttatatttctgccccaactattcagctttacagataagattactgatgctttgaaagcattatgtcaattcccaatatctatatatacattatagtcttcaaagcacttttgcatgtattgttcactgatcatacacttacattattatttacatatataataaactttcttatattaataggccagctacagatgcatgcatattgtgaaaacccagatatagtgctgtgtggaaacaagagtgatctggaggaccagagagtagtgaaagaggaggaagccatagcactcgcagagaaatatgggtgagtatttttgtggagaagtctagagaaaacattttcaatataaacattagcaggtgaatggtaatgaaaaagataaaagtggacaattaaagcaaaacctcagccataggccttggggcatgttgaatgtgtcctttttatatgatatgatagtaggatccattgacaatgcatgtggcaagggcctccttcagtgctttggtcccattttctcaaactcttggcatttgcagagagacaactttgagttgtctcagaggcgccttaagtatgtaaggccttctttccaagatgcaaataggagactcctggggtaaagaaatcctccatgttgagcgaggaaatttcttttttcatttcttttcttttttttttttgagacagagtctcacactgtcacccaggctggagtgcagtggcacaatctcggctcactgcaacctccacctcccgggttcaagcgattctcctacctcagcctcccaagtagctgggactacaggagtccaccatcatgcccggctaatttttgtatttttagtagagatggggtttctggtaccatattggccaggctggtctccaactcctgaccttgtgacccacccgcctcagcctcccaaagtgctgggattacaggtatgagccaccacacccagcctcagcaaggaaatttcaaagccacttcatgtactattgtagagaatgctagcatataagaagggcttattggttattgcagattaggtgctggttttgaaatttctattctgggagaggagtgtgagatctcctttggcttagtctatggtcttgtggtggagggtcagcaaaatactgtcgttctccttgagttctgggaataggatcatagcagcagcagcagcagcagcagcatgaactggacatgaaagaagtggtcagctgctgcttattaaagtattaaagtgttaagggtgcctctaaaaggaatttttactttactttctttctgcctctcacacaatgagaacccatatgtaaattcaaacccttaatagcattaaaagaggaaggaagcaagtgggttgagaagggaggggagggaaatagagatggtgtagatggtgtaggggatgttacctagtttgtggctttggtggttagcagaatccaagaaggccaagagaaaacctttccctttttattgtgtgatcactgctttattctttctttggttgatggaggttcagaaagctggtagggtttatagtgggaagggagggggaggataggttggccaggtaggaagaagccagactctggaggggtttgaataccaggtaaggagattagatttgatccctggaggacagggagttgctgaaagcctttgagcatggagggatgttatgtttacatttccagatcagtctataggctataggtggggagggaggaaagactagagattgatagattgcagtggtctgtgaggtgggcagaggctagctttgtgaaaaaggaaaaggaagaataaatcaggaaaaacacatagagtagggcaggattttaggtttttctcaaggctagctcagctgaaggattcccatccactataggcttactctggcaaggatttgcaattgcatgtagaggtttttaccctagggcagatggtgtttaaccatgttagaaacatccagagaacttttaacacattctcatgtctgggcttcacctctgaccatcagacataattggtttggaggagtttctcaggcagggttcacttgaagaagcatacctatacatgaagggatctgttacaggaatttgagcatatgcaattgtgggagctgggtaagtagtctctgtaaggtgttgtctttgtgtctgatgctgaagcctgaaggacaggacagtcagacaggaaggggagaaggatgtgaaatgggggatggatggaaaaagtgagaaccagctggtgcccataatgagggactaaaacccatgtcacttcctgttgcctctgacctggctggtgtgggtgtcctgcagaaactggggccctttgtcacagggctaacaacatcacctggcccaggtgcaggtctagttgcaggtttatgacaataagatgagccagcagataagcgacaatatatgagggctatgaaatggaggttgcttcacttcctacccccaaaattgcccccaaatctcttttgtggcccaccctaaccagaaagggcattctgggaaatgttgtttagcctagccaagctgactcattacaaagcctgggcattggtatcttttaaaatctccccacgtgatcttcatgtgcaatggttgagaaccagtgacttaggtgattctgagggggaggctgacagagtcttaccggccagtctgaaatgtccccctgctcccctgagaggcactcatgtaacgtagtggaaaagaaacagggagagaacgattaccacagagaatgctgtagtgttgaagctgtgaggtatgttgcaatgggtaaggaggaagtaagtgatgaagcaatggaaaccatggatcctagagcattcttttgagagtatgtcagtaaatgcaaagaaaaaaaagaaaaaggcagttagaggagttagctagatcaaacaagcacattcaagtatattctcaagtactgggggagggtcaggcttgacttcttgcccctgtgggctttttcagccctttgcttgtttcctgtgccctcggtcttaggattccacagcctgtctggtttcacagagcctaaccctgccttctgtcatatggggtatctgaggggtgtgggggactgtctttgacctgtgcccaggtcacgatggttatggagtatttcatagagaggagctcaatctatagtttttgaattgggttaaaatgagaaaagaggatttagcagataatgattgaaacccttgaagaaaggaaagggctagaaacagagtcccttaggatacagaaagcataccatgtagtttggtaggctgtttggcacttttagaggaaaatatgatggaaaaatttggttcacatgcatttcacaaatatggcatataactttaatgattattttcacagatgttttgtttcattcttagaacatttacactggttacacatgcactaaaggactatattgtttagtttatccatgtgctaacagtcagaaaacaggataaagtttatggcatatcttcatataatttgtatgttgtttgataaatttacattttttgttactattatgctgtcttctattctcaattcataaaaacagatcactggggccaggtgtggtggctcatacctgcaatgccagcactttgggaggccaaggcaggtggatcaccggaggtcaggagttctagaccagcctggccaacatggtgaaaccccatctctactaaaaatacaaaaaattagccaggtgtggtggcgggcacctgtaattccagctacttgggaggctgaggcaggagaatcgcttgaaccctggtaaggcagaggttgcagtgagccaagatcgcaccattgcactccagcctgggcaacaagagcaaaactctgtctcaaaacaaaacaaacaaacaaacaaaaacaaacaaacaaacaaaaaaaccccagatcattggtttacaattggttctctggaatagacatatcaaagaatcaaacaccatgtctcagaagaactttgtaagcctaataaagaacactacagtgcgaaaatggaatgttaatctgtgtgtgctgggacaagtaaatttgagaatgaggacttcatacaacagacaaaaatgtaaagggcaaattgtatgcatgataatgaatatcagaaaaaaaatttgtagtggcctaagagtctaccgctaattttccatgtttttttttttgttgttgtttgtttgtttttgctgtgaaacttggttaaattgtaatatgaagctcttaggtcacttcctaacaaatcaaagtgatctctgtggtaaaccaattgaattttcctggaacaaatgcaacataatggtttccaatgtattatattgagtgatattgtcaatgaagttggagaagagaacaaaacagaaagttgttcaaatttgcactcctgccagccaagtgattacagttcacatggttactgaaacactttaaaaagatagctacgaagtcagtgacaagtagaagagaaagctgaatgaaatattggcaacattcctcttttggaagacactattagatctcaagcttcagtgtgcatcagaatcaatcacctgaacactgggtcccgcagtttctgattcagtaggtctgggttggagcccacaaatgtatactgatgatcagtttctagatgttgctgctgctggttcaagacaacactttgagttcctatcaaagacgcatgctagcaaacattttgcttgacaggtgagcatgctagcagatattttctttggacaaagtcattcttgtacaggatatgaaccaattgtctacttgtgccatgcatgagtgagtgaaatatgctcaatgacttctcattggaaaatccatgctaaagagaggaagattttttttctcacccagttaattacatcacctatgatataggctgggaagggaccttggcattggtagtgagggagcaccaaccacaagtgagcagacaagggcttcactctgtgactaaatatggttgcgttgaaatgtctgtccatactttattcacagaggatagttggtggtcataataagcctttgttcttgattcagagttgaggaaaatagagaaaaatgtgaatatgatctaaagctgggcatggtggctcatgcctgtaatcccagcactttgggaggttgaggtgggtggatcacctgagctcaggagttcgagaccagcctggccaacatggtgaaaccccgtctctacaaaaatataaaaattacctgggtatgatggtgggtgcctgtaatcccagctacttgggaggctgaggcaggagaattgcttgaacccaggaggcagaggttgcagtgagccaagatcacaccattgcactccagcctgagcaaaagagcgaggctctgcctctaaaaaaaaaaaaaaaaagaatgtgaactaagaatgacaactgaatgtacatattttgtgtactgtgcaaagaaatgggcagcaaatttaagatgatgttctccctgctgaaggctgctggttattgctgaggaagatgctcaagagttctggaatgaaagaggaattaaaaatatttatttacaacattaataatatcagtatggatcatttcagggatttcaagtagcttaattcaacagcatgctcactgttttctctagtttgaactagatgaaatgcggtacaaatagcttgatctctaatagtttagtcttttaaaacttgattacatcttttcttgatttgagaaataacttagcgatgtagcattgggcatgtttgaaaagtacacaaataagtcaaacatacaagactgattcacagagctccatttaactcagcagaggatctggatttcatttgctgcaatatcccaggttcaaacagtcagcacaccagccatttcctggaaatgttgttcaattagcatccaacagactgtgaaaagtagtgtgaaactcacttctcactttagtgagacgtttgttcataatttctagatctacatgtgagccaaatatctacagccatttgacagaaccaccaaacatacttgctgttattcctggcaacctctaactgagatttaggatcttttagttttgtgagaataaataatggaaaagaaatcaggatgctgacctacgccacaagcaagatcttggtgaaaaactgcaaatgcttatgcccctctcattgatttgaatctgtttacttaaattttttattttaaaatttgtgattaatctatttttggaaatgcattataattaatggtctccatgtactccaaatggcctttaagtggccacttacagactggtaataacgatgagcagtgctgaattttttcgtctttggcaatacggctccatggtggtgctacattagcaccaccatgtggagaaaaggaacaatagcactctttctatggttaaaatgggaacaatacatcctcttgaattttttttttttttttttttttttttttttttgagatggagtgtagctctgtcacccagctggagtgcagtgacacgatcttggctcactgtaacctctgcctcccaggttcaagcgattctcctgcctcaccctcccgagtagctggggctacaggtgtgcaccactgtgcccagctaatttttatatattttttttagtaaagacgaggtttcaccatgttggccaggttgatcctgaacttttggcctcaagtgatgcacaagtctcggcctcccaaagtgctgggattacaggtgagccaccgcctccagcctggaacatcattttcttatggaaagaaagtcttaattcagggtcttttctatggctctcatctagtttgctagatgagattacagcccaattactggcacagagctgagagtggagtgaactctattcacttattcctgtagaaatgaaaatcttactgcctcaaattgctcagaaaactctgagtgattagtctaaggatttttaaagttgttaacctgactcctggtcccatgacctagaggtttacaaatggcaagaaagtatacttttaattgaaagaagtttgttacttgaatttggagttacaaatctaaagtatgtcttgttaatattgtgtgtcttttagcatgagtaacttgaaaagttagagctcttataccttgaaattataccaattaaatatttgcttaagttaataaacattggacagtagctcacagctctgctagaagcatcatttatacgtcagtattaatcagtagagtaagatccattgtcttccagcatttcatgaagattgcttggaaagtgaggagtttaatgaggagtaagggaggcaaatgctttggaggcacaaagcactttggccaggacaggtctgagtgcagcatctctggtgtagggaggcgtggtcccaggtaccagaattagagcagtattgtagattttatagatcagctacattgtggattaaaccaatgttcatgggttagtttgcaaatttatttttattttttattctttttttttcacacaacacacagattgagaatttaatgtttaccatgttgctagtgacattgcttttttgggatgatgtattctgagtttttgtttttcttttctgagacagagtctccctctgttgctcaggctggagtgcagtagcaccgcctcggctcactgcaacctctgcctcctgtgttcaagagatctcccgtctcagcctccctagtagctgggactacaggcacgtgccaccatgcccagctaatttttgtgtttttagtagagacagggtttcaccatgttggccaggctgatcttgaactcctgacctcaactccgaccctgccttggcctctcaaagtgctgggattacaggtgtgagccacggtgcctggctgtgttctgagttttaaataacatcattacaaataagcttttatcacctaacccaattctgtgttggaaataagaaacatttattgtttgtacatgtgtcaggttctgatctaagtgctttaaatattaactcatttaatcattacaagaagatactgatgttatttggtattacagatgaagcagcggaggcacagaggttaaacttttgtcagaatcacagttggtaagatgtactactaggatttgaagccaggcagcatgactccagaggttatgacttctttttttttttttttttttttttgagacggcgtctccctctgttgcccagccttgagtgccgtagcacgatctcggctcactgcaacctccgcctcccaggttaaagtgattctcctgcctcagcctcctgagtagctgggattataggcgcctgccaccacgcctggctaatttttgtatttttagtagagacggggtttctggtcttgaactcctgacctcaggtgatccacccgtctcagcctcccaaagtgctgggattacaggcgtgagctaccgcgcccgacctgaggttatgactcttttttttttttttgagacggagtctcgctctgtcgcccaggctggagtgcagtggcgcgatctcggctcactgcaagctccgcttcccgggttcacgccattctcctgcctcagcctcccgagtagctgggactacaggcgcccgctaccacgcccggctaattttttgtatttttagtagagacggggtttcaccgtgttagccaggatggtctcgatctcctgacctcgtgatccgccctcctcggcctcccaaagtgctgggatgacaggcgtgagccaccgcgcccggccggttatgactcttaaccattgatccatgttgttgataacttccatgcacaggttttatagttttcaaagtactttcactatgttttctcatttattcctcaaaaatgatggtgaagtaattttcaggagctgtggaggaaaattaaggaatcaaatgaggctggagactctggagttggaaagatatttgtaactgattttgagagaatttttaaaatgaagtatacattattgtgatttagcattttaaaaaagcttactgttcaactactttttaagaaatttccaatttattctgttgcgggagatctgagtttttcaactgctttttcatgtaatgtatttctgaaaggtgatagaatggtcaaaccctctccttaagtataagaaatgttctgtggacattaactgatttttaatggatataattgagaaagatcataatgaagaaaatgtaacaatttacattttgaaaaatctcattctaaaattctattcttgtaacaatggcatcacaagctatccccaggattttagctcaataatattatagattcttgataaataaacacatattgactccagtcacaaaggattgcctcttcaagttgttaatcaaatattacatgtgactagtgagggacagagatgcattatcttcattttgtgtgcaaggtgatagatggaggaaaaaagattgacagtaactaagaggcaagcaggaggtttaaaaactgcgaagaccatgtcatttttcccaacaaacttttttctgattaagatattttagagtcaggaaataaaaggatgatagaatatgagcatggtggagttaggggagcaactctgccttgcagaactcacaggtgggtggataaacactcaaatgaggtgatagtttctcaaccagtttttgttgttgttgttgttgttttgagacggagtctcgctctgtcgcccaggctggagtgcagtggcgtgatcttggctcacagcaagctccacctcctgggttcatgccatcctcctgcctcagcctcccgagtagctgggactacaggcgtccaccaccatgcctggctaattttttgtatttttagtagagacggggtttcaccatgttagccaggatggtctcgatctcccgacttcgtgatccgcccgccttggcctcccaaagtgctgggattacaggcatcagccatcgcgcccggcctcaaccagtttttaatagctgtgctaaaacagagaattgcagagattcagttgcaaggccttatcacctcctggaggaagttatcaaataataagacagcattactgaggaatcatactggaaaaatagccttatgtccctacacatatatcctctaaatcagtggtccccaacctttttggcactgggaactggtttcatggaagacaatctttccatggaccagtggaggtgtgggtggttttggaatgattcaaacatattacatttattgtgcactttatttctattatcattacattgccatatataatgaaataattatacggctcaccataatgtagaatcagtgggagccctgagcttgttttcctgcaactggacagtcccatctgggggtgataggagacagtgacagatcatcaggcattagattctcataggagagtgcaacctagatccctcacatgggcagttcacaatatggcttgtgctcctatgagaatctaatgatgctgctaatctgacaggagacagagctcaggtggtaatgtgagtgatggggagcagctgtaaatacagatgaaacttggcttgctcgctggccccctgcttacctcctgttgtgtggcctggttgctaacaggccatggattggtaccagtctgtggcctggggattgggaacccttgatctaaatatgcttcttagtaacatcagaagtgaaagagttctgaaaagatctgtaaaagcattaacaagttaaaaaagaaaactttaccaagctctcatatagaagctgttactagccaagaaagaataaaagagtaaggtaaattgtaatcagagtaactgatgtagttgttaacatgctatgagaatacagaaaaacaaaaacattcttcaagaacagtaatcgtggaggactttaaagttctaataaatttaagaaatactttactgaattcaattgcaggactccctgagataataaaataactttgctttgttgttttgatatctaagaacattttggttagattcctcacaagtggtggcaatgaagtcaacagttgaaggaaatacaatgttatcacgactttcatggctttattgaaaagcaaggtgaatttgtcacttgattaatcctgttgcaaagaccatctcaaatgtataaaggatgacttcgacaagaagtctgatttctcaagattatgtgaaaaacagctatacagttttgaagcaatgctttgtgagttatttaaaaattacacctgtaccacaggtctttggataacaaaacaaatgtatacttaagatttgatgggctgggtgcggtggctcatgcctgtaatcccagcactttgggaggccgaggcgggtggatcacgaggtcaggagatcgagaccatcctgtctaacatggtgaaacaccgtctgtactaaaaatacaaaaaattaaacgggcgtggtggcagccgcctgtaatcccagctacttgggaggctgaggcaggagaatggcgtgagcccgggaggcggagcttgcagtgagccaggatggcgccactgcactccaggctgggcaacagagtgagactgtctcaaaaaaaaaaaaaaaaagatttgttgctcttgagcaacttgatgctgtaaaattcagaatgtcttcaagtgtatggtccagaaatatagtctggagttggtaagtggcaaagcctttgataaacatggccagtgacctctgaatactccccaaagccagcgttttcttcttgtacagtgcataagatttatttattttgaaaatcctcatactagtttggaaccagtagaacctatggttaaactggctgcattggaattagctgtggacccaaatcctaactctgctactttctagcattgtgaattgggcaagttcctttcatctttctcagccttagtttaatcatttgtgaaatgggaatattgtgtacctgaatacagtagtggttatatttagtgaatcatgtatgtaagacacatagtattgggtagctcaagaaataattttagttattttttccttcaatcttaaatgactcatatatatcagctagtttcaattcaggcaaaccagaacactctgaagagcatatacaagaaatccctgaagcaaaaaagggggaaaagctaaaaaaaaaaaaaaaaaaaaggttatagtccaggaaactcatttaataaaatagcatgttgcaaaatttgaatttacccagtttttttcttctagttagtagttttggaaatcagtattctttgaactaaacactgagaagacatttcctattttgttttacaagacatagtatagtatatgaggacctgtataagaaaacaggaagagcctacttgcttctctgtcatttattagctgaataacattgatcagaccgcttaacttttctgggccttcttgccacaggcctgctttaagagtttttttctaacctaaagattacaccaaaaaacatttagaactgatcaacgaattcagtaaagttttaggatacaaaatcaacatacaaaaatcattagcatttatatacaccaacagggaacaatctgaaaaagaaatcaagaaagcaatctcatttacaatagctgcaaagaatataaaatacctagaaatcaatttaaccaaagaagtgaagcatctatacaaggaaaactataaaacacaggtgagagaaattgaagaggacaccaaaaatggaaaaatattccatacttttggactggaataattaatattgttaaaatgataacacttcccaaagcaatttactgactcaatgcaatccctatcaaaataccaataatattcttcacaaatatcgaaaaaaatcctaaaatttatatggaaccacaaaagaccctcaataactgacaaaatcctgaggaaaaaagcccaaagctggagacctcacactgacttcaaagtttactacaaagctataggaaccaaatcagcatggtactggcataaaacagacacataggccaatggaacagaacagagaacccagatataaatccatgcatttacagacaactcatcttggacaaaagtaccaagaacagaggggaaaggacattctcttcaataaatgatgctgggaaaactacatagccacatgcagaacaatgtaactagacccctatctctcaccatatataaaaatcaactcaaaatgaattaaaacttaaatatcggacttgaaactatgaaactactagaagaaaacatttgggaaacactccaggtcattcgtctggacaaaaactttttgtgtaagaccacaaaacacaggcaaccaacacaagaatagaaatatgggatttatatcaagctaaaaagcttctacacagcaaaggaaacaacaaaatgaagagataacccatagaatgggataaaatatttgcaaactacccatctgatcagggattaataacgagaatatataaggggctcaaataactcaatagcaaaaacaaataatctgttttaaaaataggcaaaagatctgaatagacatttctcaaaagatctgcaaatggcaaacaggtgtatgaaaaaatgctcaatatcactactcagagaaaggcaaatcaaaactgcaatgagataacttctcatccagttaacatgacttttatccaaaatataggcagtaattccccccccctcaaaaaaaaaaaaaccacacctaaatacaggcaatagtggatgctggtgaggatgcagagaaaggtgaacccgtacattgttggtgggaaagtaaattagcataagcactgtggagaaaagtatggatgttcttaaaaaaaaaaactaaaaatagaactaccatatgatccagcaactccactaatatatatgtgtgtatatatacatacacatacatgtgtgtatgtatacacacatacatatgtgtgtacgtatatatgtatgtgtatgtatacatacacatacatatatacactatatatacatatgtgtatgtgtgtatatatacacacatatatgtgtatatatgtatatgtacacacacatatgtgtatatatgtacatgtacacacacatatatatgcgtatatatgtacatgtacacacatatatgcgtatatatgtacatgtacacacatacgcacatatatgcgtatgtgtgtacatgtacatacatatatgtgtgtatatacatacacacacatatgtgtatatatgtatacacacacatatatgtatatatgtatatacacacatatatgtgtacacacatatatgtatatatacacacatgtgtgtatatatgtatacatacacacatatgtgtgtatatatgtatatgtacacacatacacatatatatgtgtatatatatgtgtatatatattagtggaagttttcttaaaagttttatgtaagttttcttaggagagagatatatatatatcccaaaagatatatagagatgtatatcagatatatcaaaagggtatttgctctctgtactcccatgtttattgcagcactatccacaagagataagatatgcaatcaatctacccatcaatggatgaatggataaataaaatatggtttatatatacaatggaatgttattccaccataaaaagaatgaaatcccatcatttgcagcagcttggatggaactggagatcattatgttatgtgaaatagccaaacacagaaagacaaatgttgcatgttcttactcatatgtgggagctacaaaggtggatctcatgaagatagagagtagattggagaataccagaggccaggaagggtaggagggagtggaggatgaagagagattgattaataggtacaaacatatggtttgatagaagaaataagatgtagtgttagaaggatcagtagggtgactatagtttacaacaatctattgtatatcttgaaatagctaggagggaaaaattccaatcgttctagtataaagaaaagacaaatatttaagattatggcaatcccaagtatacttatctttacacattatatcagtgtattaaatgatcatatttactctgaaactatattatgcataaataaaaaataaaattttcttacagatacaattgaagtcccttttaaaattccttgctgattccattctccttcctacctcctcagagggaaccacactatatctacttcctatagcagatgttgttggttgcctagacaatattcatgcctttatttatagaatctcaattttctttagctatctactctgcttctagaggacatgctacttaagagaggcaggtgccagccaccagcccaggaagactgattggtttaagccagtgatggtggtgtaccattcctcttgccagagtttggtttaggcattggcatgtgatacagttttgaccaatgagacacgagggaaagtcttccagggacttgtgggaaagatttcctctctcctgagggaggcacacagaggaagagtcctttcttccttggaacttcggtgtgttgagatgtgatgcctggaatgttttaacttctggggtcatgaagggagtcagattgtggagaaagctgacatgtggaggatggcagaacagaaggatgatatgaatctaggctctttgtttctaccgtttggcaaccgaattaacactggaaactctctagttctgtgttcattatgcattacaataaattcctacttgtgattcatgccaatttgagccacaattttcggttacttttagctaaaagcagtcaaaattatatatttctagtccaagaagttgtacttttactacatagatgtttttataatgatgtgtaattgttgtcttcacacaaatgatcttgtatcatacaagttggttttttaattcaatgtttaatttttgccatgttgatacagtttaagcattgtataattcattgtataaaaatatcactattcatgcgcttattgatggacgtttaggtaaattttttccctattacaaatagttctgcaatatctattccattagacgatgccacgtgcacatatgtgagagcttctctagggctgcactatccagtgtgatagccactggtcacatgtagctatttaagttaaaattaaaagttcaggttttttggccaggtgtggtggctcatgcctgttatcccagcactttgggagtggaggcagacagatcacttgaggtcaggagtttgagaccagcctggccaacatgataaaattagctgggagtggtggcctgttcctgtagtcccagctacttgggaggctgagggacgagaatcgcttgaacttgggaggcagaggttgcaatgagccaatatcacaccattacactccagcctgggcaacaaagtgagactccatctctaaaaaacaaaacaaaacaaaaacaaaaacaaaaaagtcgcatttttggttgcattagccacattttaagtgctcaatagctacatgtggctagtagttattgtactggatgatatacatatggaaagttcctgtcactgtgggaagttctattggatagtgctgctccagcacagggtttctgaatatttttcataggatggcacctgcagaaaatgataatatttgtacagctcactgggataaatagataaggctgctcaagtttggaggagactggttcagggactctggctgccctaagaccttctcagttgccctaaggactgagggattgctgatgtctcatgtatccctgtaactcacttcctgcccatcaacatgccttggctctgctttagatgtatacccaggagtgctgttgctgggtcatagtgcatgcatgtttcaattttatcagatattaccgtcttattttccaaagtagttattaacagtttatacttacataagcagtaagtgcaagttcctcttttcttctccttggcaatacttaatattgggagatttctatatttttgccaatctgatgggtgtgagttaatataccattattttaacttgcatttcccttattttgggtgaggttgaacattttttcacaaatgtaatttcttagaatttcccgtgcatatccttagtctgttttgtattatcttgtttattactttaattcatttgaggaattattttttcggatgctaacccgtttgcaagttatatgaaatgccatgtatttcggcctgtcgctcatcttttaactttgcttatgatatatgttgtggcaccaaagttttaaactttaacattgtcaagattatcaaacttattctctgtggtttgagcttttatagctatattaagaaatcctttcttattccaatgtcaaaaagataagactgttgtatgttcttctaaaagttttcaagttttacttttcacttagaggaatttaaacggctttcataccaataatcaagttttaaattcttaaaactaggctgggtgcagcagctcacacctgtagtcccagcactttggaggccaaggcgggtgggtagcttgagctcaggagttcgaaaccagcctgggcaacatggtaaaaccctgtctctacaaaaaaatacaataattagccaggtgtggtggtgtgcgcctgtggtcccagctacttggaaagctgaggtaggaggatcgatgcctgggaagtcgcctgggaactgagatcgtgccactgcactccagcctgggtgatagagactctgtctcaaaacaaaaaaccctccaaaaacttaaacgaaaaaagatttaattctgtctctgtcttccagaatcccctacttatatctttttataaattttttacagtaaatcagtatgtattgccaaaatatatatatggtcctttaaaaaatgaaaattgattttttttgagacagtctaactctattgcccaggctggagtgcggtggcacaatattggctcactgcaacctctgcctcccaggttcaagtgattcttgagcctcagcctccccagtagctgggattacaggtgtatgccaccattcctggctaatttttgtattttttgtagagatggggtttccgcatgttggccaggctggtcttaaactcctgacctcaggtgatctgcccacctgagcctcccagagtgctgggaggtgtgagccactgcgcccagccaaaaattgatattttgaagagtctaaaatttccagttttgcatatctactggaaatgcagtgtgagtattttattgtctttttaactttttaatgtactctggggtggtaaaatgtttgtcatcttgtatatttgtattctatcgattctctaatttgaattatcaagagcaaaggtcactctcctttccctccacatgttgttacctcagttgtctctgtcttccagaatcccctactttgaaactagtgctgccaatgggacaaacataagccaagcaattgagatgcttctggacctgataatgaagcgaatggaacggtgtgtggacaagtcctggattcctgaaggagtggtgcgatcaaatggtcatgcctctacggatcagttaagtgaagaaaaggagaaaggggcatgtggctgttgagaagtcaagtaagcgacatagtagttcaggtggcccatgcctgggatcttctctatgattgatacatggcacagtgagagattaatgggcattgtgtacaaattgcttctcaccatccccattagacctacgaataaagcatccggttctaaaattaatttgttgcagctttgtaaatatttctttaagattcagcctgagagttaggagaaatatttcagagccaaaagtgccttatacaaccttagcctattatagtaaatcattcaaggattcagaattttgcagtcacagaagagtgtatttattatgtagaatgaatgagggtactgtcacctgccttaatgtaggtaggcccagagtcttacatttaagatcttacatgcagttataaaaccgccacagtcttcaatccagatttgaagactcatgccataggtgacattctaaaataccattaaagccacttaaatgttaaataagaatatacatgcacatcagctcaatgtctttgagtattaattttatgtaagcattctatttaacatgaatataggacaaatcatggctatatctatagaccttggataaactggattgaccaattatacactcacggtgacttttttattggtgggaaggggattggggtggggcaggctggcttaatgtaatatgagcaaccaaagtgggacttctgtctccccgctatattcccattgctctgaatggttgattgaagggtcagggaactagattttatggctttagttcactgtgattgtacatttatacttggcctatgtgctggccgcacctgaacatagctggtgcttatgccgagttatttgcgatgagtaaatatttagtttctttttcttcatatttataatgttgatctggcatcctcaggctgcagctttattagcttataacttactcatctctatctttaccagcaggctctgtattgttgatatttgcaacttgttttgcttttccattggtggaattgaaataattagtttttaattacataagatgcctgtttgctatttggtggaagatagatgttcatattgaagcagtcacatttgtactgtagttcaataaaagaaaaatgaagtattctgtagcctatatttttcatagagctcatgagcatttactgtacttgctgggtcttgccaagatcatttattccgctgcattgccaaagtgtcttcataccaaattaaaggtggttttaatatatgtttcatggaagttgtttataaaattcaaaggtatttcatttaggtgaaaagtcttatttattaaagtggtttgaataaagtagatcaaaacttccagagatcttaatggctatataggaagaaatatcactcaccataatttaaataaagaataaaaatacttgtattttgtggtggcaaatgtttggtagaactgtaattagaaaaatacaagtatatttgcgtgatggttacactagaagcccagactttacgactacacaatatattcatgtatctaaactgtacttgtaccccctaaatttatttttaaaaaaggaaaaataaaagtatcatgaaaaaacctatttttttttccactgtccttccactactcccataacaaacttatccatggttggtaaaattttacatatttctatccttgaaatgaaggcttcttttaaattccaaagaagtcatggaggcctgtgcatttgaattgtatatgctagtgaggaaaagatttagacatttcaagagcagggttggccaggcgcggtggctcacacctgtaatcccagcactttgggaggccgaggagggcggatcacgaggtcaggagatcgagaccatcctggctaacacagtgaaaccccatctctactaaaaaaaaaaaaaaaaaaaaaatgggctgggcgtggtggtgggcacctgtagtcccagctactcaggaggctgaggcaggagaatggcgtgaacctgggaggcggagcttgcagtgagccgagattgcgccactgcactccagcctgggcgacagaggagactctgtctcaaaaaaaaaaaaaaaaaaaaagagcagggtcataatcacacagcagtgccttatatagttgccataagacttcagtgcagtacaacataattttacagctacatatcagggcatattctatatggtgtatttgtgttagaataacacattaaatgtctttaaacataaaaataagaatgtttgcatgtttcagttttcaagaaccaaatgagtaattagctatagattccactggccttaaacatacaattaagtgtatacatgatatagtgcacacacaaaagccacctttaattattgaaataacctgtattctttttggaaatcatttaagtttggtattgaagtactatattttttgtgcatcaatgtatttttctatttacaagcctatgtaaaagtgaagtgtatcttcagtgaaccatgtgccaattaagctgtaataaaaaagtggtctagtctgtcaaa

SEQ ID NO: 23757 - DNA, 2695 bp, Homo Sapiens
  misc_feature (1217)..(1217): n is a, c, g, or t
agcgggggggggctcccgggcgccgtggaatgcacacgtcccgcacccggaccttccggtcagcttcccggctcgctgtctgatgcccgcggtagccaatgagctagtggtgtttgtcctgctccgtccccgccctccaggggaaccaatggggggggcaggagaggcaggacgcgcaaaggcccgaaagaggagctgggcggggtggggggaaggcggaggcagtctagtaatgtaaagctccgctgagagggagagtgctgaagaaggggacagcctctgtacctgcggcgcggcccgaggggcggacgcgagcggactgacgcgctggaggctgtttatagcgctgtcaggacagcgcggggagtggaggcagaggcctgagagctccccggattatggtgcactgagaaggcatctggaagcctgggccctcatggcatccaacgataaaggcatggcaccctcgctgggctctccctgggcctcccagatggggccctgggatgccatcctcaaggctgtcaaagaccagctcccgtctctggactcagactcccctttgtcggactatggggaagaggagctgttcatcttccagcgaaaccaaacctccctgattccagacctgtcggaggagctggctgaagatcctgccgatggcgacaagtccagggcctgggtcgctgcagctgaagagtcccttcccgagccagttctggtgcctgcagaattggccacagaacctgggtgcagacagaacacaaggacaaaggatgcatcctctcaggaaggaagagaccctggcaggccttttgaaagctctggtgaagtcagcgctcttcttgggatggccgaggagccccccaggtggctggaaggcgaccttggaagcctgtctttcaacaccaaaggatcccagggtcctccctgggacccacaggccgaagccactctctcctgccatgaaggagacccaaaggcagagcccctcagcactgcctcacaagaatctgtgaaccgccgggccctccgacaggagagaaggaagatgatagagacggacatcctccagaaagtcacccgggatgcctgcggvccgaccagcagtgacaaaggtggggtgaaggaggcgccctgccacgctgcggagtcagctcccagatccaaaatgcccctcgtggagcctccggagggaccaccagtgctctcgctcnagcaacttgaagcgtgggatttggatgacatccttcagagtctggcgggacaagaagacaaccagggaaatcgtgcacctggaactgtgtggtgggcagctgaccaccgccaagttcaagactgcatggtgccgagcgcccacaacaggctcatggaacagctggccctcctgtgcaccacgcagtccaaggcctctgcttgtgcccggaaggtgcctgccgacactccccaggacaccaaagaggcagattcaggaagcagatgtgcctcaaggaagcggggctcccaggctgggccaggcccacagctggcccagggcatgaggcttaacgcagagtcccccaccatctttattgacctgcggcagatggagctaccagaccacctgtccccagaaagctccagccacagctcctctgacagtgaggaggaggaggaggaagagatggcagctctgggagacgcagagggggcatctccttcctccctggggctacggacctgtaccgggaaaagccagcttctccagcagctcagggcctttcagaaggggacagcccagcccgagctgcctgccagcaaggggcccgcgggtgggagggctcaggcccctgaagacacagctggatcacgaactgggaggaagcaacacatgaagctctgtgccaaggggcagagcgcccaggctcgactcccaagaggcaggcccagagccctgggggatgttcctgagccaggggcagccagggaggccctgatgcctcctctggagcaactatagctgcctcaggatgtgtcctgctgtttgccccgtgggaagagcagagaaatcatcaccaccttgggccccacggtgccacgggctcaggcagcacagtagggcgccgggcctttgggacagtgtcccagcttcccctggggttcacccctggctgccaggccactgaggatgggcaggggtctcttctcatcaagccttgtaccaggcaaaagacaggccctgcttggccgtggtcactggccgccaagatcagggctacagatgtctgctctctggaccccacgtgatctggccactggggacccccacccgaccccactcccaatgatgaggggcattttcattgcaagtcaaaggcaagacaggcttccataaagtcccaggaggtccctcctgtagggcacaaggccaggctgcctcccagcccccaggccctctcccacctacagagaccctcccctgccccctccactccggggcctgtgccgccagaaccgggctctgcccccatacgctgccctcgcagcctggcggcctccgctgtggctgcctagctgtcaagagcaaaggctttttttttcttcaaccccattttcttccatttctcccacctttttaatgccagtaacctcactgagaatgttttacagtgatggaaaataaactctgttccaagttcaaaaaaaaaaaaaaaaa

SEQ ID NO: 23758 - DNA, 1909 bp, Homo Sapiens
caccccctagtacttccgttctccagcgcttgggcaccgcggccggagctgtgggctggcagccatgggtgccaggcagtgctgagagcagtggggcatggctgcagccctgcaggtcctgccccgcttggcccgagcccccttgcatccactcctctggcggggctcagtggcccgtctggccagcagcatggccttggcagagcaggccaggcagctgtttgagagtgctgtaggtgcagtgctgccgggccccatgctgcaccgggcactatccttggaccctggtggcagacagctgaaggtgcgggaccggaactttcagctgaggcaaaacctctacctggtgggctttggcaaggctgtgctgggtatggcagctgcagctgaggaactactgggccagcatcttgtgcagggcgtgatcagcgttcccaaggggatccgtgctgccatggagcgtgccggcaagcaggagatgctgctgaagccacatagccgtgtccaggtattcgagggtgcggaggacaacctcccggaccgcgatgcgctgcgggctgcactggccatccagcaactggctgagggactcacagctgatgacctgctgctcgtgctgatctcaggtgggggttcagctctgctgcctgcccccatcccacctgtcacactggaggagaagcagacactcactagactgctggcagcccgtggagccaccatccaggagttgaacaccattcggaaggccctgtcccagctcaagggtggggggctggctcaggccgcctaccctgcccaggtggtgagcctcatcctgtcagatgtggtgggggaccctgtggaggtgattgccagtggccccaccgtggccagttcccacaatgtgcaagattgcctgcatatcctcaatcgctacggcctccgtgcagccctgccacgttctgtgaagactgtgctgtctcgggccgactctgacccccatgggccacacacctgtggccatgtcctgaatgtgatcattggctctaatgtgctggcgctagctgaggcccagcggcaggccgaggcactgggctaccaggctgtggtgctgagtgcagccatgcaaggtgatgtaaaaagtatggcccagttctacgggctgctggcccatgtggctagaacccgcctcaccccatccatggctggggcttctgtggaggaagatgcacagctccatgagctggcagctgagcttcagatcccagacctgcagctggaggaggctctggagaccatggcatggggaaggggcccagtctgcctgctggctggtggcgagcccacagtacagctgcagggctcgggcaggggtggccggaaccaggaactggccctgcgtgttggagcagagttgagaaggtggccgctggggccgatagatgtgctgtttttgagcggtggcaccgatgggcaggatgggcccacagaggctgctggggcctgggtcacacctgagcttgccagccaggctgcagctgagggcctggacatagccaccttcctagcccacaatgactcacataccttcttctgctgcctccagggtggggcacacctgctgcacacagggatgacaggtaccaatgtcatggacacccacctcttgttcctgcggcctcggtgatggcataggtcacattttgggagttcagaggaggcctacaagggcaaggtcagatggcagagcaagccagactggcagatgggggcttccccctacccctgaggatgaggacaagcccctcggccagttcagcgttcccgtgcttctcccttgggcagcctctctcttgagcccctcaccctgtttctttctgtgaagcgagaatgtctgaaaataaataggaccatgccatgggttaaa

SEQ ID NO: 23759 - DNA, 6192 bp, Homo Sapiens
gaattccagcggcgccgccagagtctgaacaagagctggggtggagggggcggggacctggggagcccggcgggtcgctatcgcggggggtactagtggcgccgccgccacagacaccaacgctgtcgccacctctgtagccatgatggacttggtgttggaagaggacgtcaccgtccctgggacgctcagcggctgcagtggccttgttcccagtgtaccagatgacctggatggcatcaaccccaatgctgggttgggaaatggtgtgctcccaaatgtgtcagaagaaacagtgtctcccaccagagcacggaacatgaaggactttgaaaatcaaatcactgaattgaagaaagaaaactttaacctaaagctccgcatctatttccttgaggaaagaatgcaacaggaatttcatggccccactgaacatatctacaaaactaacattgagctcaaggtggaagtagaaagtctgaagcgggaactccaggagagagagcagctgctcatcaaagcctccaaagcagttgagagcttagctgaagcaggtggctctgaaatccagcgggtgaaagaagatgctcgaaagaaggtgcagcaggtggaagatctcctaactaaaagaatactccttttggaaaaggatgtgacagccgcccaggcagaactggaaaaggcctttgcagggacagagacggagaaggctcttcggttgcgtttggaaagcaagctttcagagatgaagaagatgcacgagggggacttggcgatggctctggtcctggatgagaaagacagactgattgaggagttgaagctgtctttgaagagcaaagaagctttaattcagtgccttaaagaggagaaatctcagatggcatgtcctgatgagaatgtgtcatctggagagctccgaggactttgtgctgctccaagggaagaaaaggagagagaaactgaggctgcacaaatggagcatcagaaggagagaaacagctttgaagagaggatccaggcacttgaagaggacctgagagagaaggaaagagaaattgctacagagaagaaaaatagtctaaagagggataaagccattcagggtttaaccatggcattaaaatcaaaggaaaaaaaggttgaagaacttaactctgaaattgaaaagctcagtgctgcctttgctaaagccagagaggccctacagaaagcacagacccaggaatttcaggggtctgaagactatgagactgctctatcaggaaaggaagccctttcggctgcgctgcgctcacaaaacctcaccaagagtacagagaaccacagactgcgtagaagcattaagaagatcacccaggagctgagtgacttgcagcaggagagggagagactggagaaggacctggaggaagcccatcgagagaagagcaaaggagactgcaccatccgtgatcttagaaatgaagttgaaaaattacgcaatgaagtgaatgaaagagagaaagcaatggaaaatcgttacaagagtcttctgagtgaaagcaataaaaaattgcacaatcaagagcaagtgatcaaacatctaacagaaagtaccaatcagaaggacgtgttgcttcagaaattcaatgaaaaagatttggaagtaatacagcagaactgctatttaatggctgcagaggatcttgagctcaggagtgaaggcttaataacagaaaagtgctcttctcaacagccaccaggcagcaaaaccatcttctctaaggaaaagaaacaatcatcagactatgaagagctgattcaggtcttaaagaaagagcaggacatctatacccatctggtcaaatctctgcaggaatcagacagtatcaacaacctgcaggctgagttaaacaagatttttgccctgcggaagcaactggagcaggatgtgctttcatatcagaatttgcggaagaccttggaggagcagatcagcgaaattcggaggcgggaagaagaatcattttcactttatagtgatcaaacatcttatctaagtatttgccttgaagaaaacaatcggtttcaagtggaacatttttctcaagaagaacttaagaaaaaggtcagtgaccttatacagctagtgaaggagctgtatacagacaaccagcacctgaagaaaaccatttttgatctctcctgcatgggtttccagggaaatgggtttccagatagacttgcgtctacagaacaaacagagcttctggctagcaaggaggacgaggacacgatcaaaattggggaggatgacgagattaatttcctgagtgaccagcatttgcagcagagtaatgagattatgaaagacctttccaaaggaggctgcaaaaatggatacttaaggcacacggagtctaagatttcagattgtgatggggcccacgcacctggctgcctagaagaaggtgcattcataaacctgcttgcccctttgttcaatgagaaggccacattattactggaatccaggccagaccttctgaaagtggtacgggaactgcttctgggacaactattcttgacagagcaggaagtttctggagaacaccttgatggtaaaactgagaagacacctaagcaaaaaggtgaacttgtacattttgtccaaaccaactcattttccaagccacatgatgaactgaagttgtcttgtgaggcccagctagtaaaggcaggcgaagtgcccaaggtaggactgaaagatgcctcagtgcagactgtggccacggagggcgacctgctgagattcaagcatgaagcaacaagagaggcttgggaagagaaaccgatcaacactgcactcagcgcagagcatcggccagagaacctgcacggggtgcctgggtggcaggctgccctcctttccctccctggtattaccaacagagaggctaagaagtcccgcttgccaatcctaataaaaccatcccggtcattaggaaatatgtatcgtctccctgccacccaggaggtggtgacgcagctgcagagccagatcttggagctgcagggggagctgaaggagtttaaaacttgtaataagcaacttcaccaaaagttaattctggctgaagcagtgatggaggggaggccaacgcccgacaaaacgttgctgaatgctcagccccctgtgggagcagcctaccaggacagcccaggagagcagaaaggaattaaaaccacatcttctgtctggagagacaaggaaatggacagtgatcagcaaagaagctacgagattgactctgagatttgcccacctgatgaccttgccagcttgccatcatgcaaagaaaatcctgaagatgttctgagcccaacttcagtagctacttacctgagttccaagagtcagccttctgctaaagtcagtgtgatggggactgatcagtcagagagcattaatacctcaaatgagacagaatacttaaaacagaaaatccatgacttggaaactgagctggaaggctaccagaatttcatatttcagcttcaaaagcactcccagtgcagtgaggccataattacagttttgtgtgggacagaaggggcccaggatggcttgagcaagcccaagaatggttctgatggggaagaaatgaccttttcaagtttgcaccaagtgcgatacgtgaaacacgtgaaaatcctcggtccgctggccccagagatgattgacagcagggtgctggagaacctcaaacagcagctggaggaacaggaatacaagctgcagaaggagcagaatttgaacatgcaacttttcagtgagatccataatctgcagaataagttcagagatctctcacctcccagatacgattcattagttcagtcccaagccagggagctctcccttcaacggcagcagattaaggatggccatggcatctgtgtcatctcccgtcaacacatgaacaccatgattaaggcatttgaggagttgctgcaggccagtgatgtggattactgtgtggccgagggtttccaggaacagctgaatcaatgtgctgagctgctggagaaattggaaaagctatttctcaacggaaaatcagttggagtggaaatgaacacccagaatgaactgatggagaggattgaggaagacaacttaacctaccaacatcttctgcctgaatctcctgagccttcagcctctcatgcgctctctgattatgaaacatctgaaaagtccttcttctcacgagaccagaagcaagataatgagacagagaagacttcagttatggtgaacagtttttctcaagacttactaatggaacacatacaggaaattcgaactttgagaaagcgtttagaagaatctattaaaacaaatgagaagctacggaaacagttggaacggcaaggatctgaatttgttcaaggttctacaagcatttttgcttctggttcagagcttcatagttctctaacatcagaaattcatttcttgaggaagcagaaccaggccctcaatgcaatgctcattaaaggatccagagataaacagaaggagaatgacaaattacgagagtccctctccaggaagaccgtgagcctggagcaccttcagcgggagtatgccagcgtgaaggaagaaaatgaaaggctgcagaaagaaggcagcgagaaggagagacacaaccagcagctgatccaggaggtccgctgcagcggccaggagctgagcagggtgcaggaggaggtgaagttgaggcagcagctgctctcacagaatgacaagctattgcagtctctccgagtggagctgaaggcgtatgagaagctggatgaagagcacaggagactgagagaggcgtcgggagaaggctggaaggggcaggatcctttcagggacctgcacagcctcctgatggagatccaggctctgcgcttgcaactagaaaggagcatcgaaaccagcagcactctgcagagcaggctcaaggaacagctggcaaggggggcagagaaggcacaggaaggagccctcactctggctgtccaagccgtgtccatccctgaggtgccccttcagcctgacaaacacgatggtgacaaatatcccatggaaagtgataattcatttgatctgtttgattcctcccaggcagtgacaccaaaatcagtttcagagactcctccactctctgggaatgacacggactccctctcctgcgacagtggcagttcggcaactagcactccgtgtgtgtcccgcctggtcactggccaccacctgtgggccagcaagaatggccgccatgtcctgggcctgattgaggactatgaggccctgctcaaacagatcagccagggacagaggctccttgctgaaatggacattcaaacccaagaggctcccagctccacaagtcaagagctgggaacaaagggtccacacccagcaccactgagcaagtttgtgagcagtgtgagcacggccaagctgaccctggaagaggcctacaggcggctgaagcttctctggagagtctcactccccgaggatggccagtgcccccttcactgtgagcagattggagaaatgaaggcagaggtcaccaaactacataaaaaattgtttgaacaagaaaagaagttgcaaaacaccatgaagcttttgcagctgagcaagcgccaggaaaaagtcatctttgatcaattggtcgtaacccacaaaatccttcggaaggccagaggaaacctggagcttaggcctgggggagcccatccaggaacatgcagtcccagcagaccaggctcctgagaagaactttcagccaataaagcttgtgcttcccccaccgagctcacgctgtctctttgttccaagtgtggttcctatttattgaggaagaaagagctgtctggccaaaggaaatctattttttcccttcatgttttctctctgaaagttggcttgagagttgttgtcagaaaggtgcaggtgctccacaaacgggtggtaaaaaggcctcgagctcttggatgttgtatttcagatcaggggcaggcaccggagttgaggctgtgcgccttggtgggcttcacgtcttcccctggatttgcttagtactcagccagtgccacagtttgaagattctcattaaatgattcatttcatttcaccttgaa

SEQ ID NO: 23760 - DNA, 1057 bp, Homo Sapiens
ggaaggtgagaaacctacagtctcaaattcttgtagtcttaaactctttagcttcgaggcactctgattcattctcctaacaaatcacttcatgttttaggtgttttccaaactgtttgaagttactagacgtcgaatggttcaccgtgctctttcatcagcacagcgacagagactgtcatccaacaataacaagaagaaaaattagacagtatttttaacctttttctctatctgaagtgttcacacttacacatgtaggacaataagcaggaccgtctgggccggtctgcataaatgctgtatacataccagatttgatgctgcatatagggtatggaattgcacatccatctcataggaattgtaaatggtttgaataagaggaaagtaatttttgttgcattataaaatgtctagtagcatcataagtttttttgagagaagcatctttttatttcccatattcctggttattttcatcattgctttgaattgaatttttatatctatttttatatgtaactctttttttacctcatgtttttgtttgttttgcacatttctcataccacaggtattgaagcccctgggtgataatttgatggaggaaaacataaggcagtctgtaacaaactctatcaaagcaggcctgactgaccaggtgtctcatcatgccagattaaagacagactgacagttcatctcctcacggactccactctctttttttttcatgcttgctgtacaatgagaactcaaataaaaataaaccaaagtttacaatcaactgtagaagtagtttagtgtaactggcttcacagatggctgccacagagtgtgaagattgtttgttagttttaagcattcttttaatggctcctaagacatgcagatggactgaggagcattggttaatcatgcacctttgtgccatgtttaactcttttatttctttttacttaatctaatgttagtgaatttgtcttatgtaaaaggatatttcagggaaatattttcagaaatctatttagagtctctttaacacagtgtccca

SEQ ID NO: 23761 - DNA, 3171 bp, Homo Sapiens
cacgaggccagtgtctgcctctctgcccccacgggggtttatttgatctcacattaaccaaggaggagaatgtgagaaaagggggaaaatgcccaggaggaagcaggagcagcccaagcgccttccctcaccctcagaagaggaaagtggaaagcctttccagtgtccaatatgtggtttggttattaaaaggaagagttactggaagcggcacatggtgattcacacaggtttaaaaagtcatcagtgtccgctctgtccattccggtgtgctcgcaaggacaatctcaaatcccacatgaaggttcatcagcaccaggatcggggagagacctttcagtgccagctgtgcccttttacttcctcacgccacttcagcctgaaactccacatgcgttgccatcagcacttcctgaggacagaagccaaggtgaaggaggagatcccagacccagatgtcaagggatctccccacctcagtgacagtgcctgcctggggcagcaaagggaaggaggagggacagagctagtggggaccatgatgacgtctaacactccagagaggactagccagggaggggctggcgtctcgcctttgctggtgaaggaggaacccaaggaagataacggcctgcccacctcctttactttgaatgctgccgacaggcccgccaaccacacaaagctgaaagacccctccgagtatgtggccaacagtgcgtcagcattgttcagccaggacatctctgttaagatggcgtctgattttctcatgaagctgtcagctgcaaatcagaaggagcccatgaatcttaattttaaagtgaaagaggagcctaaggaaggggagtccctaagcacgactttgcctcggtccagctatgtgttcagcccggaatctgaagtgtcagccccaggcgtctctgaggacgcactaaagccccaggaagggaagggaagtgtgctaaggcgggatgtgtcagtcaaagcagcctctgaacttctcatgaaactctcagcggaaagctacaaggaaacacagatggtgaagattaaagaggaacccatggaggttgacatccaggactcccatgtctcgatatcacccagccggaatgttggctacagcactttaatcgggcgagagaaaaccgaacccttacagaagatgccagagggcagagtacccccagagagaaacctcttcagtcaggatatctctgtgaaaatggcttccgagctcctctttcaactgtcagaaaaagtgagcaaagagcacaatcatacaaaagaaaacaccatccggaccacgaccagccctttcttttcagaagacacatttagacaatcaccattcacctccaattcaaaagaactgctgcccagtgactccgtgctgcacggaagaatatcagctccagaaacagaaaagatagtcctagaggcaggaaatggattaccatcctggaaattcaatgaccagctttttccctgtgacgtgtgtgggaaagtgtttggccgacagcagacattgtcccgacacctctcgctgcacacagaggaaagaaaatacaaatgccacttgtgcccctatgctgctaagtgccgtgcagatctgaaccagcacttgaccgtccattccgtgaagctggtgagtacagacaccgaggacattgtcagcgccgtcacctctgaaggcagtgatgggaagaaacatccttattattacagttgtcacgtgtgtggatttgagaccgagctcaatgtccagtttgtcagccacatgtcactccacgtggacaaggagcagtggatgttttcgatctgctgcactgcctgcgacttcgtcaccatggaggaagcagagataaagactcacattggcaccaagcacacaggggaagacaggaagacccccagcgaatcaaatagcccctcttcatcctccctctcagctctgagtgattcagccaacagcaaagatgattcagatggctcccagaaaaacaagggcgggaacaatctgctggtcatctctgtcatgcctgggagccagccctcactgaacagtgaggaaaagccagagaaagggttcgaatgtgttttttgcaactttgtctgcaagacgaagaacatgtttgagcgtcatctgcagatacacctcatcacccggatgtttgagtgtgatgtgtgccacaagttcatgaagacccccgaacagctgctggagcataagaaatgccacactgtccccaccggtgggctcaactcaggacagtggtgagtttcagactcctctaggtgcccattctgcatttattccaccaaccgccccgctgccatggagtgccacctcaagacccactacaagatggagtacaagtgccggatctgccagacggtgaaggccaaccagctggagctggagacgcacacccgggagcaccgcctgggcaaccactacaagtgcgaccagtgcggctacctgtccaagaccgccaacaagctcatcgagcacgtgcgcgtccacaccggggagcggcccttccactgtgaccagtgcagctacagctgcaagcgcaaggacaatctcaacctgcacaagaagctgaagcacgccccacgccagaccttcagctgcgaagagtgcctgttcaagaccacacaccctttcgtcttcagccgccacgtcaagaagcaccagagtggggactgccccgaggaggacaagaagggcctgtgtccagcccccaaggaaccggccggcccgggggccccgctcctggtggtcgggagctcccggaatctcctgtctcccctgtcagttatgtctgcctcccaggctctgcagaccgtggccctgtcggcagcccacggcagcagctcagagcccaacctggcactcaaggctttggccttcaacggctcccctttgcgctttgacaagtaccggaactcagattttgcccatctcattcccttgacaatgttataccccaagaaccacttggatctcacattccaccctccccgacctcagactgcgcctcccagcatcccctcacccaaacactccttcctggcctatctcggactgagagaaagagcagagactgtctgagggcagccatgttctgtaccaaaaacagagagacaaaagacaaaaaaaaa

SEQ ID NO: 23762 - DNA, 6338 bp, Homo Sapiens
gcccaacatggctggagcgcggcggaggtgagccggccgcccgcccgcagacgccccagcctactgcgcccgagtcccgcggccccagtggcgcctcagctctgcggtgccgaggcccaacggctcgatcgctgcccgccgccagcatgttgggcgccccggacgagagctccgtgcgggtggctgtcagaataagaccacagcttgccaaagagaagattgaaggatgccatatttgtacatctgtcacaccaggagagcctcaggtcttcctagggaaagataaggcttttacttttgactatgtatttgacattgactcccagcaagagcagatctacattcaatgtatagaaaaactaattgaaggttgctttgaaggatacaatgctacagtttttgcttatggacaaactggagctggtaaaacatacacaatgggaacaggatttgatgttaacattgttgaggaagaactgggtattatttctcgagctgttaaacacctttttaagagtattgaagaaaaaaaacacatagcaattaaaaatgggcttcctgctccagattttaaagtgaatgcccaattcttagagctctataatgaagaggtccttgacttatttgataccactcgtgatattgatgcaaaaagtaaaaaatcaaatataagaattcatgaagattcaactggagggaatttatactgtgggcgtttaccaacacgtactgtgaatacagaatcagagatgatgcagtgtttgaagttgggtgctttatcccggacaactgccagtacccagatgaatgttcagagctctcgttcacatgccatttttaccattcatgtgtgtcaaaccagagtgtgtccccaaatagatgctgacaatgcaactgataataaaattatttctgaatcagcacagatgaatgaatttgaaaccctgactgcaaagttccattttgttgatctcgcaggatctgaaagactgaagcgtactggagctacaggcgagagggcaaaagaaggcatttctatcaactgtggacttttggcacttggcaatgtaataagtgccttgggagacaagagcaagagggccacacatgtcccctatagagattccaagctaacaagactactacaggattccctcgggggtaatagccaaacaatcatgatagcatgtgtcagcccttcagacagagactttatggaaacgttaaacaccctgaaatacgccaatcgagctagaaatatcaagaataaggtgatggtcaatcaggacagagctagtcagcaaatcaatgcacttcgtagtgaaatcacacgacttcagatggagctcatggagtacaaaaccggtaaaagaataattgacgaagagggtgtggaaagcatcaatgacatgtttcatgagaatgctatgctacagactgaaaataataacctgcgtgtaagaattaaagccatgcaagagacggttgatgcattgaggtccagaattacacagcttgttagtgatcaggccaaccatgttcttgccagagcaggtgaaggaaatgaggagattagtaatatgattcatagttatataaaagaaatcgaagatctcagggcaaaattattagaaagtgaagcagtgaatgagaaccttcgaaaaaacttgacaagagccacagcaagagcgccatatttcagcggatcatcaactttttctcctaccatactatcctcagacaaagaaaccattgaaattatagacctagcaaaaaaagatttagagaagttgaaaagaaaagaaaagaggaagaaaaaaagtgtggctggtaaagaggataatacagacactgaccaagagaagaaagaagaaaagggtgtttcggaaagagaaacccaagaattagaagtggaagaaagtcaagaagtgagtgatcatgaggatgaagaagaggaggaggaggaggaggaagatgacattgatgggggtgaaagttctgatgaatcagattcggaatcagatgaaaaagccaattatcaagcagacttggcaaacattacttgtgacattgcaattaagcaaaagctgattgatgaactagaaaacagccagaaaagactgcagactctgaaaaagcagtatgaagagaagctaatgatgctgcaacataaaattcgggatactcagcttgaaagagaccaggtgcttcaaaacttaggctcggtagaatcttactcagaagaaaaagcaaaaaaagttaggtctgaatatgaaaagaaactccaagccatgaacaaagaactgcagagacttcaagcagctcaaaaagaacatgcaaggttgcttaaaaatcagtctcagtatgaaaagcaattgaagaaattgcagcaggatgtgatggaaatgaaaaaaacaaaggttcgcctaatgaaacaaatgaaagaagaacaagagaaagccagactgactgagtctagaagaaacagagagattgctcagttgaaaaaggctccacgtaaaagagatcatcaacttagacttctgggagcccaaaaaagaaaccaagaagtggttctacgtcgccaaactgaagaggttacggctcttcgtcggcaagtaagacccatgtcagataaagtggctgggaaagttactcggaagctgagttcatctgatgcacctgctcaggacacaggttccagtgcagctgctgtcgaaacagatgcatcaaggacaggagcccagcagaaaatgagaattcctgtggcgagagtccaggccttaccaacgccggcaacaaatggaaacaggaaaaaatatcagaggaaaggattgactggccgagtgtttatttccaagacagctcgcatgaagtggcagctccttgagcgcagggtcacagacatcatcatgcagaagatgaccatttccaacatggaggcagatatgaatagactcctcaagcaacgggaggaactcacaaaaagacgagagaaactttcaaaaagaagggagaagatagtcaaggagaatggagagggagataaaaatgtggctaatatcaatgaagagatggagtcactgactgctaatatcgattacatcaatgacagtatttctgattgtcaggccaacataatgcagatggaagaagcaaaggaagaaggtgagacattggatgttactgcagtcattaatgcctgcacccttacagaagcccgatacctgctagatcacttcctgtcaatgggcatcaataagggtcttcaggctgcccagaaagaggctcaaattaaagtactggaaggtcgactcaaacaaacagaaataaccagtgctacccaaaaccagctcttattccatatgttgaaagagaaggcagaattaaatcctgagctagatgctttactaggccatgctttacaagatctagatagcgtaccattagaaaatgtagaggatagtactgatgaggatgctcctttaaacagcccaggatcagaaggaagcacgctgtcttcagatctcatgaagctttgtggtgaagtgaaacctaagaacaaggcccgaaggagaaccaccactcagatggaattgctgtatgcagatagcagtgaactagcttcagacactagtacaggagatgcctccttgcctggccctctcacacctgttgcagaagggcaagagattggaatgaatacagagacaagtggtacttctgctagggaaaaagagctctctcccccacctggcttaccttctaagataggcagcatttccaggcagtcatctctatcagaaaaaaaaattccagagccttctcctgtaacaaggagaaaggcatatgagaaagcagaaaaatcaaaggccaaggaacaaaagcactcagattctggaacttcagaggctagtctttcacctccttcttccccaccaagccggccccgtaatgaactgaatgtttttaatcgtcttactgtttctcagggaaacacatcagttcagcaggataagtctgatgaaagtgactcctctctctcggaggtacacagatcctccagaaggggcataatcaacccatttcctgcttcaaaaggaatcagagcttttccacttcagtgtattcacatagctgaagggcatacaaaagctgtgctctgtgtggattctactgatgatctcctcttcactggatcaaaagatcgtacttgtaaagtatggaatctggtgactgggcaggaaataatgtcactggggggtcatcccaacaatgtcgtgtctgtaaaatactgtaattataccagtttggtcttcactgtatcaacatcttatattaaggtgtgggatatcagagattcagcaaagtgcattcgaacactaacgtcttcaggtcaagttactcttggagatgcttgttctgcaagtaccagtcgaacagtagctattccttctggagagaaccagatcaatcaaattgccctaaacccaactggcaccttcctctatgctgcttctggaaatgctgtcaggatgtgggatcttaaaaggtttcagtctacaggaaagttaacaggacacctaggccctgttatgtgccttactgtggatcagatttccagtggacaagatctaatcatcactggctccaaggatcattacatcaaaatgtttgatgttacagaaggagctcttgggactgtgagtcccacccacaattttgaaccccctcattatgatggcatagaagcactaaccattcaaggggataacctatttagtgggtctagagataatggaatcaagaaatgggacttaactcaaaaagaccttcttcagcaagttccaaatgcacataaggattgggtctgtgccctgggagtggtgccagaccacccagttttgctcagtggctgcagagggggcattttgaaagtctggaacatggatacttttatgccagtgggagagatgaagggtcatgatagtcctatcaatgccatatgtgttaattccacccacatttttactgcagctgatgatcgaactgtgagaatttggaaggctcgcaatttgcaagatggtcagatctctgacacaggagatctgggggaagatattgccagtaattaaacatgaatgaagataggttgtaaactgaatgctgtgataatactctgtattctttatggaaaatgttgtcctgtacttactaggcaaaacgtatgaatcggattaactggaaaatatatctgaattcaactgctgactataaatggtattctaataaaattgtgtactatcctgtgtgcttagttttaagatcaaccaatagatatatatcctacaattgatatattgctttattcacacttttattgtggctgaatttttgtgcctatctataaaacacactttcaaattatttgaattaccaagacgtctgcttttgtgacagtcagaaaacacacctggaatacgatgcagcccaccattaactcattcatgtagtttattcaagtgatttatgtatttaaactaaatattgaaaatgttagtcaaattgtggtttgcttgtcaggtatttatatcagtctgtagtggattcccaaatttcaaagctcttttaatgtaatggacaaaaataagatatgagaatattattgatgaattttcataaggtggaattgatcttaatctactaacagagaagggtagacagtttgtgttaaatgttggcatttacttgtattgaccaaagttttgcagctctactatattctgtgctcaggactaaaatgctgttaatttttttttttttttccagtgctgtgcatatattctgtgatgggaaacattgttgatgtcctaacagaaatatattttgatctattttcctatggagttgtttctattatgaccatttaattttgtttttatttaatagtagtatttccttcccttttatctaattttttatatgctgctaaatatattttaaatatactatgtttgcgaaccttggtagctatgatgagagctattatcatctgtggtgggaaaagctatgtaaataggtagattgtatagagagactatcttgtgttgtgcctgtatgaatttttaaaagttgttgactggattttgcaaaaggatgtataatatttctgtctgctcagaatattaatttgtaaattctgcaagtttaatttttatgtagatggtataacatttgaaaatattgtcttatgtgattttttcccctgaaaatatttgcttgtaaatgaaaacttagctagggcttaaataaacatgttgctatgaaattaaaaaaaa

SEQ ID NO: 23763 - DNA, 2509 bp, Homo Sapiens
gcgctgtcggatacttggggtgagcggaaagcatggcggggacctccgcgccaggcagcaagaggcggagcgagcccccggcgcctcgccccggcccgccgccgggcaccgggcaccccccgagcaagcgggcccggggcttctccgcagccgctgccccggaccctgacgacccgttcggcgcgcatggggacttcactgccgacgacctggaggagcttgacaccctcgcgtcacaggccctgagccaatgtccggccgcggctcgggacgtgtccagtgatcataaggtccacagattattagatggcatgtcaaaaaatccttcagggaaaaacagagaaactgttccaattaaagataatttcgaattagaggtacttcaggcacaatacaaagaacttaaagaaaagatgaaagtaatggaagaagaagttctcattaagaatggagaaattaaaattttgcgagactcactacatcagacggaatccgttctagaggaacagagaagatcacattttcttcttgagcaagagaaaacccaagcactcagtgacaaggaaaaggaattctccaaaaagctccaatcattgcagtctgaactccagtttaaagatgcagagatgaatgaattaaggacaaagctccagaccagtgaacgagcaaataaactggctgctccctctgtttcccatgtcagtcctaggaaaaacccttctgtggttataaagccagaagcatgttctccacaatttggaaaaacatcttttcctacaaaggagtcttttagtgctaacatgtcccttccccacccctgccagacggagtcaggatacaagcctctggtgggcagagaggatagtaagccccacagtctgagaggtgactccataaaacaagaagaggcccagaaaagctttgttgacagctggagacagagatcaaacactcaaggttccattttgataaacctgctcctgaagcagcctttgatcccagggtcatccctaagcctttgccacctcctgagtagtagttctgagtctcctgctggcacccccctgcagccaccagggtttggcagtaccttggctggaatgtcaggcctcaggaccacaggttcttatgatgggtcattttccctctcagccctgagagaagcacagaacctggcattcactggactgaatctggttgcccggaatgagtgctcacgtgatggagacccagcagagggaggcagaagggccttcccactctgccagcttcctggagccgtgcatttcctcccccttgtacagttcttcatcggcttacactgccaggccctgcaggacttggcagctgctaagagaagcggagcacctggggactcaccgacacattcctcctgcgtgagctctggggtagagaccaaccctgaggactcagtgtgcatcctggaaggcttctctgtgactgcacttagcattcttcagcacctggtgtgccacagcggagcagtcgtctccctattactgtcaggagtgggggcagattctgctgctggggaaggaaacaggagcctggttcacaggcttagtgatggagatatgacctcagccctaaggggggttgctgatgaccaaggacagcacccactgttgaagatgcttcttcacctgttggctttctcttctgcagcaacaggtcaccttcaagccagtgtcctgacccagtgccttaaggttttggtgaaattagccgaaaacacttcctgtgatttcttgcccaggttccagtgtgtgttccaagtgctgccaaagtgcctcagcccagagacacccctgcctagcgtgctgctggctgttgagctcctctccctgctggcggaccacgaccagctggcacctcagctctgttcccactcagaaggctgcctcctgctgctgctgtacatgtacatcacatcacggcctgacagagtggccttggagacacaatggctccagctggaacaagaggtggtgtggctcctggctaagcttggtgtgcagagccccttgcccccagtcactggctccaactgccagtgtaatgtggaggtggtcagagcgctcacggtgatgttgcacagacagtggctgacagtgcggagggcagggggacccccaaggaccgaccagcagaggcggacagtgcgctgtctgcgggacacggtgctgctgctgcacggcctatcgcagaaggacaagctcttcatgatgcactgcgtggaggtcctgcatcagtttgaccaggtgatgccgggggtcagcatgctcatccgagggcttcctgatgtgacggactgtgaagaggcagccctggatgacctctgtgccgcggaaaccgatgtggaagaccccgaggtggagtgtggctgaggccctgagtgtccagccacatggtggcaccagcaccactcctttccttaccacatcaactgattaaagcagtgaccagcaggaactgcccagagaactgg

SEQ ID NO: 23764 - DNA, 4867 bp, Homo Sapiens
cgagcaggcagccggacccggcgggcggcgggagagagccctgagaccagtgcaccgctgctgcctgaggcccaagggaatgctggctgctctctgggtgggcactggtgttccacagccaagccgggaagattggtgtgcccagtcccagcccatcctggagctgtcggaagccacaagctgatatccatccagatttccatgtagccttcaccccctcaaagattagctttccttcgtgtggtggcagttcacggagcacctttgggagtatccctcagtacctgacgaggagcccactgcctgggacaccagacttgctcccccggaaccgggagccctccaaggggctgtggcatggcgccctgacgccccagcttggacccgttgcctgcctttgccctggactcctgagtgtagagctcagcccaggagccagtatgggtcgtgaacaggacctgatcctcgccgtcaagaatggagatgtgaccggtgtgcagaaactggtggcgaaggtcaaggccacaaagacaaagctcctgggctccacaaagaggctcaacgtgaactaccaggatgctgatggattctctgccctccaccacgctgctttggggggcagcctggagctcatagccttgctgctagaggctcaggccactgttgacatcaaggacagcaatggcatgcgcccgctgcactacgcagcctggcagggccggctggagcctgtgaggctgctgctgcgcgcctctgcggctgtcaatgccgcctcgctggacggacagatccccctgcacctggctgcacagtatggacattatgaggtgtcagaaatgctcctccagcatcagtccaacccatgcctggtcaacaaggccaagaagacgcccctggacctggcctgtgaatttggccgactcaaggtggcccagctgcttctgaacagccacttatgtgtggcactgctggagggtgaggccaaagacccgtgtgaccccaactacaccacgcccctgcacttggctgccaagaatggccacagagaagtcatcaggcagctcctgagagctgggatcgagatcaaccgccagaccaagacgggtacggcgctccacgaggccgcactgtatggcaagaccgaggtggtgcggctgcttctggagggaggtgtggacgtgaacatccggaatacgtataaccagacggcgctggacatagtgaatcagttcaccacctcccaggccagccgggaaatcaagcagctactgcgggaggcctcagggatcctgaaggtccgagcgctcaaggatttctggaacctccacgatcccactgctctcaatgtccgggcaggggatgtcatcacggtgctagaacagcatcccgacggccgctggaagggccacatccacgagagccagaggggcacagaccgcataggctacttccccccgggcattgtcgaggtggtcagcaagcgggtgggcatccctgcagcccgcctcccctccgcacccacccccctgcgcccaggcttctcccggacaccgcagcctcctgccgaagaacccccgcaccctcttacctacagccagcttcctcgggtgggcctcagcccagacagcccagcaggtgacaggaatagtgtgggcagtgagggcagcgtgggcagcatccgcagtgccggcagcgggcagagctctgagggcactaatggccatggccctggcctcctgattgagaacgcccagccactgccctctgctggagaggaccaggtgctgccaggactccacccgccgtccctggcagacaacctgagccaccgccctctggccaactgccgctctggggagcagatcttcacccaggacgtgcggccagaacagctgctggaggggaaggacgcgcaggccattcataactggctaagcgagttccagctggagggctacactgcccactttctgcaggccggctatgatgtgcctaccatcagccgcatgacacctgaggacctgacggccatcggggtgaccaagcctgggcacaggaagaagatcgcctcagagatcgctcagctcagcatcgccgagtggctgcccagctacatcccaacggacctgctggagtggctgtgtgcactggggctgccacagtaccacaagcagctggtgagcagcggctacgactccatggggctggtggccgacctcacctgggaggagctgcaggagattggggtcaacaagctcgggcatcagaagaagctcatgctgggggtgaagcggctggcggagcttcggcggggcctgctgcagggggaggccctcagcgaaggcgggcgccggctggccaagggtccggagctgatggccatcgagggactggagaatggagaaggcccagctacagctggcccacggctcctcaccttccagggcagcgaactaagcccagagctacaggcggccatggcagggggtggccctgaaccactccccctcccacctgcccgctctcccagccaggagagcatcggggcacgctcacgggggtctggccactcacaggaacagcctgccccacagcccagcggtggagatcccagccccccccaggagaggaacctcccagagggcacagagcggccccctaagctttgttcttcacttcctggccaaggacccccaccctatgtttttatgtacccccagggctcaccctctagcccggccccagggccacctcctggcgcaccctgggccttctcctacttggccgggccccctgccactcccccagacccgcctcgacctaagcgccggtcccacagcctaagccgccctggccccacagagggggatgctgagggggaggccgaagggccagtgggcagcaccctaggcagttatgctacccttacccggcggccaggacgcagtgcccttgtccggaccagtcctagcgtgaccccaaccccagctcgggggactcctcgcagccagtcctttgccctgcgggcccggcgcaaaggccccccgcccccgccccccaagcgcctcagctccgtctctggccccagcccggagccacctccactagatgggagcccagggcccaaggaaggggccacagggccccgaaggcgaacactgagtgaacctgctggcccctcagagccccctggcccacctgccccggctgggcccgcgtcagacacggaggaggaggagccaggccctgaggggacgcccccatctcggggcagctctggggaagggctgccgtttgcagaggaagggaacctgaccatcaaacagcgcccgaagcccgctggccccccgccccgagagacacccgtgccccccggcctcgatttcaacctcacggaatcagacactgttaagcggaggcccaagtgccgggagagagagccactgcagaccgcactgctggccttcggagtggccagtgccacgcctggccccgctgccccactgccttccccaactcctggcgagtctcctccagcttctagccttccccagcccgagcccagcagccttccagcccaaggagttccaaccccccttgctcccagccccgccatgcagcctccagtgccgccctgcccagggccaggtctggaaagctcagcagctagtcggtggaatggggagacagaacccccggccgcccctgctgccctcctcaaggtgcccggagcaggaacagcccccaagcctgtgtcggtggcctgcacccagctggcattttctggccctaagctagcgccccggctcggcccccgcccagtgcctcctccacggcctgagagcactgggactgtgggcccaggccaggcccagcagagactggagcagaccagctcgtccctggcagctgcactgagagccgcagagaagagcattggcaccaaggagcaagagggcacccccagcgcctccaccaagcacattctggatgacatcagcaccatgttcgacgccctggctgaccagctggacgccatgctggactgagccctccagcagtgcccactgtgacctgccgaagtccactgcctttgccccagcacagaagaggcccctgccaccctagggacgggccaagggctggtcaggctgaagtgcccctcctagcagggccccttcccactcagcccgcggctgtgggcaccacagctcttgtggggcagcccaccttagaacctgactagcgagggacctccgctgcatctcagcaaagcccctcccagggtttgatcgattgagcaggacagccctgctcctggacagggaccctggtaagagctctctcctcagggaggaagtaggggtggggctttgggggtgctttctctgtaccccccagcccatgtcccaagttgtgccaagggaatgcctcttgccacccaccatcctgcccaggccctgagaggctggaggaggcgtgtgtctggccgggccccctctccgtaggtgtacagaggacatgtaaatacacagcggtggtgcccaggcagctcctgcccccgccttccctcactgaggcagggctagcaggggtgggaggcagtggggttaacagatcccacaagtcctaacttttcaattgtaaatgttattttctaagcagagagaaatgcatatattttaaatggaatttattctatcaactgcctgagaggacacaatgggggaggggcttcggaccacagcaggagccccgactgcccacctgagggcagggagagcctgaccccattggcccaggccctggctctgtaaccattaacctcttcccccaactaacaccaatgaaaacaccattccacgtg

SEQ ID NO: 23765 - DNA, 5115 bp, Homo Sapiens
ccagccatgggctcggggcgcgtacccgggctctgcctgcttgtcctgctggtccacgcccgcgccgcccagtacagcaaagccgcgcaagatgtggatgagtgtgtggaggggactgacaactgccacatcgatgctatctgccagaacaccccgaggtcatacaagtgcatctgcaagtctggctacacaggggacggcaaacactgcaaagacgtggatgagtgcgagcgagaggataatgcaggttgtgtgcatgactgtgtcaacatccctggcaattaccggtgtacctgctatgatggattccacctggcacatgacggacacaactgtctggatgtggacgagtgtgccgagggcaacggcggctgtcagcagagctgtgtcaacatgatgggcagctatgagtgccactgccgggaaggcttcttcctcagcgacaaccagcatacctgtatccagcggccagaagaaggaatgaattgcatgaacaagaaccacggctgtgcccacatttgccgggagacacccaaggggggtattgcctgtgaatgccgtcctggctttgagcttaccaagaaccaacgggactgtaaattgacatgcaactatggtaacggcggctgccagcacacgtgtgatgacacagagcagggtccccggtgcggctgccatatcaagtttgtgctccataccgacgggaagacatgcatcgagacctgtgctgtcaacaacgggggctgtgacagtaagtgccatgatgcagcgactggtgtccactgcacctgccctgtgggcttcatgctgcagccagacaggaagacgtgcaaagatatagatgagtgccgcttaaacaacgggggctgtgaccatatttgccgcaacacagtgggcagcttcgaatgcagttgcaagaaaggctataagcttctcatcaatgagaggaactgccaggatatagacgagtgttcctttgatcgaacctgtgaccacatatgtgtcaacacaccaggaagcttccagtgtctctgccatcgtggctacctgttgtatggtatcacccactgtggggatgtggatgaatgcagcatcaaccggggaggttgccgctttggctgcatcaacactcctggcagctaccagtgtacctgcccagcaggccagggtcggctgcactggaatggcaaagattgcacagagccactgaagtgtcagggcagtcctggggcctcgaaagccatgctcagctgcaaccggtctggcaagaaggacacctgtgccctgacctgtccctccagggcccgatttttgccagagtctgagaatggcttcacggtgagctgtgggacccccagccccagggctgctccagcccgagctggccacaatgggaacagcaccaactccaaccactgccatgaggctgcagtgctgtccattaaacaacgggcctccttcaagatcaaggatgccaaatgccgtttgcacctgcgaaacaaaggcaaaacagaggaggctggcagaatcacagggccaggtggtgccccctgctctgaatgccaggtcaccttcatccaccttaagtgtgactcctctcggaagggcaagggccgacgggcccggacccctccaggcaaagaggtcacaaggctcaccctggaactggaggcagaggtcagagccgaagaaaccacagccagctgtgggctgccctgcctccgacagcgaatggaacggcggctgaaaggatccctgaagatgctcagaaagtccatcaaccaggaccgcttcctgctgcgcctggcaggccttgattatgagctggcccacaagccgggcctggtagccggggagcgagcagagccgatggagtcctgtaggcccgggcagcaccgtgctgggaccaagtgtgtcagctgcccgcagggaacgtattaccacggccagacggagcagtgtgtgccatgcccagcgggcaccttccaggagagagaagggcagctctcctgcgacctttgccctgggagtgatgcccacgggcctcttggagccaccaacgtcaccacgtgtgcaggtcagtgcccacctggccaacactctgtagatgggttcaagccctgtcagccatgcccacgtggcacctaccaacctgaagcaggacggaccctatgcttcccttgtggtgggggcctcaccaccaagcatgaaggggccatttccttccaagactgtgacaccaaagtccagtgctccccagggcactactacaacaccagcatccaccgctgtattcgctgtgccatgggctcctatcagcccgacttccgtcagaacttctgcagccgctgtccaggaaacacaagcacagactttgatggctctaccagtgtggcccaatgcaagaatcgtcagtgtggtggggagctgggtgagttcactggctatattgagtcccccaactacccgggcaactacccagctggtgtggagtgcatctggaacatcaaccccccacccaagcgcaagatccttatcgtggtaccagagatcttcctgccatctgaggatgagtgtggggacgtcctggtcatgagaaagaactcatccccatcctccattaccacttatgagacctgccagacctacgagcgtcccattgccttcactgcccgttccaggaagctctggatcaacttcaagacaagcgaggccaacagcgcccgtggcttccagattccctatgttacctatgatgaggactatgagcagctggtagaagacattgtgcgagatggccggctctatgcctctgaaaaccaccaggagattttaaaggacaagaagctcatcaaggccttctttgaggtgctagcccacccccagaactacttcaagtacacagagaaacacaaggagatgctgccaaaatccttcatcaagctgctccgctccaaagtttccagcttcctgaggccctacaaatagtaaccctaggctcagagacccaattttttaagcccccagactccttagccctcagagccggcagccccctaccctcagacaaggaactctctcctctctttttggagggaaaaaaaaaatatcactacacaaaccaggcactctccctttctgtctttctagtttcctttccttgtctctctctgcctgcctctctactgttcccccttttctaacacactacctagaaaagccattcagtactggctctagtccccgtgagatgtaaagaaacagtacagccccttccactgcccattttaccagctcacattcccgaccccatcagcttggaagggtgctagaggcccatcaaggaagtgggtctggtgggaaacggggaggggaaagaagggcttctgccattatagggttgtgccttgctagtcaggggccaaaatgtcccctggctctgctccctagggtgattctaacagcccagggtcctgccaaagaagcctttgatttacaggcttaatgccagcaccagtcctctggggcacatggtttgagctctggacttcccacatggccagctttcttgtctatacagatcctctctttctttccctacgtctgcctggggtctactccataagggtttacaaatggcccacaacactgagttagtggacaccggctaaatgaggaagagcagcaggcattgtcatggtgaatgccccgctgtagctccctgagagaaagactgtaactctgcaggacagaaacaaggttttaaagcattgccaaaaaaaagaaaacagaaagaaaaaatgtatcatctaaaggactagacacagaacaattggaagtcaacttcaaacactaatcccttttcttgtcttccctggcccagccacctcctcagccccatgtgatgctccctgggggagccctactccccttgctacatgttgtccttaaacatggttattgacctgaagccagcctaggccttgccctacagttgtttttcccttgtagccccagctggcttgtgggcttcaccaaagaggaccccactctgaagccagcctggagccacctacctctggcctcaggctgtgggcagcaaaaggaatgtgtgtgcacttggcgagcctcctgcccaccctgtccacacctaataagtgcaatcattttgagtctttctatgttgtctagacggaggggtttttgttttctgggtttgttttttgtttttgtttcttcttcctctattagcaaaaccctatttatagctgcccaagagaaaagagtgtatgtttggagtggaagaaaatcggttttgaatctcatgaaccttgagtgctggagcatctgatctgtctctatgccaccactggccacctagagcccttggctgtggtaatccagggtaattgcgcagaggcatctgatgtgtaggaaagtaattctggggatttgatggagcagaaaggagagagacctatgtttgctaaaccaatcttgctatccctatgcctctccatggagtcagtgtggacctcatgattatagaggccaatggaactggtcagtgattctctaccccaagtagggaaaacctccatcttttccctgtcttcatcctgttatcccctggtgtacacatggaagaggaccaggacataccacctggggatgggctgactcagggtcccgaggccagagacaaagctgtgggagccaagaataagacagaaggcatcagatatttgcctggctctggtcacttccctttgaagttgacttcaagcttagcttcctcaactactgtttttcagaaggaagaaagaatcaaatggaagaagaatcaagtccatgcccaagcccaaagcctgcacacattctgcccttaatccaagtgttgcctataaaattattttctgttttctcactctagttcccccaaagctgtagtcccaatcaatcaaaggctaccaactgagtcctcaggttcatttcttttttttttttttttctttttaactctcctggtaactcacagaacagctcaggttcatttctaggtgactgtcctaggctactgctcccccaggagactcaacactaaataaaggagtc

SEQ ID NO: 23766 - DNA, 4769 bp, Homo Sapiens
gcggccgcggcgcggcgggaccatggagctcagagcgcagccccggcgccggcggcgggaccgcggaccgttttagttttgattgctgttaactactactgataactgagccaaagtggtgatgctacttgaggggaatttctgcaacccatagtcaacgattacatgattgtgaaccatgcctttagtgaagaggaacattgagccccggcacttgtgccggggagctctgcctgaagggattaccagcgaacttgaatgtgtaaccaatagtactcttgccgctatcatacgccagctgagcagtctgagcaaacatgctgaagacatatttggtgagttgtttaatgaggctaacaacttctacatcagagcaaattctcttcaagacagaattgatcgccttgctgtcaaagtcacccagctggattcaacagtggaagaggtctcactacaggatatcaacatgaaaaaagctttcaaaagttccacagtccaagaccagcaagtggtttcaaagaacagcattcctaatcctgttgctgatatttacaaccagagtgataagccaccgcctctgaacatcctgacaccatacagagatgacaagaaggatgggctgaagttctatactgatccttcctatttctttgacctctggaaagaaaaaatgctacaggacacagaagacaaaaggaaagagaaaaggcgtcaaaaggagcaaaagcgtatagatggcaccacccgtgaggtgaaaaaggttagaaaagccagaaacaggcgccaggagtggaatatgatggcatatgacaaagagcttagacccgacaacaggttgtctcagagtgtgtaccatggagcgtcttccgagggatccctgtccccagatactaggtcacatgcatcggacgttacggattactcttacccggctactcccaaccattctctgcacccccagcctgtgaccccttcctatgcagctggtgacgtgccaccacacgggcctgcaagccaggctgcggagcatgagtaccggcccccatctgcctcggcgaggcacatggccctcaacagacctcagcagccgcccccccggcgtccccctcaggccccagaggggtcccaggcctctgcaccgatggctccagcagactacgggatgctcccagcgcagataattgagtattacaacccatccggaccacctcctccgccacctcctcctgtgattccctcagcacaaactgccttcgtcagccctctccagatgcccatgcagcccccgttccctgcatcagccagctccacgcacgcagctcctcctcacccaccctccaccgggctcctggtcacagccccgccacccccgggcccaccacctcccccgccaggccctcctggtcccgggtcttctctttcgtcctccccaatgcatggccccccagtagctgaggcgaagcggcaagagcctgcacagccaccaatcagtgatgctcgaagcgacctcctcgctgctattcgaatgggaattcaactgaaaaaggtgcaggagcagcgggagcaggaggccaagcgggagccagtggggaatgacgtggccacgatcctgtcccggcgcattgccgtggagtacagcgactctgacgacgactcagagttcgacgagaacgactggtccgactgagcaaaggccggcggagaggccgcgtgtgggagcgtgttgaagattttaagtggtctctacacccaaatagtggtattctaatcccgtagcatagcaccttttgtataaacaatgtgatattgcttctgcacatccaaaaattctgggtcttttcagtatttactgtgtaatacttaagtgccactaaacatagcaaattgtgctgcacatgaggaaataggctgtcactatcacattgtcctgaaaacagcatctgctttcctcttggccatgagagtatttagtgcagtttgggtttactcttactgatcaatataactctgcagacttgctgtgtgtttgtgaagctgcctggtgttaggtctctgcaagactaatgactatgtcagagtgatgtcttccaaccagtaagtgatattgtttcaccgctttggtttttccttttgtttttttaaaggatgtgtttctgaataagttggttttagagggaaaggttcaacaaacagggagaatccagtgtttctgctttcagtttcttggcttggtagcctctgagtgaatctgatgctctgctgaataatttcattacctctgcacatgcctgtcaaatatgaaattggaagggcccttttcaggctgggttccctgtgggcatttgcttagtaaatgcctgttgatggtttttgcaagagaattcagcagctcaacagtaatgaaagtgaagaacagagtccattttccttcctggggccattggggatgacactcaagatacttgccagtctctccagtgtgggcaccagccggccagaacagatgcgagcagtccatgactctgggagctacaccgctgagctgggcagagctgcggcacagggcctgggctgcaaaggagccctgctcctttagtttcctgacacctgtgtcctgagtgagccgcaggagttcttagctcctcagcgagcaacagagagcactttagatggcacctttcaccacttggtcagaattttaaaagcttaggtttaggtgaaagtagatattgacagctattcacctttcacggtgctggggccagattagggatcactcccgtgaggagggccttcaccctgttctagaagcacatggttgtcctcctgttgttggcacattaaatgataaaaagcacctcatgagattcccttgatcagccctgcagctgtagtacagtgctgtgccctcacctccacccttcctgttgttcccacgtgggcaataccagggacccatggggaaactcaagaatgacagcttctatattttgtaattctggatgaaagataactgtgttgaacaaacaggtgctccaggctttgattatagatacgacttcaaaaatatgctaagacgcttgacttattaaggactttaacctactcaacagtatttcatatccattgtggttagttactcagttatgttgagaagaatctggagctaaaagcagagatgtttgaggtgacggtaggaatgtgagcaggatggtgatgggggtttttgttaaaatgcatctgagcaagtcagccagccccgaagtcccctcagtgtgtgtgtctcgagtggctacctgttgggcttgtgggcagtgattgtacagagcctgtccattgggtgcagtcatgtagatctgaagccctgaaaagcctcatgtctgcatcccctttccaaggctgcttccctggtgtgtctgttctctcctctgtcccaggtgctgggagcgtcctcttcagcgtcttttcctagagctggtcaccactaggctgtcactataaattccttgaatataagtaacagttattaatgaacttctaaatttctaatttctctctctctctcttttttttttttttttgttgttgttaaaaagggcctactacattggcgctattcttaggacttctgcaacttttaaagtcttacttgtctttcttgttgcttttgtattaggagttccccgtgtgggtctagaactcccctttggtaatgcttctttgtttttttatggcccttctgttctcaggatggagagaacacagaagctactatccatgtcaggatttattctatttatatcttattacaataaaattagtggcactttattcataaatattcatgagcctgttaattgttagttgtcttcctgtagctgaatcaacaagttattttcaactcattttatgacttgcgaaaaagcttttgccctgttgtgtaccataacatttaaaagaatggaaaatgactgaaatccaatttagattatttttagagtatttttccagcaaattcaatttattctgaaatttaaatccagatcttttctaatatggtattacaatgaaaagaataaagagaagatttgaattttcagtttcattttcaaaaactatttaccaaaacaaatggagaagaaacatccaaaagcacatttcatttctccaaactttgtgttttaaattatagttataaattgtaaggtaattttaaattgtccctcgtattatttctccacgtctgttttagtttaatgtctcctaagcttttctctcatagcgtagacctagggaagggatgggaagattgcccagtccccgatggctgcgcacacaggaggcggcggagcacaaggcaagtgagtttgcactgtcagccccagaccgtaagcttggctacactgatgtttttctttactaaggatactattcaaaaattaacattttcatctcagtaagtttttagaacatcaaaatgttttctgagctccaagtggctaggttgtaaaagttttataataatttgcaattaaaatacatgatacatattaatccattaaagactagtgggaatgtatcagccagagtagcaagtaatttttgttttataaatcatagtatctgtcatcttgcagtattaccaatgctgttgtaaattgaatttaaagtggtattaaaaaaaactgttaaacaatttttatctgtttgtatatcttactatagattatgtacaagtaacatctaaataaaattacacttttaaccct

SEQ ID NO: 23767 - DNA, 3143 bp, Homo Sapiens
gggagactcacattgggacttgtcctcctcctcctggacattttgggggctcgtcagcatggacagcgagtcagccatgggtggaagggaggctttctcacagctcccttgtgcttcccacagccctgccagccgggaacacggaggggaaggaggaggagcttaaaagaggctactgaaccccagttggccatggctgaggaatttgtgaccctcaaggatgtcggcatggacttcaccttgggagactgggagcagctcgggctggaacagggggacacgttctgggacacagcgttggacaattgccaggacctcttcctgctggaccccccaagacccaacctgacctcccacccagatggcagtgaagatctggagcctctggcaggaggaagcccagaagcaacaagccctgatgtgactgagaccaagaactctcctctgatggaggatttcttcgaagaaggattctcccaggagattatagagatgttatccaaggatggcttctggaactccaatttcggagaagcctgtatagaggacacctggttagatagtttgctaggcgatccagaaagtcttctgaggtctgatattgccaccaacggggaaagtcccacggaatgcaagagtcatgaattaaagagaggactcagtcctgtgtccaccgtttccacgggagaagattccatggtgcataatgtttctgaaaagaccctcacaccagctaagtctaaggaatataggggtgagtttttctcctactccgaccacagccagcaggattctgttcaggaaggggagaaaccatatcaatgtagtgaatgtgggaaaagcttcagtgggagttaccgtcttacccagcactggatcactcatactagggagaaacccactgtccatcaagagtgtgagcaaggttttgaccggaatgcttccctttctgtgtatccgaaaactcacacgggctacaaattctatgtgtgtaatgaatatgggacaacttttagtcagagtacatacctgtggcatcagaaaactcacactggagaaaaaccatgtaagagtcaagatagtgaccacccacccagtcatgacacacagcctggtgagcatcagaaaactcacacagatagtaagtcctacaactgtaacgaatgcggcaaggcttttacccggatcttccaccttactcggcaccagaagatccacactcggaaacgctatgagtgttccaagtgccaggcgaccttcaacttgagaaaacacctcatccaacatcagaaaactcacgctgcaaaaactacctctgagtgtcaggagtgtgggaagatttttaggcacagttcgctgctcattgaacaccaggctcttcatgctggagaggagccttataagtgtaacgaacgtgggaaatccttcaggcataactctaccctaaagatccatcagagggttcacagtggagagaagccttacaaatgcagtgagtgtgggaaggccttccaccggcacactcaccttaatgaacatcggcgaattcatacaggctacagaccccacaaatgtcaggaatgcgtcaggagtttcagccggccctcacatctgatgcgacatcaggccattcacaccgcagaaaagccctatagctgtgctgaatgcaaggagactttcagcgataacaatcgccttgtgcaacaccagaaaatgcacactgtcaaaaccccatatgaatgtcaggagtgcggagaacgcttcatttgcggctcaaccctgaagtgccacgagagtgttcacgccagagaaaaacaaggattttttgtgagtgggaagatcttggatcagaacccagaacagaaagagaagtgctttaagtgtaacaaatgtgagaaaacctttagctgcagcaaatacctaactcagcacgagaggattcacaccaggggagtgaagccctttgaatgtgaccagtgtgggaaagcctttggccaaagtactcggctcattcaccatcaaagaatccactctagagtgaggctgtataaatggggtgagcaagggaaagccatcagcagtgcctcccttatcaaacttcagtccttccacacaaaggagcacccttttaaatgtaacgaatgcggaaagaccttcagccacagtgcacacctctcaaaacatcagttaattcacgctggagagaatccctttaaatgtagtaagtgtgacagagtcttcacccagagaaactaccttgttcagcatgagcgaactcatgccagaaagaagccgttggtgtgtaacgaatgcgggaaaacgttccgtcagagctcatgcctttctaagcatcagagaattcactcaggtgagaagccctatgtatgtgattactgcgggaaggccttcggcctgagtgctgagcttgtccgccaccagagaattcacactggagaaaagccttatgtttgtcaggaatgcgggaaagccttcacccagagctcatgcctttctattcaccggagagttcacactggggagaagccctacagatgtggtgaatgtgggaaagcctttgcccagaaagcaaatctaacacagcaccagagaattcacacaggggagaagccttactcctgtaatgtgtgtggcaaagcttttgtcctcagtgcccatctcaaccagcacctgagagttcacacccaggagacactttatcagtgtcaacgttgccagaaagcctttcggtgccactcgagcctcagccgccatcagcgtgtacacaacaagcagcaatactgcctgtagccattgggtggcagcagagtcccagaatatgagaccgttactcggatgttgaaagttggaaactatcccattgcaagtttctctccaaataaatgcatctaaagattgattagaaagtttgtgcgcatgtttttcattataacaatgaaaacacaaaagtggagaagctgtacaacgtcaggattcagaggtaggctctggagccagtctaccttgagttaaatcccacctctgccatctactacctaagtgaccttgggaaggtcagaaaaatctctcagggcctcggtgtccttatctgtaaaatgggcatcacctacctcagagggcttttc

SEQ ID NO: 23768 - DNA, 1073 bp, Homo Sapiens
gggcgctgagcactagagagagcgtcttgtggctgcggcctgcccctcagcctcctccgcgcggttacccctgtacccgccgccatccgtcctggcgctccggatgagtcaatgaggggcagggcccgaggagtggtcttcccaagaacccctggtggcctcccaaggccggtgctgtgtacctcctccccgacaaaaggggaaactgaggccccgaggggagtgggaagagccggctggacgtcaggcccagccgctggtgcagtggtccgtcccctctgccggggtgggcccctcgggtttcgcgtgtcctcgggaaagagactggcgggcctcgtgggctgtgcggctatcctggagacagatgacagctctcccttggatggctttgctggttccgcaccagccagcgcccccatttttcctgcagcaccctgatctgcactccctgaggggctcccactgtccgcggtgtgaggatgtccctggatagtccactgtgtgcagaggcatgggagttgtcatgttgggaacatgctagacctcagtatccttgagggatgctgccttgggtctggaaactgttagaggaaaccccaagaggtgcaggcactgagcctctcaggacaatgacctggggtccagctcccctggacggggcctcctcatgattgtttgggggttgatcacagaccaagagtgacgagtgatgtcaccctgtgactcatggccggaccttcttgcccctattgtctcagcacaacattattcgacttttccctcagcgtgggtgggcagaggaaaagccctgtggctctggggacttgggatccagagttgaagacccttcagctggctctgccctgccagtgccacagagtgccatggcccaggaagacaggttttcttccatctaggccaggccatccagtggccatcctccgtgtcctcccgcctcctcctggtgtgacttctgaaaaccaagaatttgttcctgttgactttttctgtgctatggaccattgtcctctcacccactcaataaatcttgaaacatgcaaaaaaaaaaaaaa

SEQ ID NO: 23769 - DNA, 3462 bp, Homo Sapiens
gtgttttcagtctctccgggttgcatgtactgtatgtggagcagtgtacagtgaagcggaggcagagcggctccgcgagcttctctccactttcccatagagaaaccctgactggccgctgagggctagctacacacacgccctcacgcccggcgagcccgcgaggtcactatcatatgacaaaggctttgccgcagttcatcttcctccctgtgtactttccatttgccttcctggaatcctgctgcatcacagaagctggaagttctgatgttccactgaaatcacaatggaaagtcttgacttgactggtcacagtaatgaaaggcagtaatagaaataaggatcattcagcagaaggagaaggggttggaaaacgaccaaaacgaaagtgtcttcagtggcatccattgctagcaaagaaacttcttgatttttcagaagaggaagaagaggaagacgaagaggaggatattgataaggttcaacttcttggggccgatggcctagagcaagatgttggtgaaactgaagatgatgaatcaccagagcagcgagcccggagaccaatgaatgcatttcttttattttgcaaacgccatcgctctcttgtacgtcaggaacaccccaggcttgataaccgaggtgctaccaagatactagctgattggtgggctgttcttgatccaaaggaaaagcagaaatacacagacatggccaaggagtataaggatgcatttatgaaagcaaatcctggctacaaatggtgtcctaccacaaacaagcctgtgaaatccccaacacccactgtcaatccacgaaagaaactttgggccttcccatctgactcttcaagagacttgccaagccccaagaaagcaaagactgaagaaatgcctcagcttaactttggaatggctgatcctactcaaatgggaggcctgagtatgctgctgttagctggagaacatgctcttggcacaccagaggtatcctctggcacatgcaggcctgatgtttcagaatctcctgaattacgtcagaagtcaccattgtttcagtttgccgagatatcttcaagtacgtcccactctgatgcttctacaaagcagtgtcaaacatctgccttgtttcagtttgcagagatttcttcaaacacttcgcagttgggtggtgctgagcctgtaaaacgctgtggaaagtctgcactctttcaactggcagagatgtgcctggcatcagaagggatgaaaatggaagaatcaaagctaataaaagcaaaagaatccgatggtggaagaattaaagaattagagaagggaaaggaagaaaaagaaattaaaatggagaaaacagatgaaactaggttacagaaggaagcagaatttgaaaaatcggctaaggaaaatttaagagattctaaggaattgagaaattttgaggcattgcaaatagatgacataatggctataaaaatggaagatcccaaagaaattagaaaggaagagttagaagaagatcacaaatgtagtcattttcctgatttttcttattctgccagtagcaagataataattagtgatgttcccagtagaaaggatcatatgtgccatcctcatggaattatgatcattgaggatcccgcagcattaaacaagccagaaaagctaaaaaagaaaaagaagaaaagcaaaatggatcgacatggaaatgataaatccacacccaagaagacttgcaaaaagaggcagtcttcggaatctgacattgagagcgtcatatataccattgaagccgtcgcaaaaggagactggggcatagagaaacttggagatacccctcgcaagaaggtccgcacatcctcaagtggcaagggaagcattttggatgccaagccaccaaagaaaaaagtgaaatcaagagagaagaaaatgtcaaaggagaaatcctcagacaccaccaaagagtcaagacctccagatttcattagtatttctgctagcaagaacatttctggtgagacaccagagggtataaaagcagaaccattgacccctatggaagatgcactaccacccagcctatcaggacaggccaagcctgaggacagtgactgtcacagaaaaatagaaacttgtggttccaggaaatccgagaggtcttgcaaaggtgctctttataaaaccctggtgtctgagggcatgctcacctctctgcgagctaatgttgacagaggaaaacgaagctcaggaaaaggaaactcctctgatcatgaagggtgttggaatgaagaaagctggacatttagtcagagtgggaccagtgggagcaagaagttcaagaagacaaagccaaaagaagactgtctccttggctccgcaaagctggatgaagaatttgaaaaaaaattcaacagcctccctcaatatagtcctgttacatttgaccggaaatgtgtacctgtcccaagaaaaaagaagaagactggaaatgtgtcctcagaaccgactaaaaccagcaaaggaagtggggataaatggtcaaacaagcaactcttcttggatgccattcaccctacagaagccatattttcagaagacagaaacaccatggagcctgttcataaggttaaaaatatcccatccattttcaacactccagagccaacaacaacgcaagaacctttggtgggcagccaaaagagaaaagcaaggaaaaccaagattacacaccttgtcaggacagcagatggccgggtatcaccagcaggaggtactttggatgacaaaccaaaggaacaactgcagaggagtctccctaaagcaactgagacagactgcaatgacaaatgctcacacaacaccgaggtcggggagacgcggagcagtactccagaaatgcctgccgtgtctgcgttctttagcctcgctgcgctggctgaagtggcagccatggaaaatgtgcacagaggtcagaggtcaactccgctcacccatgatggacagccaaaagaaatgccgcaggctcctgtacttatttcctgcgctgaccagtgaagcgccctttcattgtaaaacattgtgctttacctactaccctagccttgtctttaccgagggatgctagtgagtccaagtggtggaaaatatagactgcaaacaagtgcttgttgccccacacggcccagattcacttgaagcagaagttagcatcctgggccagtttgttctctcagaacccagaatctttgagggtaaggttatctgtctgatactgagcagaaacagaatgatcctggagctttgctttctattgaaggcttttgacggtaataggtggtaacttggtaaaaggctgcctttactgtagctcacccagcatctcttttaccaaccagagagtgtgaaactagtttcatatattacctagttattctttcaaaacaaaacaaaaaaaacaaaa

SEQ ID NO: 23770 - DNA, 3342 bp, Homo Sapiens
cttgacttgactggtaagagctgttgtgaaggtacatcttacttacttacctggaagcagtgaggcagtcaagaattatgtgctgtcagagctggtctcagcatgatcaaggaagtgtgatcattggatatttttttcttgtcaattttattattttttaaagtgtgacttttattgatctccattatcaagtcacagtaatgaaaggcagtaatagaaataaggatcattcagcagaaggagaaggggttggaaaacgaccaaaacgaaagtgtcttcagtggcatccattgctagcaaagaaacttcttgatttttcagaagaggaagaagaggaagacgaagaggaggatattgataaggttcaacttcttggggccgatggcctagagcaagatgttggtgaaactgaagatgatgaatcaccagagcagcgagcccggagaccaatgaatgcatttcttttattttgcaaacgccatcgctctcttgtacgtcaggaacaccccaggcttgataaccgaggtgctaccaagatactagctgattggtgggctgttcttgatccaaaggaaaagcagaaatacacagacatggccaaggagtataaggatgcatttatgaaagcaaatcctggctacaaatggtgtcctaccacaaacaagcctgtgaaatccccaacacccactgtcaatccacgaaagaaactttgggccttcccatctgactcttcaagagacttgccaagccccaagaaagcaaagactgaagaaatgcctcagcttaactttggaatggctgatcctactcaaatgggaggcctgagtatgctgctgttagctggagaacatgctcttggcacaccagaggtatcctctggcacatgcaggcctgatgtttcagaatctcctgaattacgtcagaagtcaccattgtttcagtttgccgagatatcttcaagtacgtcccactctgatgcttctacaaagcagtgtcaaacatctgccttgtttcagtttgcagagatttcttcaaacacttcgcagttgggtggtgctgagcctgtaaaacgctgtggaaagtctgcactctttcaactggcagagatgtgcctggcatcagaagggatgaaaatggaagaatcaaagctaataaaagcaaaagaatccgatggtggaagaattaaagaattagagaagggaaaggaagaaaaagaaattaaaatggagaaaacagatgaaactaggttacagaaggaagcagaatttgaaaaatcggctaaggaaaatttaagagattctaaggaattgagaaattttgaggcattgcaaatagatgacataatggctataaaaatggaagatcccaaagaaattagaaaggaagagttagaagaagatcacaaatgtagtcattttcctgatttttcttattctgccagtagcaagataataattagtgatgttcccagtagaaaggatcatatgtgccatcctcatggaattatgatcattgaggatcccgcagcattaaacaagccagaaaagctaaaaaagaaaaagaagaaaagcaaaatggatcgacatggaaatgataaatccacacccaagaagacttgcaaaaagaggcagtcttcggaatctgacattgagagcgtcatatataccattgaagccgtcgcaaaaggagactggggcatagagaaacttggagatacccctcgcaagaaggtccgcacatcctcaagtggcaagggaagcattttggatgccaagccaccaaagaaaaaagtgaaatcaagagagaagaaaatgtcaaaggagaaatcctcagacaccaccaaagagtcaagacctccagatttcattagtatttctgctagcaagaacatttctggtgagacaccagagggtataaaagcagaaccattgacccctatggaagatgcactaccacccagcctatcaggacaggccaagcctgaggacagtgactgtcacagaaaaatagaaacttgtggttccaggaaatccgagaggtcttgcaaaggtgctctttataaaaccctggtgtctgagggcatgctcacctctctgcgagctaatgttgacagaggaaaacgaagctcaggaaaaggaaactcctctgatcatgaagggtgttggaatgaagaaagctggacatttagtcagagtgggaccagtgggagcaagaagttcaagaagacaaagccaaaagaagactgtctccttggctccgcaaagctggatgaagaatttgaaaaaaaattcaacagcctccctcaatatagtcctgttacatttgaccggaaatgtgtacctgtcccaagaaaaaagaagaagactggaaatgtgtcctcagaaccgactaaaaccagcaaaggaagtggggataaatggtcaaacaagcaactcttcttggatgccattcaccctacagaagccatattttcagaagacagaaacaccatggagcctgttcataaggttaaaaatatcccatccattttcaacactccagagccaacaacaacgcaagaacctttggtgggcagccaaaagagaaaagcaaggaaaaccaagattacacaccttgtcaggacagcagatggccgggtatcaccagcaggaggtactttggatgacaaaccaaaggaacaactgcagaggagtctccctaaagcaactgagacagactgcaatgacaaatgctcacacaacaccgaggtcggggagacgcggagcagtactccagaaatgcctgccgtgtctgcgttctttagcctcgctgcgctggctgaagtggcagccatggaaaatgtgcacagaggtcagaggtcaactccgctcacccatgatggacagccaaaagaaatgccgcaggctcctgtacttatttcctgcgctgaccagtgaagcgccctttcattgtaaaacattgtgctttacctactaccctagccttgtctttaccgagggatgctagtgagtccaagtggtggaaaatatagactgcaaacaagtgcttgttgccccacacggcccagattcacttgaagcagaagttagcatcctgggccagtttgttctctcagaacccagaatctttgagggtaaggttatctgtctgatactgagcagaaacagaatgatcctggagctttgctttctattgaaggcttttgacggtaataggtggtaacttggtaaaaggctgcctttactgtagctcacccagcatctcttttaccaaccagagagtgtgaaactagtttcatatattacctagttattctttcaaaacaaaacaaaaaaaacaaaa

SEQ ID NO: 23771 - DNA, 3096 bp, Homo Sapiens
gctattaaataatagaagaaaatggaattgaatatgatgtcagcatggaacaatctaatgattcattaagagtcaaccataatgacggtgaagagtcaaaaaccagtgctcaagtatttgagcatctaatctgtatggactccagggattcttcctttggacaaaatgattctcctacagttttgcccatcactactcgtgaagcaaataattcactcatatcacagaatataccagggcccctgactcagacacagactctttctgcagagcaattccatctagtggaccaaaatgggcaggctattcaatatgaacttcagtcattgggggaatccaatgcacaaatgatgatcgttgccagcccaacagaaaatggacaggtacttcgtgtaattccacctacccagacaggaatggcacaagtgattatacctcaggggcaacttgtggatgtgaatagtcctcgggatgtccctgaagagaaacccagtaacagaaacttaccaactgtaagagtggatactctagcagacaataccagcaattacattcttcatcctcaaacatccttcccattgcccaaaaagtcagtgaccggaatgctggaagaaccccttctggggcctcttcagccactttcttctaatacacctatatgggcctgccgtcttaggagctgtgagaaaattggagattcataccgtggctactgtgtaagtgagactgaattagaaagtgtcctaacatttcacaagcagcaaacacagagtgtttgggggacccgtcagtctccaagcccagccaagcctgctacacgcttgatgtggaaatcccagtatgttccatatgatggaatcccatttgttaatgcagggagtagagctgtggtaatggagtgtcagtatgggccaagaagaaaaggtttccagttaaaaaaagtcagtgagcaggaaagcaggtcttgtcagctctacaaagccacttgtccagctcggatttacattaaaaaggtacagaagtttcctgaatatagagttcctacagaccccaaaattgacaagaaaattatcagaatggagcaggagaaagcttttaacatgctaaagaagaacttggtagatgctggtggtgttcttaggtggtatgtacagttacctacacagcaagctcatcagtatcatgaattagagactccctgcctcactttgtcaccttctccttttcctgtgtcttctcttgaagaagaggaaactgcagttagagatgagaattgtgcattaccctcacgtttacatcctcaagtagcacataagattcaagaattagtatcacagggaatagaacaagtgtatgcagtaaggaaacagctaagaaaatttgtggaaagggaactgttcaaacccgatgaggtacctgaaagacataatttatctttttttccaactgtaaatgatataaaaaatcacatccatgaggtacagaaatccttgagaaatggagatacggtatataactcagagattattccagcaacgcttcaatggactacagacagtgggaatattctcaaagagaccatgacagttacatttgcagaaggaaattcaccaggagaatcaattaccaccaaagtggaaacaaatcagaccaggggttctttgtctcctgagccaacccacttgctctcctcactctcctcatttcagcccaaaatatttacacaactacagggtttgcagttacaaccaaggtacacctctcctgatgaatcaccagctgtggtatcagtaaataaccagccgtcctctagtccttcaggacttctggatacaataggaagtgctgtaatgaataataattctctactgcttggtcaaagtcatagccttcaaagagatacatgcttaacccaaaacaatagtactgcctccaccatgggtaaccttccagaaccagatcaaaatctagttgcaatggacgagctggtagaagttggagatgttgaggatacagggaatctggaaggaactgttcatcggattctgttgggagatgtgcagactattccaatacagattatagacaaccactcagctcttattgaagaaaatccagaaagtaccatttctgtgagccaagttaaacaagaacccaaagaaccagcattgtctatggaagcaaaaaaaactgtggactataagaaattatctgctacataaattattgaagcttttcagaatttacaactctggtgacttctgatgtcttagaaaggaaggtgaatatagtcaaagcgtggcattgagataattggactgaagaccagtttgatgagaagcttttatttaaaactgatatatttgttgccagttccatatttttaccttccttaagagatgttttactcttcttattttgtataatttttatgctctttgattatctaataaggccagtatttcaaaagctgttctgaatttatccacagtaatatagtctgaacacaaatagtttacttaacttatccttggaaatattcaattttggttattacaaaacagaaaagaacaacagcaacaaaaacattgtgtgaatgtatgtttgtatgtgtgtatgtatatcatgaattttttttttaagttctgaaaaagaacttgttctctccttaaagttgtgaagaaattgttaattgccagacaggtaagaaaatgtttataatctatctcattaagaaagatgaagtattagattttacatcataacacaaagtccagcagctacatctgtggaaactgtgcagttgcattttagcctcttcccttccgatttttgtacttttaactacaaaccagtagtatactaatggttatctaatagaaatttaaagtgtcttggtaagtactgagaatttttacttgaattaatcagataagcaacagaaatcaacatatgtagcatggatttgtgctatattggaagtaaaacactataggcagaaagatgtagaaattaagagaattgaaaaagaataatagaattccttggtgtttacagataatttggaaatgttgatgacacgctgaggaccatcgt

SEQ ID NO: 23772 - DNA, 6857 bp, Homo Sapiens
gccccctccgagctccccgactcctccccgcgctccacggctcttcccgactccagtcagcgttcctcgggccctcggcgccacaagctgtccgggcacgcagcccctagcggcgcgtcgctgccaagccggcctccgcgcgcctccctccttccttctcccctggctgttcgcgatccagcttgggtaggcggggaagcagctggagtgcgaccgccacggcagccaccctgcaaccgccagtcggaggtgcagtccgtaggccctggcccccgggtgggcccttggggagtcggcgccgctcccgaggagctgcaaggctcgcccctgcccggcgtggagggcgcggggggcgcggaggatattcttggtgatcttggaagtgtccgtatcatggaatcaatctctatgatgggaagccctaagagccttagtgaaactgttttacctaatggcataaatggtatcaaagatgcaaggaaggtcactgtaggtgtgattggaagtggagattttgccaaatccttgaccattcgacttattagatgcggctatcatgtggtcataggaagtagaaatcctaagtttgcttctgaattttttcctcatgtggtagatgtcactcatcatgaagatgctctcacaaaaacaaatataatatttgttgctatacacagagaacattatacctccctgtgggacctgagacatctgcttgtgggtaaaatcctgattgatgtgagcaataacatgaggataaaccagtacccagaatccaatgctgaatatttggcttcattattcccagattctttgattgtcaaaggatttaatgttgtctcagcttgggcacttcagttaggacctaaggatgccagccggcaggtttatatatgcagcaacaatattcaagcgcgacaacaggttattgaacttgcccgccagttgaatttcattcccattgacttgggatccttatcatcagccagagagattgaaaatttacccctacgactctttactctctggagagggccagtggtggtagctataagcttggccacattttttttcctttattcctttgtcagagatgtgattcatccatatgctagaaaccaacagagtgacttttacaaaattcctatagagattgtgaataaaaccttacctatagttgccattactttgctctccctagtataccttgcaggtcttctggcagctgcttatcaactttattacggcaccaagtataggagatttccaccttggttggaaacctggttacagtgtagaaaacagcttggattactaagttttttcttcgctatggtccatgttgcctacagcctctgcttaccgatgagaaggtcagagagatatttgtttctcaacatggcttatcagcaggttcatgcaaatattgaaaactcttggaatgaggaagaagtttggagaattgaaatgtatatctcctttggcataatgagccttggcttactttccctcctggcagtcacttctatcccttcagtgagcaatgctttaaactggagagaattcagttttattcagtctacacttggatatgtcgctctgctcataagtactttccatgttttaatttatggatggaaacgagcttttgaggaagagtactacagattttatacaccaccaaactttgttcttgctcttgttttgccctcaattgtaattctgggtaagattattttattccttccatgtataagccaaaagctaaaacgaattaaaaaaggctgggaaaagagccaatttctggaagaaggtattggaggaacaattcctcatgtctccccggagagggtcacagtaatgtgatgataaatggtgttcacagctgccatataaagttctactcatgccattatttttatgacttctacgttcagttacaagtatgctgtcaaattatcgtgggttgaaacttgttaaatgagatttcaactgacttagtgatagagttttcttcaagttaattttcacaaatgtcatgtttgccaatatgaatttttctagtcaacatattattgtaatttaggtatgttttgttttgttttgcacaactgtaaccctgttgttactttatatttcataatcaggcaaaaatacttacagttaataatatagatataatgttaaaaacaatttgcaaaccagcagaattttaagcttttaaaataattcaatggatatacatttttttctgaagattaagattttaattattcaacttaaaaagtagaaatgcattattatacatttttttaagaaaggacacgttatgttagcatctaggtaaggctgcatgatagcattcctatatttctctcataaaataggatttgaaggatgaaattaattgtatgaagcaatgtgattatatgaagagacacaaattaaaaagacaaattaaacctgaaattatatttaaaatatatttgagacatgaaatacatactgataatacatacctcatgaaagattttattctttattgtgttacagagcagtttcattttcatattaatatactgatcaggaagaggattcagtaacatttggcctccaaaactgctatctctaatacggtaccaatcctaggaactgtatactagttcctacttagaacaaaagtatcaagtttgcacacaagtaatctgccagctgacctttgtcgcaccttaaccagtcaccacttgctatggtataggattatactgatgttctttgagggattctgatgtgctaggcatggttctaagtactttacttgtattatcccatttaatacttagaacaaccccgtgagataagtagttattatcctcattttacacatgagggaccgaaggatagaaaagttatttttcaaaggtcatgcagttaataaatggcagagtgagcattcaagtccaggtagtcatattccagaggccacggttttaaccactaggctctagagctcccgccgcgcccctatgcattatgttcacaatgccaatctagatgcttcctcttttgtataaagtcactgacattctttagagtgggttgggtgcatccaaaaatgtataaaaatattattataataaacttattactgcttgtagggtaattcacagttacttaccctattcttgcttggaacatgagcctggagacccatggcagtccatatgcctccctatgcagtgaagggccctagcagtgttaacaaattgctgagatcccacggagtctttcaaaaatctctgtagagttagtcttctccttttctcttcctgagaagttctcctgcctgcataaccattcattagggagtactttacaagcatgaaggatattagggtaagtggctaattataaatctactctagagacatataatcatacagattattcataaaatttttcagtgctgtccttccacatttaattgcattttgctcaaactgtagaatgccctacattccccccaccccaatttgctatttccttattaaaatagaaaattataggcaagatacaattatatgcgttcctcttcctgaaattataacatttctaaacttacccacgtaggtactactgaatccaactgccaacaataaaaagacttttatttagtagaggctacctttcccaccagtgactctttttctacaactgccttgtcagtttggtaattcacttatgattttctaatgttctcttggtgaattttattatcttgtaccctctttttttttttttttttttttaaagacagagtcttgctctgtcacccaggctggagtgcagtggcacgatctcggctcactgcaagctctgcctcccgggttcacgccattctcctgcctcagcctcccgagtagctgggactacaggtgcccgccaccatgcccggctgatttctttttgtatttttagtagagacggagtttcaccgtgttagccaggatggtctcgatctcctgacctcgtgatccgcccgccttggcctccaaagtgctgggattacaggtgtgagctaccgcgcccggcctattatcttgtactttctaactgagccctctattttctttattttaataatatttctccctacttgagaatcacttgttagttcttggtaggaattcagttgggcaatgataacttttatgggcaaaaacattctattatagtgaacaaatgaaaataacagcgtattttcaatattttcttattccttaaattccactcttttaacactatgcttaaccacttaatgtgatgaaatattcctaaaagttaaatgactattaaagcatatattgttgcatgtatatattaagtagccgatactctaaataaaaataccactgttacagataaatggggcctttaaaaatatgaaaaacaaacttgtgaaaatgtataaaagatgcatctgttgtttcaaatggcactatcttcttttcagtactacaaaaacagaataattttgaagttttagaataaatgtaatatatttactataattctaaatgtttaaatgcttttctaaaaatgcaaaactatgatgtttagttgctttattttacctctatgtgattatttttcttaattgttattttttataatcattatttttctgaaccattcttctggcctcagaagtaggactgaattctactattgctaggtgtgagaaagtggtggtgagaaccttagagcagtggagatttgctacctggtctgtgttttgagaagtgccccttagaaagttaaaagaatgtagaaaagatactcagtcttaatcctatgcaaaaaaaaaaatcaagtaattgttttcctatgaggaaaataaccatgagctgtatcatgctacttagcttttatgtaaatatttcttatgtctcctctattaagagtatttaaaatcatatttaaatatgaatctattcatgctaacattatttttcaaaacatacatggaaatttagcccagattgtctacatataaggtttttatttgaattgtaaaatatttaaaagtatgaataaaatatatttataggtatttatcagagatgattattttgtgctacatacaggttggctaatgagctctagtgttaaactacctgattaatttcttataaagcagcataaccttggcttgattaaggaattctactttcaaaaattaatctgataatagtaacaaggtatattatactttcattacaatcaaattatagaaattacttgtgtaaaagggcttcaagaatatatccaatttttaaatattttaatatatctcctatctgataacttaattcttctaaattaccacttgccattaagctatttcataataaattctgtacagtttccccccaaaaaagagatttatttatgaaatatttaaagtttctaatgtggtattttaaataaagtatcataaatgtaataagtaaatatttatttaggaatactgtgaacactgaactaattattcctgtgtcagtctatgaaatccctgttttgaaatacgtaaacagcctaaaatgtgttgaaattattttgtaaatccatgacttaaaacaagatacatacatagtataacacacctcacagtgttaagatttatattgtgaaatgagacaccctaccttcaattgttcatcagtgggtaaaacaaattctgatgtacattcaggacaaatgattagccctaaatgaaactgtaataatttcagtggaaactcaatctgtttttacctttaaacagtgaattttacatgaatgaatgggttcttcactttttttttagtatgagaaaattatacagtgcttaattttcagagattctttccatatgttactaaaaaatgttttgttcagcctaacatactgagttttttttaactttctaaattattgaatttccatcatgcattcatccaaaattaaggcagactgtttggattcttccagtggccagatgagctaaattaaatcacaaaagcagatgcttttgtatgatctccaaattgccaactttaaggaaatattctcttgaaattgtctttaaagatcttttgcagctttgcagatacccagactgagctggaactggaatttgtcttcctattgactctacttctttaaaagcggctgcccattacattcctcagctgtccttgcagttaggtgtacatgtgactgagtgttggccagtgagatgaagtctcctcaaaggaaggcagcatgtgtcctttttcatcccttcatcttgctgctgggattgtggatataacaggagccctggcagctgtctccagaggatcaaagccacacccaaagagtaaggcagattagagaccagaaagaccttgactacttccctacttccactgctttttcctgcatttaagccattgtaaatctgggtgtgttacatgaagtgaaaattaattctttctgcccttcagttctttatcctgataccatttaacactgtctgaattaactagactgcaataattctttcttttgaaagcttttaaaggataatgtgcaattcacattaaaattgattttccattgtcaattagttatactcattttcctgccttgatctttcattagatattttgtatctgcttggaatatattatcttctttttaactgtgtaattggtaattactaaaactctgtaatctccaaaatattgctatcaaattacacaccatgttttctatcattctcatagatctgccttataaacatttaaataaaaagtactatttaatgattt

SEQ ID NO: 23773 - DNA, 4511 bp, Homo Sapiens
gtgatgcatatcttaaacttggcttctgtactggtatgagactatcagtacgatacgaagaaaatacaaagagagtaatacattgagaattagggagatgagtcacagctggctgttaccaggatgtgacatctgtgctgtgatctggatgaaaaaaagaaaaccctggggctgtacaaggaagaagattccaggaagaggaaacaatacgtacaaaggccctgaagcaggaatggacttaccctgtttgaggagtggctggggtccagaaatgggcaggaatgacaggagatgagcttgagggactgaggtggggtgtgggataggacagaggccagtcctgctgagttttctaagctgtgagctggaatttggattttactttaattacttgggaagccagtgcagaatgtgaggcaaggacctgatgtgagatcctaaaagtgcccttggctgcctgctggaggatgagctgtagggggctggagtggaagtggagagacactctcttcttacttctgtcactcttccttctccagcctctctttctctgcttgatgacgaaaactcacgacgaaaactcacagggtgcgtcgctggtaacccatgctcccataaagccgagacttgggaacgagccctgacgttctcagccgtcgagcttcacagagaagggtagctcgaattaggttccttatcttaaagagaataacagcagtcactttctcacaatcttgcgaacgccaaatggaaggatccctcgagagcgctgagaactcgccgagctcctcccgggaaacccggtaccacgaggcgccattttgcggatgggcaaaccgaggcccgcggggccgcgacttacccaggcctttttgcagtgggaggcgacggtggaggagggtggtctgggaccgggacaacaaagtccatcctgccgccggcttcgacgcaggtgccagaaaggtcccaaccccgcccaggcagggcgaggcggcgcggcccaggaacctgtcatggcggcgccgctgcccgacgccggaagtgcccgcctggaactacagctcccagcagaccccgcggcgcgctccggtcgacgccggggaagcagccgccattgtccgcggctgaggttgggatttgctgtgttcctgggcaggtgcctggtcaatcagtcctcgggatggcagccatcaacccgtgggcctcctggggtgcccttacggaccaatcttgggggatgacagctgttgacccatgggcctcctgggctctgtgtcctcagtatcctgcctggcacgtggagggaagcctggaggaggggaggagggccactgggctcccagcagcccaggttcaggaaccagtgaccttcaaggacgtggccgtggacttcacccaagaagagtgggggcagctggaccttgttcagaggaccctgtaccgtgatgtgatgctggagacctatggtcacctgctctctgtgggaaatcagattgccaagcctgaggtcatctccctgttggagcaaggagaagagccgtggtcagtggagcaggcatgtcctcaacgcacttgtccagaatgggtgagaaatcttgaaagcaaagcattgatcccagcacagagcatttttgaggaagaacaatcccatggcatgaagttggaaagatatatatgggatgatccttggttctccaggttagaagttttgggatgtaaagaccaattagaaatgtaccacatgaaccagagtacagctatgaggcagatggtcttcatgcaaaagcaagtactatcccagagaagctctgaattctgtggacttggggcagagtttagccagaacttaaactttgttccatctcagagagtttctcagatagaacatttctataagcctgatacacatgctcaaagttggagatgtgactcagccataatgtatgcagataaggttacctgtgaaaataatgattatgacaaaactgtttatcagtccattcaacctatttaccctgcaagaatacaaactggagataatcttttcaaatgtactgatgctgttaaatctttcaatcatataatacattttggtgatcataaaggaattcacacaggagaaaaactctatgaatataaggaatgccatcaaatctttaaccagagcccatcatttaatgaacacccaaggcttcatgttggagaaaaccagtataattacaaagaatatgagaatatcttttatttctcatcctttatggaacatcaaaaaattggtactgtagagaaagcgtataaatacaatgaatgggagaaagtctttgggtatgactctttccttactcaacatacaagcacttacactgcagagaaaccctatgactacaatgaatgtgggacgtctttcatctggagctcttaccttattcaacataagaaaactcatactggagaaaaaccctatgaatgtgataaatgtggaaaagtttttaggaatcgctcagcccttacgaaacatgaacggactcacactggaataaaaccctatgaatgtaataaatgtggaaaagccttcagctggaattctcatcttattgtacataagagaattcatacaggagaaaaaccttatgtttgtaatgagtgtgggaaatctttcaactggaactctcatcttattggacatcagaggactcatacaggagagaaaccttttgaatgtactgaatgtgggaaatcattcagctggagctcccatcttattgcccatatgagaatgcatactggagagaaaccctttaaatgtgatgaatgtgaaaaagcttttagggactactcagcccttagtaaacatgaaagaactcattctggagcaaaaccatataaatgtactgaatgtggaaaatccttcagctggagctcccatcttattgcccatcagagaactcacacgggagagaaaccatataactgtcaggaatgtggcaaagcattcagagaacgctcagccctcactaaacatgagataattcattctggaattaagccctatgaatgtaataaatgtggaaaatcctgtagccagatggctcaccttgttagacatcaaaggactcatactggagaaaaaccctatgaatgcaataaatgtggaaaatccttcagtcagagctgtcaccttgttgctcatcggagaattcacactggtgagaaaccctataaatgtaatcagtgtgaaagatcctttaactgtagttctcacctcattgcacaccggagaactcatactggagagaaaccatacaggtgtaatgaatgtgggaaagcatttaatgagagttcatcccttattgtacacctaagaaaccatactggagaaaagccctacaaatgtaatcattgtgaaaaagcattttgtaagaattcttcccttattattcatcagagaatgcatagtggagagaaacgctttatatgcagtgaatgtggaaaagcctttagtggtcactcagccctacttcaacaccagagaaatcacagtgaagagaaactgaattgaatttatgcgagtttttcgtttcttgtacatttgacaacacattgaggaaaaccctataaacataatcaagaggggacatttttcattaagagttcagtaagacttctcccacattatttactagaaaatatcatcttagaagaaaccccatgaaggaaaagaatagggaaaagctttcagcagttatttagcccttactcaaaatcagataattaacaatgaaggaaactctaaactccccttatggtctaccagtaattcatacttgaggaccatgactgtggggaatgaggcatcttttagcaagagctctcaccaattgtagattggtgtgaattgctaagggaaaaaccttatgcagagaaaagtttttgactggaaatacactgttttgcatcaagctggagtactggatggaaaactctacaataacattttgtgcataattgtagaaatacagattttgttgttataaggggagggtctgggtgcccaggagtagaatatgaagtgctaaatctgaatgtaagaaaaataatagtattgaatggggtatttactgttgattaacctccttagagaaaattaatgaatgagatgactaacggtagaaaagttattgcctaggagtgtgagactgatgttgctggacagaaagtgatccttagcccagtgtgtcagcgtccattgttactcatcactgcattgttgggcaattagtttgtaatttgttttaggcaatcactataaattataattatggacactgcatcagtatacataacatgaaggaataaaaaggatacagaattgtatatacatacttactgtaacacatctaaaaaaatgtatatgggtaaggacctgaaagatccatggaaaagttaacccagttgagatttttaaaaagttttacaaatacatataacacttatgtgctgggctttctttt

SEQ ID NO: 23774 - DNA, 1446 bp, Homo Sapiens
gcaggaggcgccgagccgggtgactgccgcggcgggcacagtccggggccacagcgccgagcccgggcgggagtggccccgcgcaggcagggagcggcgccgcgcactccaacccggcgggcacctcgggggcgggcgcggggcgcagccttctcgtcccggcctctgtgacaagcgccccggagccgggagcccgattgccgggctcggggtgggcgcggacgcaggcactgggctcgtgcggggccccgggcgtcgcgatgaacatcgtggtggagttcttcgtggtcactttcaaagtgctctgggcgttcgtgctggccgcggcgcgctggctggtgcggcccaaggagaagagcgtggcgggccaggtgtgcctcatcaccggcgccggcagcggcctgggccgcctcttcgcgctggagttcgcccggcgtcgggcgctgctggtgctgtgggacatcaacacgcaaagcaacgaggagacggctggcatggtgcgccacatctaccgcgacctggaggcggccgacgccgctgcgctgcaagctgggaatggtgaggaagaaattctgccccactgtaacttgcaggtttttacctacacctgtgacgtggggaagagggagaacgtctacctgacggctgaaagagtccgcaaggaggttggcgaagtctcagtcctggtcaataatgctggtgtggtctctgggcatcaccttctggaatgtcctgatgagctcattgagagaaccatgatggtcaattgccatgcacacttctggaccactaaggcttttcttcctacgatgctggagattaatcatggtcatattgtgacagttgcaagttccttgggattgttcagtactgccggagttgaggattactgtgccagtaaatttggagttgtgggttttcatgaatccctgagccatgaactaaaggctgctgaaaaggatggaattaaaacaaccttggtttgcccttatcttgtagacactggcatgttcagaggctgccgaatcaggaaagaaattgagccttttctgccacctctgaagcctgattactgtgtgaagcaggccatgaaggccatcctcactgaccagcccatgatctgcactccccgcctcatgtacatcgtgaccttcatgaagagcatcctaccatttgaagcagttgtgtgcatgtatcggttcctaggagcggacaagtgtatgtacccctttattgctcaaagaaagcaagccacaaacaataatgaagcaaaaaatggaatctaagaatctttttgtatggaatattacttctatcagaagatgatcaagatgtttcagtccagtgcacatcagcattgctgacattttatggattctaaacttgtgttgtttcttttttaaatcaactttttaaaaaaataaagtgtaaattaaccgacaaaaa

SEQ ID NO: 23775 - DNA, 4631 bp, Homo Sapiens
agatctgccctgtagagccttgcggttccactgctggcctccggattcccgggagcccccagcccgacaggacaaccttccttccccgcttcctcctttccagacccggcggcaggagaggggatgaagatggcggacgcgaagcagaagcggaacgagcagctgaaacgctggatcggctccgagacggacctcgagcctccggtggtgaagcgccagaagaccaaggtgaagttcgacgatggcgccgtcttcctggctgcttgctccagcggcgacacggacgaggtcctcaagctgctgcaccgcggcgccgacatcaattacgccaatgtggacggactcactgccctgcaccaggcttgcattgatgacaatgttgatatggtgaagtttctggtagaaaatggagcaaatattaatcaacctgataatgaaggctggataccactacatgcagcagcttcctgtggatatcttgatattgcagagtttttgattggtcaaggagcacatgtaggggctgtcaacagtgaaggagatacacctttagatattgcggaggaggaggcaatggaagagctacttcaaaatgaagttaatcggcaaggggttgatatagaagcagctcgaaaggaagaagaacggatcatgcttagagatgccaggcagtggctaaatagtggtcatataaatgatgtccggcatgcaaaatctggaggtacagcacttcacgttgcagctgctaaaggctatacggaagttttaaaacttttaatacaggcaggctatgatgttaatattaaagactatgatggctggacacctcttcatgctgcagctcattggggtaaagaagaagcatgtcgaattttagtggacaatctgtgtgatatggagatggtcaacaaagtgggccaaacagcctttgatgtagcagatgaagacattttaggatatttagaagagttgcaaaagaaacaaaatctgctccatagtgaaaaacgggacaagaaatctccactaattgaatcaacagcaaatatggacaataatcagtcacagaagacctttaaaaacaaagagacgttgattattgaaccagagaaaaatgcatcccgtattgaatctctggaacaagaaaaggttgatgaagaagaagaaggaaagaaggatgagtctagctgctctagtgaagaagatgaggaagatgactcggaatcagaagctgaaacagataagacaaaacccctggcttctgtaactaatgccaacacttctagtacacaagcagctcctgtagctgttacaacacctactgtgtcatcaggtcaagcaacacctacatcacctattaaaaagtttccaaccacagctacaaaaatttctcccaaagaagaagagagaaaagatgagtctcctgcaacttggaggttaggacttagaaagacgggcagctatggtgcacttgctgaaatcacagcatctaaagagggtcagaaagaaaaagatactgcaggtgttacacgttcagcttcaagtcccagactttcctcctctttggataataaagaaaaggagaaagatagtaaaggaactaggcttgcatatgttgcacctacaataccaagacgactagccagtacatctgacattgaagagaaagaaaacagagattcttcaagtttgcgaacaagtagttcatatacaaggagaaaatgggaagatgatcttaaaaaaaatagctcagttaatgaaggatcaacgtatcataaaagttgctcctttggtagaagacaagatgatttgattagttctagtgttccaagcaccacatcaacaccaacagttacctctgcagctgggcttcagaaaagcctgctttccagcacaagcactactacaaagattacaacgggttcttcctcagcaggcacacaaagcagtacctcaaatcgtttgtgggctgaggatagtactgagaaagaaaaggacagtgttcctacggcagtgaccattcctgttgctccaactgttgtaaatgctgcagcttctaccacaaccctgactacaactactgctggcactgtctcctccacaacagaggtcagggagagacgcagatcatacctcactcctgttagggatgaagagtctgaatcccaaagaaaagcaagatctagacaagcaagacaatctagaagatcaacacagggagtgacattaactgatcttcaagaagctgagaaaacaataggaagaagtcgttctacccgaaccagagaacaagaaaatgaagaaaaagaaaaagaggaaaaagagaaacaagataaagagaaacaagaagaaaagaaggagtcagaaacatctagagaagatgaatataaacaaaagtactccagaacgtatgatgagacttaccagcgttataggccagtatcaacttcaagttcaaccactccatcctcttcactttctactatgagcagttcactgtatgcttcaagtcaactaaacaggccaaatagtcttgtaggcataacttctgcttactccagaggaataacaaaagaaaatgaaagagagggagaaaaaagagaagaggagaaagaaggagaagataaatcacaacctaaatcaatcagagaacgacgacgaccaagagagaaaagaagatctacaggagtttcattttggacacaagatagtgatgaaaatgaacaagaacaacaatcagacacagaagagggatccaataagaaagaaactcagacggattccatttctagatatgaaaccagttctacatcagctggtgatcgatatgattccttgctgggtcgctctggatcatacagttacttagaagaaagaaaaccttacagcagcaggctagaaaaggatgactcaactgactttaaaaagagacaagaaagatttgctgatagatcactgttggaaatggaaaaaagggaacgaagagctctagaaagaagaatatctgaaatggaagaagagctcaaaatgttaccagacctaaaagcagacaaccagaggctaaaggatgaaaatggggccttgatcagagttataagcaaactttccaaataaaaaaaaaaaagcagcaagtaatggaattgcacatattagtaacccagtggaccataattggcagtcactggaagtctgggaagaatccttggagactgtcattttcggatatcctgccaaatgccctcttatctagaatttttgtttcattttgtttaattttctggggtgtttttgttgttgttggtttgttttttgtttttttttttaatcaagaccattgtttcatgttaatgcagctgctgagaagatttttttttaatgactgagaaaacttgtttacagctccagcatataaggaaagtgttcaaggccagatatgcctcagatatttaaccagtaagccttagttgtacataaatacttttgtgtcaacaaaaactttcagctctcacagaagacagttactcaacattttttgatgtgccacagtttcgagtttttcgatatttaaattttttggcttttcatctaagtttgggtttgtattttttccttctaaactcttcatgtggcagagtcttctatgttttcacggctttttcattacagaaaagaacacttgctcttctgtgattattgtcatgtattaggctaatgctgtgttgtctcccacctggaactgaattgcttggtggaacatatgctttcactgtttgtgcaatatgcatttatttcttatatgaatgctttaaagtcatttgaggttagatcttttaattcctattttctgcttcattggtcactttttttttattgtagtataagatgttagattctgtaatcttcacattcattttagcaggtactgagtgatgctgtatatacaaataagtgtattgttttgatttttagaccaccacatggcatgcttgactatttcttatttcaaatgtctgctaatgcagagtaggctactccatgatagtgttaaaaaacaaaatttgctaacaatgtgatataaagactttaaaagttacacattatgtggagccctatctttacaaaagtttcctactgtaaagtgcttttattttcagttttcatttgatagtactcaaccataattaaagttgcataagataattgctttacatttcacatacctatatttatctgagtgctgtctaaaactgttgtgctagccaaagtaatgctatgaaatcatttgcagaattaacccgtgagttaatgttaaatgcactgttattgccatgtgaagaggcatcgactttgataccaccatcatgttcagaccattttatacatttcagtggcctttttttttttaaggaaaaaaaagcgcaaaaccaagtacatagtgacgatggcttttatttggacaaatagcttttatattttcattaaaccatgcaaaaaatactacatctttctggcacataactgtctccttaaccactggaacagttcagccatttgaataaattgtacattgtaaagcttatagtagctgattgtattattgattgtattgtatactatattaaatgtgaatttgt

SEQ ID NO: 23776 - DNA, 3811 bp, Homo Sapiens
tttgcctaaggggataaggaaaaataatgtgaaagttgcagtccttatcagaagtaattgtttgcctaaggggataaggaaaaataatgtgaaagttgcagtccttatcagaagtaattgattagaattcagcaatgaatatgccaaatcgtacttatttcagatgatgcagccaacacgaacggttgtcatgtgtaacacaactttcgatcaccgcgaaaacaccgtcctgggaaagcgtccatgcttgatatcgtttggttcatgaacattaagtttccagtacaggtaaaatcccagaggaatccaaagccctctctttattggctcctgctccaaccatgacaagtctgatgcctggtgcaggattgcttccaataccgaccccaaatcctttgactactcttggtgtttcacttagcagtttgggagctataccagcagcagcactagaccccaacattgcaacacttggagagataccacagccaccacttatgggaaacgtggatccttccaaaatagatgaaattaggagaacggtttatgttggaaatctgaattcccagacaacgacagctgatcaactacttgaattttttaaacaagttggagaagtgaagtttgtgcggatggcaggtgatgagactcagccaactcggtttgcttttgtggaatttgcagaccaaaattctgtaccaagggcccttgcttttaatggagttatgtttggagacaggccactgaaaataaatcactccaacaatgcaatagtaaaaccccctgagatgacacctcaggctgcagctaaggagttagaagaagtaatgaagcgagtacgagaagctcagtcatttatctcagcagctattgaaccagagtctggaaagagcaatgaaagaaaaggcggtcgatctcgttcccatactcgctcaaaatccaggtctagctcaaaatcccattctagaaggaaaagatcacaatcaaaacacaggagtagatcccataatagatcacgttcaagacagaaagacagacgtagatctaagagcccacataaaaaacgctctaaatcaagggagagacggaagtcaaggagtcgttcgcattcacgggacaagagaaaagacactcgagaaaagatcaaggaaaaggaaagagtgaaagagaaagacagggaaaaggagagagagagggaaaaggaacgtgaaaaagaaaaggaacggggtaaaaacaaagaccgggacaaggaacgggaaaaggaccgggaaaaagacaaggaaaaggacagagagagagaacgggaaaaagagcatgagaaggatcgagacaaagagaaggaaaaggaacaggacaaagaaaaggaacgagaaaaagacagatccaaagagatagatgaaaaaagaaagaaggataaaaaatccagaacaccacccaggagttacaatgcatcgcgaagatctcgtagttccagcagggaaaggcgtaggaggaggagcaggagttcttccagatcgccaagaacatcaaaaaccataaaaaggaaatcttctagatctccgtcccccaggagcagaaataagaaggataaaaagagagaaaaagaaagggaccacatcagtgaaagaagagagagagaacgttcaacgtctatgagaaagagttctaatgatagagatgggaaggagaagttggagaagaacagtacttcacttaaagagaaagagcacaataaagaaccagattcaagtgtgagcaaagaagtagatgacaaggatgcaccaaggactgaggaaaacaaaatacagcacaatgggaattgtcagctgaatgaagaaaacctctctaccaaaacagaagcagtataggaccgacaagtgtacctctgcactcaatgctggaatcaaatccaaagcttttaattctctcaacaagatgtaaacaggaaagaaatctagttgagcatgaagataggatctaacagcttttccagttgttagatgactttgtggccatcttgttattgagtaagaaaataaagcatggacatcatgaaaataacagatgttacccaaactcatcttctaaaatctgtgcatttccatggtggctgacacacttgtcatgtggtctgttagtgtttgccaagaaccattgcaaataaattgaacatcaaagatccaagtttgtactatccctaaagactggagataagcattggaggctcttttaaaaaatgctagttactgaattttgtattgttttacttttttttttatttcaatatatacagtttgatgatgtgcttgaaattggtgcaaatatatacacacccttgtaagtgcaaagtatgtaagaagttttaacatttacttcacaggacttgtgattgtgttaaattctcactattgtgttttcttttgctcactgtttaggacaatttttctttaaaatagttttgcagattaaaattgcttaaataagtggattaaaaaactgacaatgcatgctactgttctctttcaaaaggaagagcaaccgtgttgaatactaataatgatgaattagtattcagtgtttagaatcattgggactacccacaaagtgagcatttctttttaaattttcttgacatttccaagcttattatgaataatattgcagtgtgtcttgtcagctgtaggtggcaaaggtgcccttataaaaaaggaaactggcttttcaaaatgggctatgggagcacaagctgaagctttagtgccttctacaatgtggtatactgttttctagaattttatatgtgctagtcattctcaattcatatggaatctagatggatatttcatgcatacccatagagaagtgtgtaagtgatatgtcagaagagcttcttactgatttcacctaaaatgagaaggaagtcctgttttcaagaatgacattagagtcatgcagctttgggaccatcagttttatactgtgataattgaaaatgaaacatgttcttattttccttaaattgaagaaaaccctttagttgtctacattggatggccttattacctctcaatcatcttttcataaatgatgtgcagaaattgtacttaaggacttaggagtatatgggaggttattggttttatgtttaaggatacgtttacttgagtttaagatacaggtcatccatcattcttaggctcactttttacagaaagtatgcaaatagtaaagtgacagcactgctaatgtttttccccagtactataacttgtggtttctgaactcattattgttgtatttccaaaaaagtaataccttttaattagtgtattaaaagttaagtataattattttaatgcaatctaatacaatcagattactcagttgccttacctcatgggaagagttacttttttagatctaaaaagctgaatagcatgttagttacttggtttcaacttgagttttcttttaatgttaataagattgaaactttagtatttagtggggaatggaaagagttgcccttgttgcaagtaatgaagcctgatttgattatgaagctgcttaatcactcttcatgtgttcagaattactgttttttttgtttgtttttcctttttgtcactgtgtacattaaaattttggaagatgctttactatgtaaagtatagatggtcattttaatcattcagccacatacggttggctggtaaacagcttattctgatacaagaatgcttgggtgcatatggaaagattgtgaaagagtgtgtcttgcatcaacagctgtcttatttatgatatataa

SEQ ID NO: 23777 - DNA, 2784 bp, Homo Sapiens
agcgtttggtcaatattgtcttaacatgcttcaaataaatcagcttctctccaagataaaatggcaaacccaaaagagaaaactgcaatgtgtctggtaaatgagttagcccgtttcaatagagtccaaccccagtataaacttctgaatgaaagagggcctgctcattcaaagatgttctcagtgcagctgagtcttggtgagcagacatgggaatccgaaggcagcagtataaagaaggctcagcaggctgttgccaataaagctttgactgaatctacgcttcccaaaccagttcagaagccacccaaaagtaatgttaacaataacccaggcagtataactccaactgtggaactgaatgggcttgctatgaaaaggggagagcctgccatctacaggccattagatccaaagccattcccaaattatagagctaattacaactttcggggcatgtacaatcagaggtatcattgcccagtgcctaagatcttttatgttcagctcactgtaggaaataatgaattttttggggaaggaaagactcgacaagctgctagacacaatgctgcaatgaaagccctccaagcactgcagaatgaacctattccagaaagatctcctcagaatggtgaatcaggaaaggatatggatgatgacaaagatgcaaataagtctgagatcagcttagtgtttgaaattgctctgaagcgaaatatgcctgtcagttttgaggttattaaagaaagtggaccaccacatatgaaaagctttgttactcgagtgtcagtaggagagttctctgcagaaggagaaggaaatagcaaaaaactctccaagaagcgcgctgcgaccaccgtcttacaggagcttaaaaaacttccacctcttcctgtggtggaaaagccaaaactattttttaaaaaacgccctaaaacaatagtaaaggccggaccagaatatggccaagggatgaaccctattagccgcctggcgcaaattcaacaggccaaaaaggaaaaggagccggattatgttttgctttcagaaagaggaatgcctcgacgtcgagaatttgtgatgcaggtgaaggtaggcaatgaagttgctacaggaacaggacctaataaaaagatagccaaaaaaaatgctgcagaagcaatgctgttacaacttggttataaagcatccactaatcttcaggatcaacttgagaagacaggggaaaacaaaggatggagtggtccaaagcctgggtttcctgaaccaacaaataatactccaaaaggaattcttcatttgtctcctgatgtttatcaagagatggaagccagccgccacaaagtaatctctggcactactctaggctatttgtcacccaaagatatgaaccaaccttcaagctctttcttcagtatatctcccacatcgaatagttcagctacaattgccagggaactccttatgaatggaacatcttctacagctgaagccataggtttaaaaggaagttctcctactcccccttgttctccagtacaaccttcaaaacaactggaatatttagcaaggattcaaggctttcaggcagccttaagtgccttgaaacaattttctgaacaaggactggatccaatcgatggagcaatgaatatcgaaaaaggttctcttgaaaaacaagccaagcatctgagagagaaagcggacaataaccaggcacccccgggctccatcgctcaggactgcaagaaatcaaactcggccgtctagcagctcccagaacccgcggctgccaccgcatccttataaacctgtcagcacgcatgagggtgtctgtgttcagggaaatgaatgactaataccattatttgagtcttatgtgaagacaacactattctaacacgagagataatatacatggtactgtttattcaactggggaaaaataaaactttgagcatttcccttggaactcgagatcagatcataactcatttgcctagaggcagcagaaatctgatcctgctactggagcttaaaataacaagtaaagaaaagtgttagaaacaaagctaaaattttaacatgattaataatagagaagttgggtttggttctgttgttatgattgttttgtcgtggtgcttgtgttcagttatattctctctctctctcatttcaaatactgcttgacaattcgaaaatgaaccaatgatgtgctgtggaatgtgatggttgtcttcatatagagtcacatggtttctctttttatgcagatatttataatcttcatcctatatcagtaggaataactataaggtgcactacaaaaagatgtatgcaaacaaacatgttttaaatcaggtcagatatctgatgaaaaatacgaactaatgttaagagcaagtagtttcaacatactccaggaactgagaaacaaaacaaagcaattgtgggttttgagctccatatactcttagcaagtaagggggcgtcttgcccctatatatcatcttcccggattccactccctgttgtgggaatcgcgcccacccccatccgtgtgttgtagccactcacggtttgcatcaagagtgttttttgtaactgcctctggacttgggacagtgagtaggatcaaaaataaataatgtacatgacggggaagggaaaaacctgttggagttgcttccagccagccacgctccgggccagcatgttggaatccagcgtggagcagatgcagtaaaaatgtggttggtttctgtgtgaaaaaaaaaa

SEQ ID NO: 23778 - DNA, 2580 bp, Homo Sapiens
tggtgaccaagagtacatctcttttcaaatagctggattaggtcctcatgctgctgtggtcattgctggtcatctttgatgcagtcactgaacaggcagattcgctgacccttgtggcgccctcttctgtcttcgaaggagacagcatcgttctgaaatgccagggagaacagaactggaaaattcagaagatggcttaccataaggataacaaagagttatctgttttcaaaaaattctcagatttccttatccaaagtgcagttttaagtgacagtggtaactatttctgtagtaccaaaggacaactctttctctgggataaaacttcaaatatagtaaagataaaagtccaagagctctttcaacgtcctgtgctgactgccagctccttccagcccatcgaagggggtccagtgagcctgaaatgtgagacccggctctctccacagaggttggatgttcaactccagttctgcttcttcagagaaaaccaggtcctggggtcaggctggagcagctctccggagctccagatttctgccgtgtggagtgaagacacagggtcttactggtgcaaggcagaaacggtgactcacaggatcagaaaacagagcctccaatcccagattcacgtgcagagaatccccatctctaatgtaagcttggagatccgggcccccgggggacaggtgactgaaggacaaaaactgatcctgctctgctcagtggctgggggtacaggaaatgtcacattctcctggtacagagaggccacaggaaccagtatgggaaagaaaacccagcgttccctgtcagcagagctggagatcccagctgtgaaagagagtgatgccggcaaatattactgtagagctgacaacggccatgtgcctatccagagcaaggtggtgaatatccctgtgagaattccagtgtctcgccctgtcctcaccctcaggtctcctggggcccaggctgcagtgggggacctgctggagcttcactgtgaggccctgagaggctctcccccaatcttgtaccaattttatcatgaggatgtcacccttgggaacagctcggccccctctggaggaggggcctccttcaacctctctttgactgcagaacattctggaaactactcctgtgaggccaacaacggcctgggggcccagtgcagtgaggcagtgccagtctccatctcaggacctgatggctatagaagagacctcatgacagctggagttctctggggactgtttggtgtccttggtttcactggtgttgctttgctgttgtatgccttgttccacaagatatcaggagaaagttctgccactaatgaacccagaggggcttccaggccaaatcctcaagagttcacctattcaagcccaaccccagacatggaggagctgcagccagtgtatgtcaatgtgggctctgtagatgtggatgtggtttattctcaggtctggagcatgcagcagccagaaagctcagcaaacatcaggacacttctggagaacaaggactcccaagtcatctactcttctgtgaagaaatcataacacttggaggaatcagaagggaagatcaacagcaaggatggggcatcattaagacttgctataaaaccttatgaaaatgcttgaggcttatcacctgccacagccagaacgtgcctcaggaggcacctcctgtcatttttgtcctgatgatgtttcttctccaatatcttcttttacctatcaatattcattgaactgctgctacatccagacactgtgcaaataaattatttctgctaccttctcttaagcaatcagtgtgtaaagatttgagggaagaatgaataagagatacaaggtctcaccttcatctactgtgaagtgatgagaacaggacttgatagtggtgtattaacttatttatgtgctgctggatacagtttgctaatattttgttgagaatttttgcaaatatgttcattgggaatattggcctgaaattttcttttccactgtgtctctgccagaatgtttgtatcaggctgatgctggcttcatagaatgagttaggcaggagcccttcctccttgattttttggcatagtttcagcaggattggtaccagttattctttctgcatcttgtagaattcagctatgaatccatctggtctagggcttttgtgttggttggtaagttttttattactaattcaacttcagcgcttgatattggtctaggaggggtttctgtctcttcctggttcaatcttgggagattgtgtgtttccaggaatttagccgtttcctccagattttcttctttatgtgcatcgacttgagtgtaaacataacttatatgcactgggaaaccaaaaaatctgtgtgacttgctttattgcagcatttgttttattttggtagtctggaactgaacctgcaatatcaccaaagtatgcatatagttgcaaaaatgtgatttttgacatagtaaatatgagtatttgcaataaactatgatattacttttgtaagtatatagaataaaatgtaaataatctataaaa

SEQ ID NO: 23779 - DNA, 1002 bp, Homo Sapiens
acaacaagggaggtgtcacagttttccatttagatcaacaacttcaagttcttaccatggaaaattccgagaagactgaagtggttctccttgcttgtggttcattcaatcctttcaccaacatgcacctcaggttgtttgagctggccaaggactacatgaatggaacaggaaggtacacagttgtcaaaggcatcatctctcctgttggtgatgcctacaagaagaaaggactcattcctgcctatcaccgggtcatcatggcagaacttgctaccaagaattctaaatgggtggaagttgatacatgggaaagtcttcagaaggagtggaaagagactctgaaggtgctaagacaccatcaagagaaattggaggctagtgactgtgatcaccagcagaactcacctactctagaaaggcctggaaggaagaggaagtggactgaaacacaagattctagtcaaaagaaatccctagagccaaaaacaaaagctgtgccaaaggtcaagctgctgtgtggggcagatttattggagtcctttgctgttcccaatttgtggaagagtgaagacatcacccaaatcgtggccaactatgggctcatatgtgttactcgggctggaaatgatgctcagaagtttatctatgaatcggatgtgctgtggaaacaccggagcaacattcacgtggtgaatgaatggatcgctaatgacatctcatccacaaaaatccggagagccctcagaaggggccagagcattcgctacttggtaccagatcttgtccaagaatacattgaaaagcataatttgtacagctctgagagtgaagacaggaatgctggggtcatcctggcccctttgcagagaaacactgcagaagctaagacataggaattctacagcatgatatttcagacttcccatttggggatctgaaacaatctgggagttaataactggggaaagaagttgtgatctgttgcttaaactaaagctt

SEQ ID NO: 23780 - DNA, 7284 bp, Homo Sapiens
caattgtgtgacacaggaagcccaagtgttggccatcctcaacgaaggcagctgccgggctccggtttgcttcagcaaaccctcacccctcgccttcaaccaggcgggtgtcgtcagctgtccgccagctgctgcccgcgcctttccgcccccgcgcgccggccaaggccgaggcggccgggaccagaggcgcgcgccctcagtgcatgtgacggggtgggagggggaggtttcttcctcccccgtccccaagccccgccttctccagagaggctgcggcttcctattgcgccaccaccgaaatgaccaccgtgccagccaatcaagacgtgattcatgaagtaagacccgccccttactggtccccaggttccttcccgctcacgccggagtcacttccgaagagagaaccgccatgaagagagaagggggtgccgcccacctctgctccgacagcctcccggagtcccagcagcaagacggcaaccacgcacccaacttctccagccacggctcatgccgccgtcgccagcggcgccgacatgacaaggcgctgcatgcccgctaggccaggtttcccctcatccccagccccggggtcgtcgcccccgcgctgccatctgagacccggtagtaccgcccatgctgcagcgggaaagagaacagagagtcctggggacaggaagcagtcaattatagatttcttcaaaccagcttcaaaacaagacagacacatgttggattcaccacaaaaatcaaacatcaaatatggaggaagtagattgtctatcactgggacagagcagtttgaaaggaaactatcctcaccaaaagaatctaaacccaaaagggtgccaccagaaaagagccctattatagaagctttcatgaaaggtgttaaagagcaccatgaagatcatggtatacatgagtcacgtcggccttgtctgtcactagcctccaaatatttagccaaaggaacaaatatctatgttccttcttcatatcacttgccaaaggagatgaagtcactaaagaaaaaacatcgatccccagagagaaggaagtcactattcattcatgaaaataatgagaagaatgatagagatcgaggcaaaaccaatgcagactccaaaaagcagaccacagtggcagaagctgacatcttcaataacagctccagaagccttagcagcaggagcagcctgtccaggcaccacccggaagaaagcccactgggagctaaattccagttgtcactagcttcttactgcagagaacgagaactaaagaggttgagaaaggagcaaatggagcagagaatcaactccgagaattctttctcagaagcaagcagtctttccttaaaatctagtatagaaagaaaatataaaccaaggcaggaacaaaggaaacagaatgacatcatacctggaaaaaataatctgtcaaatgtggaaaatggacatctctcaagaaaaagatcctcttctgattcatgggaacctacttcagcaggctctaagcagaataaattccctgaaaaaagaaaaaggaactctgtggactcagatctgaaaagcacaagagaatctatgataccaaaagcaagagagtccttccttgagaagcgtcctgatggaccacatcagaaagaaaaatttataaaacatattgcactgaagacacctggtgatgtgttgcgcttagaagatatatccaaggaaccgagtgatgaaactgatggctcttctgcaggcttggcaccttcaaattctggcaattctggccaccattctaccaggaatagtgaccaaatccaagtggcaggtaccaaggagactaagatgcagaaaccccacttacctttatctcaggaaaagtctgcaattaaaaaagctagcaaccttcagaaaaataaaaccgctagctccacgacaaaggagaaggagacaaaactacctttactttcccgtgttccaagtgctggttcctctctagtaccattaaatgctaaaaattgtgctcttccagtttctaaaaaagataaagagcgttcctcatctaaagaatgttctgggcattctacagaatccaccaaacacaaggaacacaaagcaaagactaataaggccgattctaatgtatcttcagggaaaatttatgggggacctttgcgctcagaatatggcactcctacaaagtctccccctgctgctttggaagttgtgccatgtatcccaagccctgcagcaccttcagataaagccccttcagaaggagagagttcaggaaattccaatgcaggtagcagtgcactgaaaagaaaactaaggggtgattttgatagtgatgaagaaagtttaggttacaacctagacagtgatgaggaagaggaaacattaaagtcactggaagaaataatggctttgaacttcaatcagactcctgcagctacaggaaagcctcctgctctttccaaggggcttagatctcagtcatcagactatacaggacatgttcatcctggaacttacacaaataccttagaacgtctagtgaaggaaatggaagacacacaaaggctagatgaactgcagaagcaactacaagaagacataaggcaaggccgaggcattaaatccccaatcagaattggagaagaagacagtacagatgatgaggatggcctcttagaagagcacaaggaatttctaaagaaattttcagttacaattgatgctattcctgatcatcatccaggtgaagaaatatttaatttcctcaattctggaaaaattttcaatcagtataccttggatttaagagactctggttttattggacaaagtgctgtagaaaaacttattcttaaatcgggaaaaacagatcagatttttttgacaacacaaggtttccttacgtctgcttatcactatgtccagtgtcctgtccctgtgttaaagtggctgtttcggatgatgtcagttcatacagactgtattgtgtcagtgcagattttaagtacattgatggaaataacaattagaaatgataccttcagtgactcaccagtttggccatggatcccatcattgtctgatgtagcagctgtgtttttcaatatggggattgattttagatctttgtttcccctggagaatcttcagccagactttaatgaagactatctagtttctgaaacacagacaacatcaagggggaaagaaagtgaagattcatcttataagccaattttttcaacacttcctgaaaccaacattttaaatgtggttaagtttctaggcttgtgtacatctatacatccagaaggttaccaggatcgtgaaataatgttgctgattttaatgttatttaaaatgagtttggaaaaacagctgaaacagattcctttagtagactttcaaagcctcctgataaacctgatgaaaaacatcagagattggaacacaaaggtgcctgaactctgtctgggcataaatgaactctccagtcatccccacaacctcctgtggttggtacagctggtccctaattggacatcacgtggaaggcaactgagacagtgcctcagtctagtgattatttcaaagcttttggatgagaaacacgaagatgttcctaatgccagtaatctgcaggtatcagtcctacatcgctatcttgtgcagatgaagccttctgatttgttaaagaaaatggtcttgaagaaaaaggctgaacaaccagatggcattattgatgacagtcttcatttagaacttgaaaagcaggcatattacctgacctacattcttcttcatttagtcggtgaagttagttgttctcattctttttcttctggacaacggaaacactttgtgctactctgtggggctttggaaaagcatgttaaatgtgatattagggaagatgcaagacttttttacagaactaaggtgaaagacttggtcgccaggatacatggaaaatggcaggaaataatccagaactgtcggcctactcaggggcagcttcatgacttctgggtaccagattcttaataggagttgcagcagcaaaaatatgaaccaagagaaattcaataagagcctttcatagaggagtagaaaggattattacagaatccaatgaatgccaagaaaatgtacagcaaatgtgccacttgaatatctagtatgaagctggtaatgaagaaattgccatttctgaagcagatatgaaatatgatctgcttaattgttaaggcaactgacctttcaaaagtgcagagtcttattaaaagaggggaggggtagaagcagaataatagtcatatgtctaacctgccccagttaactcctcttgttaaattataagccagttatcttttttagatagtatttttgtcacttggataatcacaggaaatatataagaaaagagcttggactaacttgagaagttggacatggaaagcaagaccaagttccagttgggtttaattttccctcttggttattttcggacacaaagggaatgcttaaaactgagtttagtaataaaaagcataaatctcttctgtaacttttataaaccacagggaggtttcaatccatgcattttccttcattactcaagattataaatctgtttttaaaatacatctaaacaaacagttgagaaacaaaagtttggcatgttgtcagatccccttaagaggaagaggttaagctgtaaagtagtggccctgttttgatgccagaacattcatatgctgtttgttctggatttcttttaaatgcatgtattttaaatactggttaaatcttagaatcttggctatatcttagaattctggctcttggtaaccatattacagaagtctatattgtaaaagcctaaagatctggacaagtttccaacaaccttgtttccatgagtatataattttggcagacacctgaattctttgggacactgtgtctgtgtatgtgtgtgtgtgtgtgtgtgtgtgtgtgcgcttgtatcttgaagttgttgcacttcaaaaccacagctgctgtaaattcttaaacactggagagccatcctttggtttaaatggtagagggttagtggaagtgcacacgttgtttttagcccaggggtagtaacaaactcttactagccaactagaaaattattttgttgacgagatgtcccttttaggagggtttgtttcctgaaagaatgccaactttttttgttgttctttcagtattggcttgagtgacctgttctcctgagtgctctagtgtctccagttgtgggggggaaagatgatggaggggaacagaaactggacttgatgtttgcggtttgagaggcaagaaaataaaataactttctacctctaaattgaggcttaggagtaaaaagcattttgtcctaaatttatcatttaaaatagcatcagtaacttttgagctcatgtcaatcaagcattggcagtcagagattttatagggaagactaagtaaatccagtttccaagaacctaaactgattgaggctccaagagtcagaccaacaaaagttttattctgtgttgtttactggtaagaatattattatcttgatactacctctcaagggtattgttacaaaatgccacttatggttaaagagatagatacaaagagttctatttgacagaagcttgaaactctggcatctatctgcccaacgatgggggctttcgttctgtaatttaatcctttgtagatacattatttgtgtgtaattttatacgtgttcatatttttctcattttgcattgtgtaaagtgtacaaaatctcaaagtataaaatactgcttatattgcttgtaatttacagtgtgtaaatattttctaattgtgtacattgatgggggggacaagtgggttattcaggtttttttttaatgacccttttgtattgcagtttcaacagataactgtccatcaaatttaaaaccactttgatacatttttatttaacagttccaataagaaaaaaatctctatttttaattatatttctcctttagaaaaaaaatacttcatggtccctctaaaataaatggccagacctcagtttaggcccttgtatttatgactctggtagaggtcttcagactccaggtcatagtccagtcagtatttgcatttgggttctcatgaaaactttgtgactctcttttagcacaagtagcccatggtttttcttccaaatcaagtattttacttctcccttgagtccccatgctttgtctccctcctgctgctattgcccggtgaatgggatggtagagagggagaaatgttcattgcacagagaatgtcaggccactttggggacttggcaaacgaagcttgcactgagtggtggtgtgtttggcaatattactgtgccaaaaatcaccttgtctaattttatggatatgtatggcaaacttattacccttcttgcaagctgcacattaaggtacttgtaagtgtttatgcttttgtgtgtaactgtttgccttttctaactgcttttcttgttactgaaaatataattctactagttttatcacattaagaggctctccatgcacaaaatgcattgatgtagccgtaaagtaacagcatttgtacattttctatctcctgatggcagtggtgcctttgtcaccttttggaaggtttgcattttgtttctgctttcaagcgcaaatagtagcttgctttcagcttcacaaaaatctcctcaaatgtaaaagatacaaaatggcgtgttatcatccaggcttagttggagtatttgcatttttatttttatcaaaacaaatataattggtggggactggccagtaataatgtgtggcgtctttaagccaagagtaatttttaaattaaaaatgaaaattttaagaggtagcccattaaacaagctactgagttggagaattaggggatgactgtggtggtttgtcgctaaggaggcaacagtagggtccaggcggcggggcacgtagagcagttagcatgatccatggttattccttactcatgaacagtgtcggcgcacctcattatctgtgcatttgtttttcctgggcagtcctgtcagccagttaatccaccagctcttaggaagtaaatacagatttttttctttccttttttttttttttaaagattttatactacatcttgttaaagtcctatgaatgtgtgtgtgtgtgtgctattaaaactgctttttctcagtttg

SEQ ID NO: 23781 - DNA, 3353 bp, Homo Sapiens
atgacggatttttggcatccttatctggactgcctttctttaggaataaacagatgatacagagcaaagtttgtaaatctcaaatgcagcggttaacctctttgaggctggcccactgggtcaccaggggcagcttctaagtgggaaatgtttcgatggaattctggttacataaggaagttgctttgaaaatctgggatagttttctataatggaatcattcccttgtgtctttattcacgatgaagtgtagagtgaaagatgcctccactgggggtattggtgcacgagaaaagccacctgtgtgacgtaaattcattctgtttaggcaaagctgggactgccacattggcaatgtcagagaaggtgcggacccggctggaggagctggatgactttgaggagggttcccaaaaggagctgttgaacttgactcagcaggattacgtgaaccgcatagaggagctcaaccaatcgctgaaggatgcctgggcctcagaccagaaagtgaaggctctaaaaatagtcatccaggaagagctcgtgtacgagcgcatcttttccatgtgtgtggatagccgcagcgtcttaccagatcacttttctccagagaatgcaaatgacacggccaaggaaacatgcctaaattggtttttcaagattgcctccatcagggaactcattccaagattttacgtggaggcatccatcctgaaatgtaacaaattcctctccaaaacgggaatttcagagtgcctgccccggttgacatgcatgatcagagggatcggagacccactagtgtcggtgtatgcccgtgcctaccttggccgggtgggaatggaagtggccccacatctcaaagaaaccctaaataagaacttttttgacttcctccttacgttcaaacagattcatggggatacggtccagaaccagctggtggtccaaggagtggagctcccatcttacctccccttgtacccgcctgccatggactggatcttccagtgcatctcctaccatgcccccgaggctctgctgaccgagatgatggaaaggtgtaagaaactaggaaacaatgccttgctgttgaattctgtgatgtctgccttccgggctgagttcatcgccacaaggtctatggatttcattggcatgattaaagagtgtgatgaatctggtttccccaagcatcttctttttcgatcactgggattaaacttggccttggctgatcctcctgagagtgaccgacttcagattctcaacgaagcttggaaagtcatcactaagctgaagaacccacaggactacattaattgtgccgaagtgtgggtggaatacacctgcaagcatttcacgaaacgagaggtgaataccgttttggcagatgtcatcaagcacatgactccagatcgtgcatttgaagattcctacccccagcttcagttaataattaagaaagttattgcccacttccatgacttctcagttcttttctcagtggaaaaatttctgccgtttctggacatgttccaaaaagagagtgtgcgggtggaggtttgcaaatgcatcatggacgcctttatcaagcatcaacaagagcccaccaaggacccggtcatcttgaatgcccttttgcatgtttgcaagaccatgcatgactctgtgaatgcactcactcttgaggatgagaaaagaatgctgtcatatttgattaatggatttataaaaatggtttcctttggccgtgattttgaacaacagctgagtttttatgttgagtccaggtcgatgttttgcaatctggagcctgttcttgtgcagttgattcatagtgtgaaccggttggcaatggagacaagaaaagtaatgaaaggaaatcattccagaaagacagctgcatttgtccgggcctgtgttgcctactgcttcatcaccatcccctccctggcgggcatcttcacacgtctcaatctctacctgcattctggtcaggtggccttggccaaccagtgcctctcccaagctgatgcttttttcaaagccgctataagccttgttccggaagttccaaagatgattaatattgatgggaagatgcggccatcggaatcgttccttctggaattcctctgcaatttcttttctactttattaatagttccggatcatcctgaacatggggtcctgtttcttgttcgagagcttctcaacgtgatccaggactacacctgggaggacaacagcgatgagaaaatccgcatctacacctgcgtcctgcatctcctctccgccatgagccaggagacgtacctttaccacatagacaaagtggactccaacgacagcctctacgggggagactccaagttcctggcagaaaacaacaagctgtgtgagacggtgatggctcagatcctagagcatctgaaaaccctggccaaggacgaggccctgaagcgccagagctcgttgggcctttccttctttaacagcatcttggcccatggggacctacgcaacaacaagctcaaccagctctccgtcaacctgtggcacctggcacagaggcacggctgtgcagacaccaggaccatggtgaaaacgctagaatacatcaagaagcaaagcaaacaaccagacatgactcatctgacggagctggccctcagactccctctgcaaacaaggacctgacccccgggcccatccccaggctcagggactctggtgccaaatccagaaagatctgctctgctgccctgaactcttacggcaatttaggtttctcatttttcttttctttttacatatgtacaaattgttttaagctttggcctctatccaggttattctgacaatgaagaaatgggagttgtcagagcattaaaatgcaatcttcactaagaagcagtctctgtgttgtctttgcacaagtggccttcggtctactcagcccgatctgatgggcctttttagcaagagagaaacaagaatgcaagtaacatctttcttctctggaaggtgtttgttttttcatagtttagaaataaggactttaaaagtggactgcttttcaaagtgccactgttccagacccattccattccagactttgtaccttaaagttagagcacacccaaagtctggaactgtgttacctgaacccctatggaggatttataaaaggcagaaatagcactccattaactctttttcctatcaaaagcagctcttgattggacttagaatctgtgttggtggatcaaaggagaaagcgaggtcaaatttgagattctctgtggcttcagtatacagtaactgaataaatgtcctgaaggagcatt

SEQ ID NO: 23782 - DNA, 4161 bp, Homo Sapiens
agatacttaaataattaacaaaatatatttaaaatgagtgggagaacttcctccattaaaccctgttgaaaatgtgtgagtggttgtcatgccccagacatcaaggaacccatccatgaggtcttcccacacagactggcctcaggaagggaaggaggaggtaggccgctctgacagccacaacccgagttgaggaaacaagcaaaggaacacagagagtctacatacagtaaaaggtgacaggagttaagctgcacacaagggaagcagagatgggttggaggcagttaagggtgcgttgctgcctctgtggctgaggtgagtgcaaagccctacatggtcccctgtttagagaaggctattgtttcaaacatattttacttggtccccggaggcagcatgaaactatgaaagaaagagccttaccccttttttcaaggctctccagaccacagttctgggatgggtgtgggtggttgccattcgttcatttatgcctgtctgatatggagcctccctctgttaccagccctgtgcactcaagtgccttgcagtccagtgaggaataactgtagataagatgagatgatgggcattaagtgtaactgctgagaagccttcatagagggaaaggtgataagaactgagtttttctggcatgaggagtttaccaggcaggagaggtggagacgctaggctaggcaaataggctgcagccatagttctgctgagaaacaggttttgaaccaaggcaactccatctggagatatgtatcagaaagattaggagatagaatctccatcttggtcacttatttggtcttctaagacagcaatgggaccgtctcttaaatactggagttgtcctatctccttgggctgataccctgaactgtcatttgggtgagtaacacattaaggggtagacggtcggtttgggggaataaactaagtaactaggttgcggttcctcctgccgactaagcagacctcctggtgcgtggtcttgggttgccctgtgagccctgaagctgtgaatgggccccacagatcactctaaagccaagcatccatgtgtgcccggctggggatctagacccccctggtctacccaggaacctgagttttggtggtctgagacacctgggggacgacgtatcccggagaagggaccaggattaaaggccgctccccaggctgcccggagactagaaggaaggcgaggtagccgcagtcccagggagggtcttaccccttgctcccgggatgcgttatggcgggcctggctgtgcgagatctaggctagtggctttggctgcgaacggattagatctgatccgattagagcctgggcggtcggcttcgcccccttgccaggctctgccaacgcccgcccctccctcgtggagacccggagacctccctgagagccttcccgcccggaacacgggattggtgcagaatccgagaggctccatgcgccccgggcctggcttgtttccacagtgggggctcgtgcttccgccccctgcggctcttctggaccccgccccgaccctgcgggtaactgggcccgcgacgtccccgcctccgtgcttgccgcgtggcgggtgggttcctccgggtcggggccccgtgccgcctgttcacctggggcgggaccgtggccccatcccacaggtctcccgcccgtgcacctgccgcctaacgccgcgcgccgcgccgtgcgcctgcctcgcgctccccgtccgcctgccccgcactccccgtccgtgtgtctcctagtccccagcgaggggtctgtctgttcccctggcaggctgaccaaggggccggcgtcaccgctacgtgcggcggggccggcgcggcgggcggggtgagggcggcgctgagcgcagcggcggcagcggcggcgcgggaggcggggaggcgcggcgcgccggggacagcggcggacggcggcggcggcggcatgcggctcctcgcgctgcccatcgtgggctgaggcggccgcagaaccggcgggaggcgcggcggccgggcgagccgagggcgcagccagccgggcggaccgcggacagcggtcggggcgccgcgccatggggcgagccgggggcgggggcccgggccgggggccgccgccactgctgctgtttctgggggccgcgctggtcctggcctctggggccgtgccggcgcgtgaggcgggcagcgcggttgaggccgaagagctggtgaagggcagcccggcgtgggagccgcctgccaacgacacgcgggaagaagccggcccaccagcggctggggaagatgaggcgtcgtggacggcgcccggtggcgagctggccgggccagaagaggtgctgcaggagtcggctgcggtgaccggcaccgcctggctggaagctgacagcccaggcctgggaggagtgaccgcagaggcgggcagcggcgatgcccaggcccttccagctacgctccaggctccccacgaggtcctcgggcagtcaatcatgccccctgccattcctgaggctacagaggccagcgggccaccctcccccacccccggcgacaagctgagcccagcttctgaactccccaaggagagccccttggaggtttggctgaacctggggggcagcacacccgaccctcaagtgccagagctgacttacccatttcagggcaccctggagccccaaccggcatcagatatcattgacatcgactacttcgaaggactggatggtgagggtcgtggcgcagatctggggagcttcccagggtcaccaggaacctcagagaaccaccctgatactgagggagagaccccttcctggagcctgcttgacttatacgatgatttcacccccttcgatgaatctgatttctaccccaccacatccttttatgatgacttggatgaagaggaggaggaagaggaggatgacaaagatgcagtaggaggtggagacctagaagatgaaaatgagcttctagtgcccactgggaagcctggtctggggcccgggacaggccagcccaccagtcggtggcatgctgtccctccacagcacactctggggtcggtccccggcagcagcatcgccctcaggccccgcccaggagagccaggcagggacttggcctccagtgaaaatggcactgagtgccgcagtggctttgtgcggcataacggctcctgccggtcagtgtgcgacctcttcccaagttactgtcacaatggcggccagtgctacctggtggagaacataggggccttctgcaggtgcaacacgcaggactacatctggcacaaggggatgcgctgcgagtccatcatcaccgacttccaggtgatgtgcgtggccgtgggctcggctgccctcgtcctgctcctgctcttcatgatgacggtgttctttgccaagaagctctacctgctcaagacggagaataccaagctgcgtaggaccaacaaattccggaccccatctgagctccacaatgataacttctccctctccaccattgccgagggctctcacccaaatgtaaggaaactttgcaacactccccgtacctcctccccccatgcccgtgccttggctcactatgataacgttatctgtcaggatgatcctagtgctccccacaaaatccaggaggttctcaagtcctgcctgaaagaggaggagtcatttaacatccagaactccatgtcgcccaaacttgagggtggcaaaggtgaccaggctgacttggatgtgaactgtcttcagaataatttaacctaaagcagagcaagaagagaggaagcgggggtagtgggtggggggtaggggaagaaacattatctcctcttgtacagagtctatttcttgtaaccatttgttaaactcttttctttttctgatctcatggcatgcttttatgtattttgtacaggaggcaaaaaaatacttaaaataagcaaagaaactgaacagaattgcatacattgggttgttttttctgtgctgtctgtacattgcttctgctgctgtgatttctaaacctgtgctgttattcaactgacttttttttgtactttgacccacgtttttttgaaataccagtaaaaaacaaagttcttgaaataaaactttttaaaaagtt

SEQ ID NO: 23783 - DNA, 1631 bp, Homo Sapiens
tttaactggagcagggacttacagggacaggcaagtcagtaaagggcccaggttacaaacgagttataaccgatcagaccgacgagcgcccgcgtgcagcgcctcctgccgacgcgcgcctcgcagccttcagtcaatgctgacagctgttctccaacacccagctaggggcgggagggtccgcccacttctaccagattttgcacacaaaacagtggaaagaccattctcatggctccaagccgttttctcccttcatcgcctgcaattttagggcttttcggggggtatgactgcagggattttagaggtttttttcctcattctctttttaagaggtgataaaaagcatttaaattagcggcagggcggttaacacccgcagccctagcctctccgcacttctcgtcgctcgtccgtgttcactccacgcctggcctcgggtaggagcygcatagcgccaacggttgcgggtcgcaactactcccaggcggcgcgccttgcgcgccgggcctcccaggaccgcggcgagttcagaaggcgcggggagagaagtgaggtcgagcagcgggcggcttttgacgaacggccctcacagccaatgggaagcccggtcgactttcccgcccctgccaatagggagcagaacccgggccggggggggcgcttcccgcaggctgcggctggattcgatcctgcgcgacggccgcgaaggcgggggcggaggctcggcctgcgcggctgggagcggcttaggggaggagggaagaccggaagccacggttgcgtccccatccttagattcgctcctccgggcagggagcggagacggaggaggaggagggagaggctgaatgttggctcggtaattgagaggagcggccgctccagagcttcctcccggggcgcccccctcagtccgtccgcgcttctcagccgccagtctcctggccgcgcagtccccgcggacggccgggccgcggagaccctcgcagaagaggcgctgccggcggcgaggactggccggcggcatccgaggcgcgcgccccaccgccacccccacccgcctgccagccggtccctccggccgccgccatgtcctcctcctcttcctcccccagggagacgtacgaggaggaccgggagtacgagagccaggccaagcgtctcaagaccgaggagggggagatcgactactcggccgaggaaggcgagaaccgccgggaagcgacgccccggggcgggggcgatggcggcggcggcggccggagcttctctcagccggtaacaaagcgcggcccccctgtccgctgtgcctggctgctccccgggaagcagggcctcggtgcggggcctcccgcttgcttcagttagccttttccgctgcgccgacccgtttggggaagcgcccactcttctctttggggctcgtattctggcctctacctgtttcccgcatcccgactgcraacccggcgccgtcctggccgcaggccccgcagcgagtccactgccgggccctgaacttggggagggtcgcggcgcggcggcggcggcggggaggcgtcgcttccgctctggggggtttcgcggctcggggagctctttgttagtttaactcctcgggctcg

SEQ ID NO: 23784 - DNA, 1102 bp, Homo Sapiens
agaggcggggtttcacttcattagccaggctggtctcgaactcctgacttcaggtgagccaccgcatctggccaattttacttctttatattcctgctttatattcaccatatttcttatatttagtataaaaaggtgaagtaatttactctgatacttcaaggtgatcttgaaagtttgatgaagtgaaatattaactgttttttactttttacagatggttccaatccctatacattgaagctttgcttttctacatcatcccatttataagaagagaagagcatgttagaatttatgttcacctttattacaatttcaaagctacacttcattaaaaaaaaatctaaaatggttgatctcatgttgccttgcttactttaagatcctgttctgtaataaacatattttgccttgagtaaatttgttgtaagcttaaatattgaattgttttcattttaagatagaatatcataatgtagactatctacagcttcattgtagattatacagatatatgatttctaaccttattactggaatttttcttccacagtaaaaatatatttgcattcttaatgctaattatctgcaagtattttttcattgtgtaagagattaatgcaggtgaaagtattgcattttaatatagaattcctattatatgtttagatgtttaagtatgttgcagttactcatattaaacataacttgtatatttattattttaatgaagtttgagaataacgttacatatgttgaattttaagtactacagatttaactgattttatatttctgaaaggctaacagacatggatacacgtgtacagtatgcattcaaacttatttaaattggtgtatttttttttaagtcactgtccatttgtattgacatgcctctgtttctagtccagtttggagattttataaagttataacaatgagttaatgtgttcattttcatttgttgcatgtgacttaaatacagctagtatttggcattgagattttaatagaggttataattaacagttcctcttatagataataatctgggatccatgggtgggcttcagagaatctgtgtaccccctaaaat

SEQ ID NO: 23785 - DNA, 2263 bp, Homo Sapiens
gctgatccctcaatttctagcacataatttcatcactagttcacttacaaacctcagttttcccatgtgtaaaataggaattaagtgatcacaaggccgctctatggagccctcatcctaaggttacaatgagtacatatcagttgtaggagtccttttatccaacagtgactccgtcaagcccttgccgtatgctagggcttgtagtggacacccgaagaaccataaggagtaagatgaggctggttgcagagagtacagtctcatcagaagaacttgctcttgtaataaattcaatcattgacaatcattatttccacccaatctgtgaaacagaataccgttatttcttttttttgagagagagtcttcttctgtcgcccaggctggagtgtagtggcgtgatctcagctcactgcaacctccacctccacctcccgggttcaagcaattctcgtgcctcagcctcccaactagctggagctgcaggcgcataccaccatgcccagctaatttttgtattatttgtagagatggggttttgccacattgcccaggctggtcttgaactcctgtcctcaggttatccacctcccaaagtgctggggttacaggcatgagccactgcgggatctcactcggtcacccaggctggaatgcagtggagtgatcatggctcgctgtagccttgacctgggctcaagcgatcctcctgcctcagcctcccaggctggtctcgaactcctgacctcaggtgatctgcccaccttggcctccctaagtgctggggttacaggcaagagccaccgcgcccagccggaaattccattttagactggaagccacagtataaggaaaacagctccttggagtgcattcagagtatgactccatggccaggacagggaggggctctaacataaaaagaactagggggttcggagacgttcctaatcttggggtagcagggaaagacggcagcaccactggacagcaggagcaagaggaataatttcaggaatctgggacgcgaaaagataagggggaagggtcatgggggcatttgtgggttctgtccttgtagttctcaagagccgaccagaaagaaaggccaggggacggagccaggctttttctgagagacccctgtagaccccagccaagcatagaggctggcgagaggaaacttttttgtttttgcttctgagacagtcttgctctgttgcccaggctggagtgcagtggcacaatctcagctcactgcaacctccccgtcctgggttcaagtgattcccctgcctcagcctcccaaatagctgggactatgggcatatggctccccatcctgggttcaagcgattctcctgccacagcctcccgagtagctgggactacgggcatatggctccccatcctgggttcaagcgattctcctgcctcagcctcccgagtagctgggactacaggcatatggcaccacgcatggctaattttcttatttttagtagagataactcctgggctcaagcgatctgcccacctcggcctcccaaagtgctgagattacaggcacatgccaccacacccagctaattattgtgtttttagtagagacggggttttgccatgtttgcccaggctgctcttgaactcctgggctcaaacgatccacccacctctgcctcccaaagttctggggttacaggcatcagccaccatgcccagccaggaagcttattcccagtggtctggctctccagagttgccacgctgaaagatgcttgctctggagagagtgagctccctgtcaccagagctatgcaagcagattcaggccagccctcccagagagcatgagatggggaatcacgcacagagtggaccgaaggagggattgaacaagaaggctcaaagggtcccttttgaccctgaagtctaggatttcgtgaagctacaggtgaacccattggcatgagaagcatccagggaggaaagatgcaagcccttggaatatcgagagaatatttccagcaggaaaagaagtggaaggttaaaggaaagccagagaaggggacgttgccctgggccatcaactaagagaaaagctgcccagagccaggcatggtggcggcggtgcctatagtaccggcagttggagaggccgaggcaggagcatcacttgagcccatgagtttgagaccagcctgggcaacatagtgagacttttttctctacaaaaaagtttaaaaaaaaaaaaaaaaaa

SEQ ID NO: 23786 - DNA, 2230 bp, Homo Sapiens
gcagaggcgcggcaggggggcgggagccgcggaacccctaccccaggtctgcgcaggtgaggagggggcggggcaggaccgacctcccttgccatgataaccaccttcgcagccggctcccagaccgttggcaccgattgcctagaaaatagggggtctcaggagctccgttttagcgtttatatatcccaattccaattaagccacttccagtattttttggccattgtcagtgtacaagtcttcctcctcttcgagaccatgttattgcaatagcagcaaacgtgttgggaggcctcacaattcatcatggtttttctggcctctggcagatagctccttcctagcgagctgtggagctcaaagtcttttggacacttgattctattcaatccagtatcagaccaggtcattgctaggaagaactctgggtacaataatgaatacaatgtatgtgatgatggctcagatcttaagatctcacctgataaaggctacagtgattcctaatcgagtgaaaatgcttccatattttggtatcattagaaatagaatgatgtcaacccataaatccaaaaagaagatcagagaatattatagactgctgaacgtggaggaaggatgctctgcagatgaagtcagggaatcttttcataagcttgccaagcaatatcatcctgacagtggctctaatactgctgattctgcaacatttataaggattgaaaaagcttatagaaaggtgctctcccatgtgatagaacaaacaaatgccagtcagagtaaaggtgaagaagaagaagatgtagaaaaattcaaatataaaacaccccaacaccgacattatttaagttttgaaggtattggttttgggactccaactcaacgagagaagcattataggcaatttagggcagaccgtgctgctgaacaagtgatggaatatcaaaagcagaaactacaaagccagtattttcctgatagtgtaattgttaaaaatataagacagagcaaacagcaaaagataacgcaagctatagaacgtttagtggaggacctcattcaagaatccatggcaaaaggagactttgacaatctcagtgggaaaggaaaacctctgaaaaagttttctgactgttcttacattgatcccatgactcacaacctgaaccgaatactgatcgataatggataccaaccagaatggatccttaagcaaaaggaaataagcgatactattgagcaactcagagaggcaattttagtgtctaggaaaaaacttgggaatccaatgacaccaactgaaaagaaacagtggaaccatgtttgtgagcagtttcaagaaaacatcagaaaattaaacaagcgaattaatgattttaatttaattgttcccatcctgaccaggcaaaaagtccattttgatgctcagaaagaaattgtcagagcccagaaaatatacgagacccttataaaaacaaaagaagtcacagatagaaacccaaataaccttgatcaaggagaaggagagaaaacacctgaaatcaagaaaggttttttaaactggatgaatctgtggaaatttattaaaatacgatcattttgatgtttactatcataaatcattcttagttccactgacactttacatggaaaatgagatttattgctataatacaagaatttaagaattgtgccattgtacttatcacaaaactaatcacatagccaatgatgtgtgagtgagaaacctatcaggtttgtcctgaggatatagcaagaaaagaaaataactgaaactcctttttttttgagacggcgtctcgctctgtcacccaggctggagtgcaatggcacaatctaggctcactgcaacctctgcttcccaggttcaagtgattatcctgcctcagactcccgaatagctgggattataggcacacaccaccatacccggctatttttgtattttgttttctttttttttgagacagagtctcactccagcctgggtgacagagcaagactccgtcttaaaaaaaaaaaaaaagtgggaattagacgtaagaggcttaactgcattacagcaacatagatgaacaaaaccattttccatattggtcaatgagaaggtaaggttaccagaaaatgtcagtaaatttttaatttcagcacagtgcactttatgtttgtaaatgttgtctatgttaataaagttactataatgatt

SEQ ID NO: 23787 - DNA, 2023 bp, Homo Sapiens
agcgtgggagcggcgactggcgagccatggcgctggggctgcagcgcgcaaggtcgaccacggagctgcgcaaggaaaagtcccgggatgcggcccgcagccggcgcagccaggagaccgaggtgctgtaccagctagctcacacgctgcccttcgcccgcggcgtcagcgcccacctggacaaggcctctatcatgcgcctcaccatcagctacctgcgcatgcaccgcctctgcgccgcaggggagtggaaccaggtgggagcagggggagaaccactggatgcctgctacctgaaggccctggagggcttcgtcatggtgctcaccgccgagggagacatggcttacctgtcggagaatgtcagcaaacacctgggcctcagtcagctggagctcattggacacagcatcttcgatttcatccacccctgtgaccaagaggagcttcaggacgccctgaccccccagcagaccctgtccaggaggaaggtggaggcccccacggagcggtgcttctccttgcgcatgaagagtacactcaccagccgcgggcgcaccctcaacctcaaggcggccacctggaaggtgctgaactgctctggacatatgagggcctacaagccacctgcgcagacttctccagctgggagccctgactcagagcccccgctgcagtgcctggtgctcatctgcgaagccatcccccacccaggcagcctggagcccccactgggccgaggggccttcctcagccgccacagcctggacatgaagttcacctactgtgacgacaggattgcagaagtggctggctatagtcccgatgacctgatcggctgttccgcctacgagtacatccacgcgctggactccgacgcggtcagcaagagcatccacaccttgctgagcaagggccaggcagtaacagggcagtatcgcttcctggcccggagtggtggctacctgtggacccagacccaggccacagtggtgtcagggggacggggcccccagtcggagagtatcgtctgtgtccattttttaatcagccaggtggaagagaccggagtggtgctgtccctggagcaaacggagcaacactctcgcagacccattcagcggggcgccccctctcagaaggacacccctaaccctggggacagccttgacacccctggcccccggatccttgccttcctgcacccgccttccctgagcgaggctgccctggccgctgacccccgccgtttctgcagccctgacctccgtcgcctcctgggacccatcctggatggggcttcagtagcagccactcccagcaccccgctggccacacggcacccccaaagtcctctttcggctgatctcccagatgaactacctgtgggcaccgagaatgtgcacagactcttcacctccgggaaagacactgaggcagtggagacagatttagatatagctcaggatgctgatgctctggatttggagatgctggccccctacatctccatggatgatgacttccagctcaacgccagcgagcagctacccagggcctaccacagacctctgggggctgtcccccggccccgtgctcggagcttccatggcctgtcacctccagcccttgagccctccctgctaccccgctgggggagtgacccccggctgagctgctccagcccttccagaggggacccctcagcatcctctcccatggctggggctcggaagaggaccctggcccagagctcagaggacgaggacgagggagtggagctgctgggagtgagacctcccaaaaggtcccccagcccagaacacgaaaactttctgctctttcctctcagcctggtgtgttgggggattaatgggattctctggccctcattacctagctggcttaaacctactgttttatagataggaaaccagagaggggcaggggctggttgagggtcatacagaaagtcagtgggccagctgagactaaagcctgatcttctatttcactaatgggt

SEQ ID NO: 23788 - DNA, 3662 bp, Homo Sapiens
gcggccgcaccgggcagcaaccccactcccactcggaggccccctgccctctcccccacttccccccggcccatggtgcgaggctgggagccgccgcccgggctggactgcgctatctctgaagggcacaaatcagaaggcaccatgcctcctaataaagaggccagcggtctcagtagttcaccagcggggctcatctgcctccctccaatctctgaggagctacagcttgtgtggacccaagcagcccagaccagtgagctagacagcaatgaacacctgctcaaaaccttcagctactttccctatcccagcctagcagacattgcccttctctgcctacgttatgggttgcagatggagaaagtcaagacttggtttatggcccagcgcctccgctgtggtattagctggtcatctgaagaaatagaagagactcgagcccgagtagtctaccgtcgggaccaactccatttcaaatcccttctctcttttactcatcatgcgggacggcccccagaggaggtgcctcctcctccagtgccagctccagagcaagttggtattggaataggtcctccaactcttagcaagcctacccagacgaaaggattgaaggtagagcctgaggagccctctcagatgccaccactgccacagagtcaccagaaattaaaggagtccctgatgacacctggcagtggagcattcccctaccaatcagatttttggcaacatcttcaaagcagtggcctctcaaaggagcaggcaggcaggggtcccaaccagtcacatggcataggtactgcttcctggaaccactccacaaccgtcccccagccacaagctcgggataaacccccaccaattgcattaattgccagtagttgtaaggaggagtcagcatctagtgttactccctcttcttcctctacctcttcttctttccaggtactggctaatggagctactgccgcctctaaacccctccagccactaggctgtgtcccacagtcagtgtcacccagtgaacaggcattacccccacatctggaaccagcctggccccaagggctacggcataactcagtaccaggtagagttggccccacagagtacctttccccagatatgcaacgccagcgaaagaccaagcgcaaaaccaaagagcagctggctatccttaaatccttttttttacagtgccagtgggcacggcgtgaggattaccaaaagttagaacagatcactggtttacctcggcctgagatcattcagtggtttggtgacacacgctatgccttgaagcatgggcaactaaagtggtttcgggacaacgcagtacctggtgcccctagtttccaagacccagcaattcctacaccaccaccatcaacccgctccttgaacgaaagggctgagacaccacctctgccgatccctccacccccaccggatatacaacccttggagaggtactgggcagcccaccaacagctacgggaaactgatatccctcaattgagtcaggcatcaaggcttagcacccagcaggtgctggattggtttgactctcgattacctcagccagctgaggtggtagtttgtctagatgaagaagaggaagaggaggaggaagaactgccagaagatgatgaggaagaggaggaggaggaggaagatgatgatgatgatgatgatgatgtgatcatacaagactgagtggggagctgggggaggggaggtctgttactgaaagatgaaccaacttagtaactgtttaaacaaagaaaccacatttttaaaattaccttgtggcagagaactaaaaagctttgtgttcttcagggtgggtggcagggggatatagtgagggtggaccagggagaatgaccatagggcactaagtaaggctgggattggatcagcagaaatccaaccctctaaccttagggtagggagtgctaaggatctggggaaaccatgggctgggaagctgctcttgctctcctcgtgtctgctgtttttttcccttggtgtactatacagaggccagatgttggcaccacctctccaggaggattggaaaggaggagtaaaggattctgatttgattgatgattccagtgcatccccaatcccaccatcttacctggaatataaggctgccttgtaccccttttctgagcacaagtctgtgcgtaatgcaactgactctcttacttttttcttagtaactgatcatttcctagacaaccaagattctcaataagtcccagtctcatcacaaatattaatatttccttttcctcataccaacttgactatgtttcacccgcttcatgactaaatcacaggtggcagaatttttcagttcttttttttttttttgaggtggagtcttgctctgtcgcccaggctgtagtgcaatggcgcaatctcagctcactgcaagctccgcctcccaggttcatgccattctcctgcctcagcctcccgagtagctgggactacaggcacctgccaccacacccggctacttttttatatttttagtagagacgggtttcatcatgttagccaggatggtcttgatctcctgacctcatgatccgcccaccttggcctcccaaagtgctgggattataggcatgagccaccgtgcccggctattttcagttcttatgctgtgaccactttgccttgtagctttttctatctttccaaaatcctcactctgttcattgtttgtctcagggaaaatcttcccccaccgagcttgtaaaaaactttaataattgggtggagaataatttagaatggatatttattggaggtggtaattagggaagatgtccttttaaacagtagaattgtgttacaaaggggtgaaagagagggaatagtttctccttgttgaagggcagtgaaggtaggtttcaggtttggttttacaaacctgttaactacctcctgtccagcttgacagagactaatttttcatctttttgctgtcaatttgtttccagaaaagagacttttccctctcttgataggatctgtcttagggacagagggaccatcgtctttaagtgaattaattattgatgttttagaatggttttcatcagttgggatcagctatatggcaaataggtatcatcaatgagttaaccatctaaaaataaaagagtggaagccctaaaatgctagaataataataaaaaggccaaaaataaaattgtttctctctcaaccactttgccactcctatggtttagggattaatggaaccaaatccattaacattctaactcagcatacttttaacttattgtttggaggggcaggacttattgaggtaaattaaaagaacaaaaactgtaaaaaggaagtagttcagcatctatcgccagccaggttgtttctcagccatcaaatgataatgactaaaatttctgaggcttcaggagtaacagagatacaacagtcttggaggtaactccatttgctacaggacaggcccttgcctaaaagagaaggtatctagaaatgcctttaaaataaattcagagtaccagaaagggtatggggatcctagttcagatacaagatcattcccaagacctaatttatttctggcagatgcctgctattttctg

SEQ ID NO: 23789 - DNA, 7634 bp, Homo Sapiens
acccgcgctgcctttagcggtcgcccccgccgccgctgccagggacgtgctgggaaagcccaagccccgggagaagatgccggccatcctggtcgcctccaaaatgaagtcgggactgcccaaacccgtgcacagcgccgcgcccatcctgcacgtgcccccggcccgggcgggcccccagccctgctacctgaagttgggaagcaaggtggaggtgagcaagaccacctatcctagccagatccccctgaaatcgcaggtgctgcaggggctgcaggagccagcgggggaggggctcccgctgcggaagagcggctcggtggaaaacgggttcgatacccagatctacacagactgggccaatcattacctagccaaatccggccacaagcgtctcatcagggatctccagcaagatgtgacagatggcgtcctcctggcccagattatccaggttgtggcaaatgaaaagattgaagacatcaatggctgtccgaagaacagatcccaaatgattgaaaacatagatgcctgcttgaatttcctggcagctaagggaataaacatccaggggctgtctgcagaagagatcaggaatggaaacctcaaggccattctaggcctcttcttcagcctctcccgatacaagcagcagcagcagcagccccagaagcagcacctctcctcacctctgccgcccgccgtatcccaggtggccggggccccctcccagtgccaggctggcacccctcagcagcaggtgccagtcactccccaagccccgtgccagcctcaccagccagcaccacatcagcagtcaaaagcacaagctgaaatgcagtccagacttccaggtcctaccgcgagggtatccgctgcaggcagcgaggccaaaacacgcggagggtcaactactgctaacaaccgacgcagccagagctttaacaactatgataaatccaaaccagtcacctccccacccccaccgccaagcagccacgagaaagagcctttggcaagttcagcctcctcccaccccggaatgagtgacaatgcacctgcttccttggagagcggcagcagctccacccctactaattgcagtacctcctcggccatcccgcagcccggtgcagccaccaagccttggcgcagcaaatccctcagcgtgaagcacagtgccacggtatccatgctctcggtcaagcctcctgggcctgaggcccccaggcccacacctgaagccatgaagccggcccccaacaatcagaagtccatgctggaaaagctgaaacttttcaacagtaaagggggctcaaaggcaggtgaggggccggggtcccgggacacaagctgtgagcggctggagactctgcccagcttcgaagagagcgaggagctggaggccgccagtcgcatgctcaccaccgtgggccctgcttccagcagccccaagattgcactcaagggcattgcccagaggacttttagccgggcactgaccaacaagaagagttctctgaaaggcaatgagaaagagaaggagaaacaacagcgggagaaggataaggagaaaagcaaggaccttgccaagagagcctctgtgacggagaggctggacctcaaggaggagccaaaagaagaccccagtggagcagctgtgcccgagatgccaaaaaagtcctccaagattgccagcttcatccccaaaggggggaagctcaacagtgccaagaaggagcccatggccccttcccacagtggaataccaaaaccaggaatgaagagcatgcccgggaaatccccaagtgccccagcgccttccaaggaaggggagcggagccggagtgggaagctgagctcaggactcccccagcagaagccccagctggacggcagacactccagttcctcttccagcctggcgtcctcagaaggaaaaggcccaggagggaccaccctgaaccacagcatcagcagccagactgtcagtgggtctgtcgggaccacccagaccacaggaagcaataccgtcagtgttcagctacctcagccccagcagcaatacaaccatcccaacactgccacggttgcacctttcctgtacaggtctcagacggacactgaagggaatgttactgccgagtcaagctcaacaggtgtgagcgtggagcccagccacttcaccaagactggacagcctgctctggaagaactcactggggaagatcctgaggctcggcggctgcggacagtgaagaacatcgctgatctgcggcagaatttggaggaaaccatgtccagtttaaggggaactcaggttacacacagcacattggaaaccacgtttgacaccaatgtcaccacggagatgagtggccgtagcatactcagcttgacagggaggcccacacctctgtcctggagactgggccagtccagccctcggctccaagcaggagacgccccctcaatgggcaatgggtatccccctcgagccaacgccagcaggttcatcaacactgagtcaggtcgctatgtgtactccgcccctctgagaaggcagctggcctcccggggcagtagtgtctgccacgtggacgtctcagacaaggcaggagatgagatggacctggaaggcatcagcatggacgcccccggctacatgagcgatggggatgttctgagcaagaacatccggaccgatgacattacaagcggatacatgactgatggtggacttggcctctatacccgtcgcctgaaccggctccctgatgggatggctgtggtacgagagaccctgcaacgaaatacctccctgggcctcggagacgctgacagctgggacgacagcagctccgtcagcagcggcatcagcgacaccatagacaacctcagcactgatgacatcaacaccagctcctccatcagctcttatgccaacacacctgcctcctctcgaaaaaacctggatgtgcagactgatgctgagaagcactcacaggtggagaggaattccctgtggtctggtgatgatgtcaagaaatcagacggaggctcagacagcggcataaaaatggagccaggttccaagtggaggcggaatccttctgatgtgtctgacgagtccgacaaaagcacgtcgggcaagaagaatcctgtcatctcccagacaggctcatggcggcgaggcatgacagctcaggtgggcatcaccatgccaaggacgaaggcttcagccccggcaggcgcactgaagaccccaggaactggaaaaacagacgacgcaaaggtgtctgagaaaggaaggctttctcctaaagcctcccaggtgaagcgctccccatcagatgcaggccggagcagtggtgacgaatccaaaaagcccctccccagcagctctaggacacctactgccaatgccaacagctttgggttcaagaagcagagtggttccgccgccggcctggccatgatcacagccagcggggtgactgtcaccagcaggtcagccacactgggcaaaatcccaaagtcatctgcactcgtcagtcggtctgctggtcggaagtcaagtatggatggggctcagaatcaggatgacgggtatctagccctaagctcccggacaaaccttcagtaccggagtttgccgaggcccagtaagtccaacagccggaacggggctgggaacaggtctagcaccagcagcatagattccaacattagcagcaagtccgcaggcctgccagtgcccaaactgagggagccttccaaaacagccctaggcagctctctaccaggtctggtcaaccaaacagacaaggagaaaggcatctcatcagacaacgagagtgtggcttcctgtaactcggtgaaagtgaatccggcagcccagcctgtgtccagtccggctcagaccagtctccagcctggagccaagtacccagatgtggcctctcccacactccgcagactctttggtgggaagcctaccaagcaagtgcccatcgccacagctgaaaacatgaaaaattcggtggtcatctccaatcctcatgccaccatgactcagcaaggtaacctagactccccgtcaggcagtggcgtcctgagcagtgggagcagcagtcctctctacagcaagaatgtggacctcaaccagtctccgctagcctccagccccagctcagcccactcggccccttccaacagcctcacctggggcaccaacgccagcagctcctccgcagttagcaaggatggcctgggctttcagtctgtcagcagcctccacaccagctgtgagtccatcgacatctccctcagcagtggaggggtccccagccacaattcttccactggtctcatcgcctcctccaaggacgactccttgactccctttgtcagaactaacagtgtgaagaccacactgtcagaaagccctctctcttcccctgctgctagccctaagttctgcagaagtactctgcccaggaaacaggacagtgacccgcaccttgataggaacactttgcctaagaaaggactcaggtatactcccacctcccagcttcgcacgcaagaagatgcaaaagaatggttacggtcccattctgcaggaggccttcaggacaccgctgccaattcccccttttcctctggctccagcgtgacttctccctccggaacaagattcaacttttcccagcttgcgagtcccaccactgtcacccagatgagcttgtccaacccgaccatgctgaggactcacagcctctccaatgctgatgggcagtatgatccatacactgacagccgcttccggaatagctccatgtccctggatgagaagagcagaaccatgagccgttcaggctcattccgggatgggtttgaagaagttcatggatcctcactctccttggtttccagcacatcgtcagtttattctacaccagaagaaaaatgccagtcagagattcgcaagctgcggcgggaactggatgcctcccaggagaaagtttcagctttgaccacccagctgacagcaaacgctcaccttgtggcagcctttgaacagagtcttggtaacatgacaatcaggctccagagtctgaccatgacagctgagcagaaggactcagaactgaatgagttaagaaaaaccattgagctgctaaagaaacagaacgcagctgcccaggctgccattaatggagtaattaacacacctgagctcaactgcaaaggaaacggcactgcccagtctgcagacctccgcatccgcaggcagcactcctcagacagcgtctccagcatcaacagtgccaccagccactccagcgtgggcagcaacatagagagtgactcaaagaagaagaagcggaagaactgggtcaatgagttacgcagctccttcaagcaagctttcgggaagaagaagtccccaaaatctgcgtcctctcattcagatattgaggagatgacggattcttctttgccttcctcaccaaagttaccgcacaatgggtccacaggttccaccccactgctgaggaattctcactccaactctctaatttcagaatgcatggatagtgaagctgagaccgtcatgcagctccgaaatgagttaagagacaaggagatgaagctgacggatatccgcttagaagctctcagttctgcccaccagctggaccagctccgggaggccatgaacaggatgcagagtgaaatagagaagctgaaagctgagaatgatcggctgaagtcagagtctcaaggcagtggctgcagccgggctccttcccaagtgtccatctctgcctccccgaggcagtccatgggcctctcccagcacagcttgaacctcactgagtcaaccagcctggacatgttgctggatgacactggtgaatgctcggctcggaaggaaggaggcaggcatgttaagatagttgtcagctttcaggaggaaatgaagtggaaggaggattccagaccacatctctttcttattggctgcattggagttagtggcaagacgaagtgggatgtgctcgatggggtggttagacggctgttcaaagaatacatcattcatgtcgacccagtgagtcagctagggctgaattcagacagcgttcttggctacagcattggagaaatcaagcgcagcaacacttccgaaacaccggagctgcttccttgtggctatctggttggagagaacacgaccatctcagtgaccgtgaaagggctcgcagaaaacagcctggactcactggtgtttgagtccttgattcccaagcccatcctgcagcgctacgtctccctcctgatagagcaccgtcggatcattctctctggccccagcggcactgggaaaacctacctggccaaccggctgtctgagtatatagtgcttcgagagggacgggagttgacagacggggttatcgccacctttaacgtggaccataagtccagcaaggaattgcgccagtacctgtccaaccttgctgaccagtgcaacagtgagaacaatgctgtggacatgcccctcgtcatcatcctggacaacctacaccacgtgagctctctgggcgagatcttcaatgggctgctcaactgcaagtaccacaaatgcccttacataattggcacaatgaaccaggctacctcttcgactcccaacctgcagcttcaccataacttcagatgggtgctttgtgccaaccacacggagcctgtgaagggtttccttggccgattcctgaggaggaagctcatggaaacagagatcagtgggcgggtgcgcaatatggagctggtaaaaatcattgactggattcccaaggtctggcatcacctcaaccgcttcctggaggctcacagttcctcggacgtcaccatcggcccccggctcttcctgtcatgccccatcgatgtggacggctcgagagtgtggttcaccgacttgtggaactattccattatcccctatctcctggaagccgtcagagaaggactccagctctatggaaggcgcgccccctgggaggatcctgccaagtgggtgatggacacatatccatgggcagccagcccacaacagcacgagtggcctcccctgctgcagttacggcctgaggatgtcggcttcgacggctactccatgcctcgggagggatcgacaagcaagcagatgccccccagtgatgctgaaggtgacccgctgatgaacatgctgatgaggctgcaggaggcagccaactactccagcccccagagctatgacagcgactccaacagcaacagccatcacgatgacatcttggactcctctttggagtccactctgtgacaggggcccggagcccagcgccctcctcttctcctcaccgcattccacctgcatcccccacatcaccctgaagatgacttcctgagccagcccccagccacagccttagagctgcgggaacaccgagaccccccgtccttcagcctcgacctgggtgcaggcatcccgggccagctgcctgcggaccgcttccttccacagcgagaactgcactaccttctgttgtactttaattattgttttgccttgttgctgtgac

SEQ ID NO: 23790 - DNA, 4062 bp, Homo Sapiens
atgaaagtgaccgtgtgcttcggacggacccgggtggtcgtgccgtgcggggacggccacatgaaagttttcagcctcatccagcaggcggtgacccgctaccggaaggccatcgccaaggatccaaactactggatacaggtgcatcgcttggaacatggagatggaggaatactagaccttgatgacattctttgtgatgtagcagacgataaagacagactggtagcagtgtttgatgagcaggatccacatcacggaggtgatggcaccagtgccagttccacgggtacccagagcccagagatatttggtagtgagcttggcaccaacaatgtctcagcctttcagccttaccaagcaacaagtgaaattgaggtcacaccttcagtccttcgagcaaatatgcctcttcatgttcgacgcagtagtgacccagctctaattggcctctccacttctgtcagtgatagtaatttttcctctgaagagccttcaaggaaaaatcccacacgctggtcaacaacagctggcttcctcaagcagaacactgctgggagtcctaaaacctgcgacaggaagaaagatgaaaactacagaagcctcccgcgggatactagtaactggtctaaccaatttcagagagacaatgctcgctcgtctctgagtgccagtcacccaatggtgggcaagtggctggagaaacaagaacaggatgaggatgggacagaagaggataacagtcgtgttgaacctgttggacatgctgacacgggtttggagcatatacccaacttttctctggatgatatggtaaagctcgtagaagtccccaacgatggagggcctctgggaatccatgtagtgcctttcagtgctcgaggcggcagaaccctggggttattagtaaaacgattggagaaaggtggtaaagctgaacatgaaaatctttttcgtgagaatgattgcattgtcaggattaatgatggcgaccttcgaaatagaagatttgaacaagcacaacatatgtttcgccaagccatgcgtacacccatcatttggttccatgtggttcctgcagcaaataaagagcagtatgaacaactatcccaaagtgagaagaacaattactattcaagccgttttagccctgacagccagtatattgacaacaggagtgtgaacagtgcagggcttcacacggtgcagagagcaccccgactgaaccacccgcctgagcagatagactctcactcaagactacctcatagcgcacacccctcgggaaaaccaccatccgctccagcctcggcacctcagaatgtatttagtacgactgtaagcagtggttataacaccaaaaaaataggcaagaggcttaatatccagcttaagaaaggtacagaaggtttgggattcagcatcacttccagagatgtaacaataggtggctcagctccaatctatgtgaaaaacattctcccccggggggcggccattcaggatggccgacttaaggcaggagacagacttatagaggtaaatggagtagatttagtgggcaaatcccaagaggaagttgtttcgctgttgagaagcaccaagatggaaggaactgtgagccttctggtctttcgccaggaagacgccttccacccaagggaactgaatgcagagccaagccagatgcagattccaaaagaaacgaaagcagaagatgaggatattgttcttacacctgatggcaccagggaatttctgacatttgaagtcccacttaatgattcaggatctgcaggccttggtgtcagtgtcaaaggtaaccggtcaaaagagaaccacgcagatttgggaatctttgtcaagtccattattaatggaggagcagcatctaaagatggaaggcttcgggtgaatgatcaactgatagcagtaaatggagaatccctgttgggcaagacaaaccaagatgccatggaaaccctaagaaggtctatgtctactgaaggcaataaacgaggaatgatccagcttattgttgcaaggagaataagcaagtgcaatgagctgaagtcacctgggagcccccctggacctgagctgcccattgaaacagcgttggatgatagagaacgaagaatttcccattccctctacagtgggattgaggggcttgatgaatcccccagcagaaatgctgccctcagtaggataatgggtaaataccagctgtcccctacagtgaatatgccccaagatgacactgtcattatagaagatgacaggttgccagtgcttcctccacatctctctgaccagtcctcttccagctcccatgatgatgtggggtttgtgacggcagatgctggtacttgggccaaggctgcaatcagtgattcagccgactgctctttgagtccagatgttgatccagttcttgcttttcaacgagaaggatttggacgtcagagtatgtcagaaaaacgcacaaagcaattttcagatgccagtcaattggatttcgttaaaacacgaaaatcaaaaagcatggatttaggtatagctgacgagactaaactcaatacagtggatgaccagaaagcaggttctcccagcagagatgtgggtccttccctgggtctgaagaagtcaagctcgttggagagtctgcagaccgcagttgccgaggtgactttgaatggggatattcctttccatcgtccacggccgcggataatcagaggcaggggatgcaatgagagcttcagagctgccatcgacaaatcttatgataaacccgcggtagatgatgatgatgaaggcatggagaccttggaagaagacacagaagaaagttcaagatcagggagagagtctgtatccacagccagtgatcagccttcccactctctggagagacaaatgaatggaaaccaagagaaaggtgataagactgatagaaaaaaggataaaactggaaaagaaaagaagaaagatagagataaggagaaggataaaatgaaagccaagaagggaatgctgaagggcttgggagacatgttcaggtttggcaaacatcgaaaagatgacaagattgagaaaacgggtaaaataaaaatacaggaatcctttacatcagaagaggagaggatacgaatgaagcaggagcaggagaggattcaagccaaaactcgagaatttagggaacgacaagctcgagagcgtgactatgctgaaattcaagattttcatcggacatttggctgtgatgatgagttaatgtatgggggagtttcttcttatgaaggttccatggctctcaacgctagacctcagagcccacgagaagggcatatgatggatgctttgtatgcccaagtcaagaagccgcggaattccaaaccctcacctgtagacagtaacagatcaactcctagcaatcatgatcggatacagcgtctgaggcaagaatttcagcaagcaaagcaagatgaagatgtagaagatcgtcggcggacctatagttttgagcaaccctggccgaacgcacggccggcgacgcagagcgggcgacactcggtgtccgtggaggtgcagatgcagcggcagcggcaggaggagcgcgagagctcccagcaggcccagcgccagtacagctctctgcctcggcaaagcaggaaaaatgccagctcggtctcccaggactcttgggagcagaactactcccctggggaaggcttccagagtgccaaagagaaccccaggtactccagctaccaaggctccaggaacggctacctgggaggacatggcttcaacgccagggtcatgctggaaactcaggagctccttcgccaggaacagaggcggaaggagcagcagatgaagaagcagcctccttccgaggggcccagcaactatgactcgtataagaaagtccaggaccccagttacgcccctcccaaggggcccttccggcaagatgtgcccccctccccttctcaggttgcgaggctgaacagacttcagactcctgagaaagggaggcccttctattcctga

SEQ ID NO: 23791 - DNA, 10812 bp, Homo Sapiens
gcggcgtcggggcttcacaacaacagtggtggccgtagcagcggccgggccgggctgaggcgcaggcggggagcgggcccggcgccgcggcgctggtggatgctggggctccgaggcgacggccggggggcgggggccgaggcaggtataacggtaccggcggcggcagcgccgctgctcttcccttctcctcaggaggggggccaatggctagcgagaagccgggcccgggcccggggctcgagcctcagcccgtggggctcattgccgtcggggccgctggcggaggcggcgggggcagcggtggtggcggcaccgggggcagcgggatgggggagctaaggggggcgtccggctccggctcggtgatgctccccgcggggatgattaacccttcggtgccgatccgcaacatccggatgaaattcgcagtgttgattggactcatacaggtcggagaggtcagcaacagggacatcgtggagacggtgctcaacctgctggttggtggagaatttgacttggagatgaactttattatccaggatgctgagagtataacatgtatgacagagcttttggagcactgtgatgtaacatgtcaagcagaaatatggagcatgtttacagccattctacgaaaaagtgttcggaatttacagactagcacagaagttgggctaattgaacaagtattgctgaaaatgagtgctgtagatgacatgatagcagatcttctagttgatatgttgggggttcttgccagctacagcatcactgtcaaggagttgaagcttttgttcagcatgcttcgaggagaaagtggaatctggccaagacatgcagtaaaattattatcagttcttaatcagatgccacagagacacggtcctgatacttttttcaatttccctggttgtagcgctgcggcaattgccttgcctcctattgcaaagtggccttatcagaatggcttcaccttaaacacttggtttcgtatggatccattaaataatattaatgttgataaggataaaccttatctttattgttttcgtactagcaaaggagttggttactctgctcattttgttggcaactgtttaatagtcacatcattgaagtccaaaggaaaaggttttcagcattgtgtgaaatatgattttcaaccacgcaagtggtacatgatcagcattgtccacatttacaatcgatggaggaacagtgaaattcggtgttatgttaatggacaactggtatcttatggtgatatggcttggcatgttaacacaaatgatagctatgacaagtgctttcttggatcatcagaaactgctgatgcaaatagggtattctgtggtcaacttggtgccgtgtatgtgttcagtgaagcactcaacccagcacagatatttgcaattcatcagttaggacctggatataagagtaccttcaagtttaaatctgagagtgatattcatttggcagaacatcataaacaggtgttatatgatgggaaacttgcaagtagcattgcctttacatataatgctaaggccactgatgctcagctctgcctggaatcatcaccaaaagagaatgcatcaatttttgtgcattccccacatgctctaatgcttcaggatgtgaaagcgatagtaacacattcaattcatagtgcaattcattcaattggagggattcaagtgctttttccactttttgcccaattggataataggcagctcaatgacagtcaagtggaaacaactgtctgtgctactctgttggcattcctggttgaactacttaaaagttcagtagccatgcaagaacagatgctgggtggaaaaggctttttagtcattggctacttacttgaaaagtcatcaagagttcatataactagagctgtcctggagcaatttttatcttttgcaaaataccttgatggtttatctcatggagcacctttgctgaagcagctttgtgatcacattttatttaacccagccatctggatacatacacctgcaaaggttcagctttccctatacacatatttgtctgctgaatttattggaactgctaccatctacaccaccatacgcagagtaggaacagtattacagctaatgcacaccttaaaatattattactgggttattaatcctgctgacagtagtggcattacacctaaaggattagatggtccccggccatcacaaaaagaaattatatcactgagggcatttatgctactttttctgaaacagctgatactaaaggatcgaggggtcaaggaagatgaacttcagagtatattaaattacctacttacgatgcatgaggatgaaaatattcatgatgtgctacagttactggtggctttaatgtcggaacacccagcctcaatgataccagcatttgatcaaagaaatggaataagggtgatctacaaattattggcttctaaaagtgaaagtatttgggttcaagctttgaaggttctgggatactttctgaagcatttaggtcacaagagaaaagttgaaattatgcacacccatagtcttttcactcttcttggagaaaggctgatgttgcatacaaacactgtgactgtcaccacatacaacacactttatgagatcttgacagaacaagtatgtactcaggtcgtacacaaaccacatccagagccagattctacagtgaaaattcagaatccaatgattcttaaagtggtggcaactttgttaaaaaactctacaccaagtgcagagctgatggaagttcgtcgtttatttttatctgatatgataaaacttttcagtaacagccgtgaaaatagaagatgcttattgcagtgttcagtgtggcaggattggatgttttctcttggctatatcaatcctaaaaattctgaggaacagaagattaccgaaatggtctacaatatcttccggattcttttgtatcatgcaataaaatatgaatggggaggctggagagtctgggtggataccctctcaatagcccattccaaggtcacttatgaagctcataaggaatacctagccaaaatgtatgaggaatatcaaagacaagaggaggaaaacattaaaaagggaaagaaagggaatgtgagcaccatctctggtctttcatcacagacaacaggagcaaaaggtggaatggaaattcgagagatagaagatctttcacaaagccagagcccagaaagtgagaccgattaccctgtcagcacagatactcgagacttactcatgtcaacaaaagtgtcagatgatattcttggaaattcagatagaccaggaagtggtgtacatgtggaagtacatgatcttttagtagatataaaagcagagaaagtggaagcaacagaagtaaagctcgatgatatggatttatcaccggagactttagtaggtggagagaatggtgcccttgtggaggttgaatctctgttggataatgtatatagtgctgctgttgagaaactccagaacaatgtacatggaagtgttggtatcattaaaaaaaatgaagaaaaggataatggtccattgataacattagcagatgagaaagaagaccttcccaatagtagtacatcatttctctttgataaaatacccaaacaggaggaaaaactacttcctgaactttctagcaatcacattattccaaatattcaggacacacaagtacatcttggtgttagtgatgatcttggattgcttgctcacatgaccggtagcgtagacttaacttgtacatccagtataatagaagaaaaagaattcaaaatccatacaacttcagatggaatgagcagtatttctgaaagagacttagcgtcatcaactaaggggctggagtatgctgaaatgactgctacaactctggaaactgagtcttctagtagcaaaattgtaccaaatattgatgcaggaagtataatttcagatactgaaaggtctgacgatggcaaagaatcaggaaaagaaatccgaaaaatccaaacaactactacgacacaagctgtgcagggtcggtctatcacccaacaagaccgagatctccgagttgatttaggatttcgaggaatgccaatgactgaggaacagcgacgccagtttagcccaggtccacggactacaatgtttcgtattcctgagtttaaatggtctccaatgcaccagcggcttctcactgatttactatttgcattagaaactgatgtacatgtttggaggagccattctacaaagtctgtaatggattttgtcaatagcaatgaaaatattatttttgtacataacacaattcacctcatttcccaaatggtagacaacatcatcattgcttgtggaggaattttacctttgctctctgctgctacatcaccaactggttctaagacggaattggaaaatattgaagtgacacaaggcatgtcagctgagacagcagtaactttcctcagccggctgatggctatggttgatgtacttgtgtttgcaagctctctaaattttagtgagattgaagctgagaaaaacatgtcttctggaggtttaatgcgacagtgcctaagattagtttgttgtgttgctgtgagaaactgtttagaatgtcggcaaagacagagagacaggggaaataaatcttcccatggaagcagtaaacctcaggaagttcctcaaagtgtgactgctacagcagcttcgaagactccattggaaaatgttccaggtaacctttctcctattaaggatccggatagacttcttcaggatgttgatatcaatcgccttcgtgctgttgtctttcgggatgtggatgatagcaaacaagcacagttcttagctctggctgttgtttacttcatttcggttctgatggtttccaagtatcgtgacatattagaaccccagagagagactacaagaactggaagccaaccaggtagaaacatcaggcaagaaataaattcaccaacaagtacagttgtggtcataccatctatccctcatccaagtttgaaccatggattccttgccaagttaattcctgagcagagctttggccactcattttacaaagaaacacctgctgcatttccagacaccataaaagaaaaagaaacatcaactcctggtgaagatattcaggtagaaagttcaattccccatacagattcaggaattggagaggagcaagtggctagcatcctgaatggggcagaattagaaacaagtacaggccctgatgccatgagtgaactcttatccactttgtcatccgaagtgaagaaatcacaagagagcttaactgaaaatcctagtgaaacgttgaagcctgcaacatccatatctagcattagtcaaaccaaaggcatcaatgtgaaggaaatactgaaaagtcttgtggctgctccagttgaaatagcagaatgtggccctgaacctatcccatacccagatccagcattgaagagagaaacacaagctattcttcctatgcagtttcattcctttgacaggagtgttgtggtgcctgtaaagaaaccacctccaggtagtttagctgtaaccactgtgggagccactactgctggaagtgggctgccaacaggcagtacctctaatatatttgctgctactggagctacaccaaaaagtatgattaatacaacaggtgccgtggattcagggtcctcctcctcttcctcctcttctagttttgtgaatggtgctactagcaaaaaccttccagctgtacaaactgttgctccaatgccagaagattcagctgaaaatatgagcatcactgcaaaacttgaaagagcgttagaaaaagttgctcctcttcttcgtgaaatttttgtagactttgccccattcctatctcgtacacttcttggcagtcatggacaagagctattgatagaaggccttgtttgtatgaagtccagcacatctgtggttgagcttgttatgctgctttgttctcaggaatggcaaaactctattcagaagaatgcaggacttgcatttattgagctcatcaatgaaggaagattactgtgccatgctatgaaggaccatatagtccgtgttgcaaatgaagctgagtttattttgaacagacaaagagccgaggatgtacataaacatgcagagtttgagtcacagtgtgcccaatatgctgctgatagaagagaggaagaaaagatgtgtgaccatcttatcagtgctgctaaacatcgagatcatgtaacagcaaatcagctgaaacagaagattctcaatattctcacaaataaacatggtgcttggggagcagtttctcatagccaattgcatgatttctggcgtttggattactgggaagatgatcttcgtcgaaggagacgatttgttcgcaatgcatttggctccactcatgctgaagcattgctgaaagctgcaatagaatatggcacggaagaagatgtagtaaagtcaaagaaaacattcagaagtcaagcaatagtgaaccaaaatgcagagacagaacttatgctggaaggagacgatgatgcagtcagtctgctacaggagaaagaaattgacaaccttgcaggcccagtggttctcagcacccctgcccagctcatcgctcccgtggtggtggccaaggggactctctccatcaccacgacagaaatctacttcgaggtagatgaggatgattctgccttcaagaagatcgacacgaaagttcttgcatacactgagggacttcacggaaaatggatgttcagcgagatacgagctgtattttcaagacgttaccttctacaaaacactgctttggaagtatttatggcaaaccgaacctcagttatgtttaatttccctgatcaagcaacagtaaaaaaagttgtctatagcttgcctcgggttggagtagggaccagctatggtctgccacaagccaggaggatatcattggccactcctcgacagctttataaatcttccaatatgactcagcgctggcaaagaagggaaatttcaaacttcgaatatttgatgttccttaatactattgcaggacggacatataatgatctgaaccaatatccagtgtttccgtgggtgttaaccaactatgaatcagaagagttggacctgactcttccaggaaacttcagggatctatcaaagccaattggtgctttgaaccccaagagagctgtgttttatgcagagcgttatgagacatgggaagatgatcaaagcccaccctaccattataatacccattattcaacagcaacatctactttatcctggcttgttcgaattgaacctttcacaaccttcttcctcaatgcaaatgatggaaaatttgatcatccagatcgaaccttctcatccgttgcaaggtcttggagaactagtcagagagatacttctgatgtaaaggaactaattccagagttctactacctaccagagatgtttgtcaacagtaatggatataatcttggagtcagagaagatgaagtagtggtaaatgatgttgatcttcccccttgggcaaaaaaacctgaagactttgtgcggatcaacaggatggccctagaaagtgaatttgtttcttgccaacttcatcagtggatcgaccttatatttggctataagcagcgaggaccagaagcagttcgtgctctgaatgtttttcactacttgacttatgaaggctctgtgaacctggatagtatcactgatcctgtgctcagggaggccatggaggcacagatacagaactttggacagacgccatctcagttgcttattgagccacatccgcctcggagctctgccatgcacctgtgtttccttccacagagtccgctcatgtttaaagatcagatgcaacaggatgtgataatggtgctgaagtttccttcaaattctccagtaacccatgtggcagccaacactctgccccacttgaccatccccgcagtggtgacagtgacttgcagccgactctttgcagtgaatagatggcacaacacagtaggcctcagaggagctccaggatactccttggatcaagcccaccatcttcccattgaaatggatccattaatagccaataattcaggtgtaaacaaacggcagatcacagacctcgttgaccagagtatacaaatcaatgcacattgttttgtggtaacagcagataatcgctatattcttatctgtggattctgggataagagcttcagagtttattctacagaaacagggaaattgactcagattgtatttggccattgggatgtggtcacttgcttggccaggtccgagtcatacattggtggggactgctacatcgtgtccggatctcgagatgccaccctgctgctctggtactggagtgggcggcaccatatcataggagacaaccctaacagcagtgactatccggcaccaagagccgtcctcacaggccatgaccatgaagttgtctgtgtttctgtctgtgcagaacttgggcttgttatcagtggtgctaaagagggcccttgccttgtccacaccatcactggagatttgctgagagcccttgaaggaccagaaaactgcttattcccacgcttgatatctgtctccagcgaaggccactgtatcatatactatgaacgagggcgattcagtaatttcagcattaatgggaaacttttggctcaaatggagatcaatgattcaacacgggccattctcctgagcagtgacggccagaacctggtcaccggaggggacaatggggtagtagaggtctggcaggcctgtgacttcaagcaactgtacatttaccctggatgtgatgctggcattagagcaatggacttgtcccatgaccagaggactctgatcactggcatggcttctggtagcattgtagcttttaatatagattttaatcggtggcattatgagcatcagaacagatactgaagataaaggaagaaccaaaagccaagttaaagctgagagcacaagtgctgcatggaaaggcaatatctctggtggaaaaaactcgtctacatcgacctccgtttgtacattccatcacacccagcaatagctgtacattgtagtcagcaaccattttactttgtgtgttttttcacgactgaacaccagctgctatcaagcaagcttatatcatgtaaattatatgaattaggagatgttttggtaattatttcatatattgttgtttattgagaaaaggttgtaggatgtgtcacaagagacttttgacaattctgaggaaccttgtgtccagttgttacaaagtttaagctttgaacctaacctgcatcccatttccagcctcttttcaagctgagaaaaaaaaaaaaaaacacgtttgatactttgtacatcagatgcatcttatttaaaagggatacttttgtaaaagtaaaaccttgtataaagaacaaaatgtttcttaattttattgtggagttacaacttgcatgttccttactcctgttggcttgatggaacaggtgcattcacactatgaaacagaaagatctgtccaaggacacagcttgtatgaaagggttgaatttgggctccatcagtaatttttgacattttcaccaaaatatagtttgcactttttaatctaaagtcatcccttctgagtgaaatttgctcataaagcatttggatactaagccattatttgccattttgggtactttatacaaagaaaattcagccctaccctgcataatttgaagacacagcagaaagggggcttagggatgaggtcctggtttttcttgtataaataggagtcatgggcgttagttctgtagtaataacttcccagcacctggacatctcttccagagttatcccactggcttggtgtgtatacattaggggaggataatctgatgctaactttttttttctctttggttcttgaatagcttagtttctttaataacaagtcaaactttattacaacaataactgaagttattcttttaggttctcgtgaaattctcactgaaagccacattcttagcctaaggcgtttcatcttttatgatataaaatgatggctatcaaatgattttccatacattgtactgatcaagttatacacccaggggtatatacactttcttcatgtttcttctttgtatatttggtgactgtatcgtcatagatgtacatattgtgtcggtagggctatgaggcatgttacaggaatgtaattttctcagaatttacactcactcgcagtcatttatttaaaaagataaaacaagataatgggttctttgtattggcactttgcaccagaaacatatcattatttattgatgtgattacttatttgttatccaccttgtactagtaagttttagcactgaattccttcttcactgttgtttgtatttatgaaattctgaaattatggggaatcagcgtaatgattaagttattcatcaccaggctgtaagcaatatcttgagtttgtagcttagaattgggaggatacttaacatctggaagacaagttcatttcatcttgagatcatggtgaaatattttggatatataaattccttaagctattgtaaccatgttttattgcaaagatgtaaaatatgccagatgtgtgtgagttggaaatcaaaaaaagaaaaataaaatatgcaaagaattcaaaaaaaaaaaaaaaaaaaaa

SEQ ID NO: 23792 - DNA, 3206 bp, Homo Sapiens
cccctgcggcgtcccgtagcctcgcgttaagccttgttcagagcgggggcttttgctgtcgcagtgggttccggagagtgcaggtgatttcgcagcaggtttcttgtgctggccgcgctcgccggacgaagaagagaagggcagttgggcctgcggccttggcgttcatgaggcctcagagagctccggaggagctacaactgtgagggggctgctagagttcttctcctcgggtgtgtgagaagcagcctaggaccccgggttcggggagtcgcaaagaaggccgtaagggcttcacttccttctccggaggcctgccttctgcgcgtcgattaacaccgcattctttcccacttcctctcaatgttttcttcatatatctggaaatatgatcagcgcccctgacgtagtggccttcaccaaagaggaagagtatgaagaagagccttacaatgagccggccctgcctgaggagtactcggtgccgctcttccccttcgccagtcagggtgctaacccctggtcaaaactgtccggggccaagttttcgagggacttcattcttatttccgagttctctgagcaggtgggaccccaacccttactgaccatccccaatgacaccaaagtttttggcacttttgatctcaattacttctccctgcgtatcatgtctgtggattaccaggcttccttcgtgggccatcctcctggatctgcctaccccaagctgaacttcgtggaggactccaaggtggtgctgggagattctaaggagggcgcctttgcatacgtgcaccaccttaccctatacgacctggaggcccgtggcttcgtgaggccgttttgcatggcttatatctctgcagaccagcataaaatcatgcagcagttccaggagctttcagccgaattttccagagcttctgagtgcttgaagactggcaacaggaaggcatttgctggggaacttgaaaaaaagctgaaagacttggattacaccaggacagtgctacacacagaaacggagatccagaagaaagccaacgacaaaggcttttactcatctcaggcaattgagaaagccaatgaactggccagtgtggagaagtccatcattgaacatcaagacctgctgaagcagatccgctcataccctcatcggaagttgaaggggcatgatttgtgtcctggtgagatggagcacatccaggatcaggccagccaggcatccactacctctaaccctgatgagtctgccgacacagacctttacacctgcagaccagcctacaccccaaaacttatcaaagcaaagtccaccaagtgttttgacaagaagttgaagaccttggaggagctctgtgacactgaatatttcacccagaccctggctcagctcagccacattgaacacatgttcagaggagacctgtgttacctcctgaccagtcagattgatagagcacttctaaaacaacagcatataacaaactttctctttgaagactttgtggaggtcgatgacaggatggtggagaaacaagaaagcataccctctaagcccagtcaagacaggccgccttccagttctctagaagaatgcccaattcctaaagtgttaattagtgttggttcttacaagtccagtgtggagtctgtgttgatcaagatggagcaggaactgggagatgaggagtacaaggaagtggaagtgactgagttgagcagtttcgacccccaggaaaacttggactacctggatatggatatgaaagggagtatcagcagtggtgaaagtattgaagttttgggcacggagaaatccacctccgtgctttctaaatctgacagccaggcaagcctcacagtaccattgagcccccaggtggtccggagcaaagcagtcagccacaggaccatcagcgaggacagtattgaagtcctcagtacctgcccctctgaggccctcatccctgatgactttaaggccagctacccaagtgccattaatgaagaagaatcatatccagatggcaatgaaggagccatccgcttccaggcaagcatcagtcctccagaactgggtgagacagaggaaggcagcatagaaaacaccccatcacaaatagactcctcctgctgtattgggaaggagagcgatggtcagttggtgctgccctccactccagcccacacacactctgacgaggatggggtggtgagcagccccccacagcgccacaggcagaaggaccaggggttccgtgtagacttttcagtggaaaatgccaacccttcttcccgagacaacagttgtgaagggtttcccgcttatgagctggacccgagccacctgctggctagccgggacatcagtaagaccagcctggacaactactcagacaccaccagctacgtgagcagtgtagcgtccaccagctcagacaggatcccctctgcttatcctgctggcctgtcttccgataggcataaaaagagggctggccagaacgccttaaaattcatccgccagtacccctttgcccacccagccatctactccctgctcagtgggaggacacttgtggtcctgggggaagatgaggccatagtcaggaaactcgtgactgcactggctatctttgtccccagctatggctgctacgctaagcccgtgaaacattgggcctcctcccctttgcacattatggattttcagaagtggaagcttattggcttgcagaggtaaagtggcctcccctgccggtgccggtaccctccatgccctgagccgctacagccgctacacgagcatcctggaccttgacaacaaaaccctgcgctgccccctttacagaggcaccctggtgccccgcctggcagaccaccgcacacagatcaagcggggcagcacctactacctgcatgtccagagcatgctcacccagctctgctccaaggccttcctctacaccttctgccaccacctgcacctgcctacccacgacaaggagacagaggagctggtagccagccgccagatgagcttcctaaagctgaccctgggtctggtgaatgaggatgttagggtggtccagtacctggctgagctgctgaagctgcactacatgcaggaatctccagggaccagccaccccatgctcaggtttgactatgtccccagctttttgtataaaatctga

SEQ ID NO: 23793 - DNA, 5482 bp, Homo Sapiens
gcggccgcgcaacaaaggagtcacccggcgatgagccccggcacccccggaccgaccatgggcagatcccagggcagcccaatggatccaatggtgatgaagagacctcagttgtatggcatgggcagtaaccctcattctcagcctcagcagagcagtccgtacccaggaggttcctatggccctccaggcccacagcggtatccaattggcatccagggtcggactcccggggccatggccggaatgcagtaccctcagcagcaggactctggagatgccacatggaaagaaacattctggttgatgccacctcagtatggacagcaaggtgtgagtggttactgccagcagggccaacagccatattacagccagcagccgcagcccccgcacctcccaccccaggcgcagtatctgccgtcccagtcccagcagaggtaccagccgcagcaggacatgtctcaggaaggctatggaactagatctcaacctcctctggcccccggaaaacctaaccatgaagacttgaacttaatacagcaagaaagaccatcaagtttaccagatctgtctggctccattgatgacctccccacgggaacggaagcaactttgagctcagcagccagtgcatccgggtccacgagcagccaaggggatcagagcaacccggcgcagtcgcctttctccccacatgcgtcccctcatctctccagcatcccggggggcccatctccctctcctgttggctctcctgtaggaagcaaccagtctcgatctggcccaatctctcctgcaagtatcccaggtagtcagatgcctccgcagccacccgggagccagtcagaatccagttcccatcccgccttgagccagtcaccaatgccacaggaaagaggttttatggcaggcacacaaagaaaccctcagatggctcagtatggacctcaacagacaggaccatccatgtcgcctcatccttctcctgggggccagatgcatgctggaatcagtagctttcagcagagtaactcaagtgggacttacggtccacagatgagccagtatggaccacaaggtaactactccagacccccagcgtatagtggggtgcccagtgcaagctacagcggcccagggcccggtatgggtatcagtgccaacaaccagatgcatggacaagggccaagccagccatgtggtgctgtgcccctgggacgaatgccatcagctgggatgcagaacagaccatttcctggaaatatgagcagcatgccccccagttctcctggcatgtctcagcagggagggccaggaatggggccgccaatgccaactgtgaaccgtaaggcacaggaggcagccgcagcagtgatgcaggctgctgcgaactcagcacaaagcaggcaaggcagtttccccggcatgaaccagagtggacttatggcttccagctctccctacagccagcccatgaacaacagctctagcctgatgaacacgcaggcgccgccctacagcatggcgcccgccatggtgaacagctcggcagcatctgtgggtcttgcagatatgatgtctcctggtgaatccaaactgcccctgcctctcaaagcagacggcaaagaagaaggcactccacagcccgagagcaagtcaaagaagtccagctcctccaccactactggggagaagatcacgaaggtgtacgagctggggaatgagccagagagaaagctctgggtcgaccgatacctcaccttcatggaagagagaggctctcctgtctcaagtctgcctgccgtgggcaagaagcccctggacctgttccgactctacgtctgcgtcaaagagatcgggggtttggcccaggttaataaaaacaagaagtggcgtgagctggcaaccaacctaaacgttggcacctcaagcagtgcagcgagctccctgaaaaagcagtatattcagtacctgtttgcctttgagtgcaagatcgaacgtggggaggagcccccgccggaagtcttcagcaccggggacaccaaaaagcagcccaagctccagccgccatctcctgctaactcgggatccttgcaaggcccacagaccccccagtcaactggcagcaattccatggcagaggttccaggtgacctgaagccacctaccccagcctccacccctcacggccagatgactccaatgcaaggtggaagaagcagtacaatcagtgtgcacgacccattctcagatgtgagtgattcatccttcccgaaacggaactccatgactccaaacgccccctaccagcagggcatgagcatgcccgatgtgatgggcaggatgccctatgagcccaacaaggacccctttgggggaatgagaaaagtgcctggaagcagcgagccctttatgacgcaaggacagatgcccaacagcagcatgcaggacatgtacaaccaaagtccctccggagcaatgtctaacctgggcatggggcagcgccagcagtttccctatggagccagttacgaccgaaggcatgaaccttatgggcagcagtatccaggccaaggccctccctcgggacagccgccgtatggagggcaccagcccggcctgtacccacagcagccgaattacaaacgccatatggacggcatgtacgggcccccagccaagcgccacgagggcgacatgtacaacatgcagtacagcagccagcagcaggagatgtacaaccagtatggaggctcctactcgggcccggaccgcaggcccatccagggccagtacccgtatccctacagcagggagaggatgcagggcccggggcagatccagacacacggaatcccgcctcagatgatgggcggcccgctgcagtcgtcctccagtgaggggcctcagcagaatatgtgggcagcacgcaatgatatgccttatccctaccagaacaggcagggccctggcggccctacacaggcgcccccttacccaggcatgaaccgcacagacgatatgatggtacccgatcagaggataaatcatgagagccagtggccttctcacgtcagccagcgtcagccttatatgtcgtcctcagcctccatgcagcccatcacacgcccaccacagccgtcctaccagacgccaccgtcactgccaaatcacatctccagggcgcccagcccagcgtccttccagcgctccctggagaaccgcatgtctccaagcaagtctccttttctgccgtctatgaagatgcagaaggtcatgcccacggtccccacatcccaggtcaccgggccaccaccccaaccacccccaatcagaagggagatcacctttcctcctggctcagtagaagcatcacaaccagtcttgaaacaaaggcgaaagattacctccaaagatatcgttactcctgaggcgtggcgtgtgatgatgtcccttaaatcaggtcttttggctgagagtacgtgggctttggacactattaatattcttctgtatgatgacagcactgttgctactttcaatctctcccagttgtctggatttctcgaacttttagtcgagtactttagaaaatgcctgattgacatttttggaattcttatggaatatgaagtgggagaccccagccaaaaagcacttgatcacaacgcagcaaggaaggatgacagccagtccttggcaaacgattctgggaaagaggaggaagatgctgaatgtattgatgacgacgaggaagacgaggaggatgaggaggaagacagcgagaagacagaaagcgatgaaaagagcagcatcgctctgactgccccggacgccgctgcagacccaaaggagaagcccaagcaagccagtaagttcgacaagctgccaataaagatagtcaaaaagaacaacctgtttgttgttgaccgatctgacaagttggggcgtgtgcaggagttcaatagtggccttctgcactggcagctcggcgggggtgacaccaccgagcacattcagactcactttgagagcaagatggaaattcctcctcgcaggcgcccacctccccccttaagctccgcaggtagaaagaaagagcaagaaggcaaaggcgactctgaagagcagcaagagaaaagcatcatagcaaccatcgatgacgtcctctctgctcggccaggggcattgcctgaagacgcaaaccctgggccccagaccgaaagcagtaagtttccctttggtatccagcaagccaaaagtcaccggaacatcaagctgctggaggacgagcccaggagccgagacgagactcctctgtgtaccatcgcgcactggcaggactcgctggctaagcgatgcatctgtgtgtccaatattgtccgtagcttgtcattcgtgcctggcaatgatgccgaaatgtccaaacatccaggcctggtgctgatcctggggaagctgattcttcttcaccacgagcatccagagagaaagcgagcaccgcagacctatgagaaagaggaggatgaggacaagggggtggcctgcagcaaagatgagtggtggtgggactgcctcgaggtcttgagggataacacgttggtcacgttggccaacatttccgggcagctagacttgtctgcttacacggaaagcatctgcttgccaattttggatggcttgctgcactggatggtgtgcccgtctgcagaggcacaagatccctttccaactgtgggacccaactcggtcctgtcgcctcagagacttgtgctggagaccctctgtaaactcagtatccaggacaataatgtggacctgatcttggccactcctccatttagtcgtcaggagaaattctatgctacattagttaggtacgttggggatcgcaaaaacccagtctgtcgagaaatgtccatggcgcttttatcgaaccttgcccaaggggacgcactagcagcaagggccatagctgtgcagaaaggaagcattggaaacttgataagcttcctagaggatggggtcacgatggcccagtaccagcagagccagcacaacctcatgcacatgcagcccccgcccctggaaccacctagcgtagacatgatgtgcagggcggccaaggctttgctagccatggccagagtggacgaaaaccgctcggaattccttttgcacgagggccggttgctggatatctcgatatcagctgtcctgaactctctggttgcatctgtcatctgtgatgtactgtttcagattgggcagttatgacataagtgagaaggcaagcatgtgtgagtgaagattagagggtcacatataactggctgttttctcgttcttgtttatccagcgtaggaagaaggaaaagaaaatctttgctcctctgccccattcactatttaccaattgggaattaaagaaataattaatttgaacagttatgaaattaaaaaaaaaaaaaaaaaaaaaa

SEQ ID NO: 23794 - DNA, 5482 bp, Homo Sapiens; identical to SEQ ID NO: 23793

SEQ ID NO: 23795 - DNA, 6382 bp, Homo Sapiens
gtgctccaagtttgcatgactatcattcctgtatgagggaagaaatagctaaattcctccgctacagctacaggaacaaaggctcattaaagctgatgatctgtttacatgatcagaggtagatctagggttggaagccaggtctcctgagtatgcgagaataaatacagtcatggaagtgtaaagagtctgccaacattttgagaatgtgaataggatttggctaaaattaaggggatatacagaaaagtcataggaaatcaggttaaagacataaatatgagataggctacagagtgttttaagtaatacaataaaacatttagatttttgcccatgtcagtcattttgaaattatttttaaagcaaaaaaaccctttttaaacaagaaatcttatgagatgtcaatatgcaaaacaaattaaaaggaggtggtttctctaactgaagctgttcctctttcctgccttcagcctctgaagagaaagttagaaaactattatcattaatgctacatgttttgaacaagctgatataccaagtggcccagagagcaggtagaagaaccagcgtggagacagaaagcaagaggcccgcctgccagggctacctgcagaaagaaagggcaaagatgctgtaggcaagagaagttcaggacagacactggcatagctcaaagattcacatttgagcagctgtggaagatgacagtacaattaccaaaatgtcgaagggcaaaggaggcagctactggttttgatgaaagacaattatgtccttttaaatgggtcttagacatttagacatttatatacactatgctacggacaaaggaatagaaagtagcacttttttctccactagttttcttctctttttcaagtagatgaagcaaaagtcaactgcaatagtcagaaagctgtactttgttacacttagaaacttctaaaagtgcttaagatttcacctgaaagtccaacatgaagaaaatacaggctccccaatgccccattctaagaaggaaaaaggaccattttcattttagtaacgtttctgttctatagacagtttggataactagctcttactttttatctttaaaaactgtttttccagtgaagttacgtataattatttacttcaagcgtaagtataccaaattactttagaaatgcaagacttttcttatacttcataaaatacattatgaaagtgaatcttgttggctgtgtacatttgactataataatttcaatgcatattatttctattgagagtaagttacagtttttggcaaactgcgtttgatgagggctatctcctcttcctgtgcgtttctaaaacttgtgatgcaaacgctcccaccctttcctgggaacacagaaagcctgactcaggcagctgccgctattaaagcagctccagccctgcgcactccctgctggggtgagcagcactgtaaagatgaagctggctaactggtactggctgagctcagctgttcttgccacttacggttttttggttgtggcaaacaatgaaacagaggaaattaaagatgaaagagcaaaggatgtctgcccagtgagactagaaagcagagggaaatgcgaagaggcaggggagtgcccctaccaggtaagcctgccccccttgactattcagctcccgaagcaattcagcaggatcgaggaggtgttcaaagaagtccaaaacctcaaggaaatcgtaaatagtctaaagaaatcttgccaagactgcaagctgcaggctgatgacaacggagacccaggcagaaacggactgttgttacccagtacaggagccccgggagaggttggtgataacagagttagagaattagagagtgaggttaacaagctgtcctctgagctaaagaatgccaaagaggagatcaatgtacttcatggtcgcctggagaagctgaatcttgtaaatatgaacaacatagaaaattatgttgacagcaaagtggcaaatctaacatttgttgtcaatagtttggatggcaaatgttcaaagtgtcccagccaagaacaaatacagtcacgtccaggtatgtataataatgttttcttatcatatgttcataaatgttatacagctagagagtatctataaacattaacctgagtcagtaagttaaatagatgacagattaagtcttttatttatcaaggtgcacaggaaaaaataaatatcttctcaaatatgaccacataaatatgacctaattacaaaaatcatagttagttctgtatccactggaagtcactttcaattttaagatcttatttgttaatgccagacctacttgcaagcagaagtagagagaatttcttgatgttttagtgcatttaacttgtctcttcaatgaggtgtttgaaaacaataaagataaggcgatgttcacaattgtgccttgtttgttggaaatcagtttttcttgtgattgactgactgccgcttctcatggctaaagaggtctttgaaagattttagcaagtaatctagttcttaatcccaaatatctggagaaaatgggagagtttacagatggaataaaagcagtttcatatgtgtgcacaaatttttgctttgagacctagtggcacaaaaaatattttaaggggagagttttagcatgccactaagggaaggtattcatatttctttctcttttacctgaagttagaattcaagcagatagaagtagaacccatcctcaccatccaaattacttgaattaactttaataaatacatgtgaaattccacagacttaatcgcctactccacccacgaactaacagtggtattgactctccaaaccttggcttttcacctgagtcactgggaccactgttgctgactgtctcatactttggaaagccatctccgcatttggacctctacttaccatgaacgtgaggttgaaaggacagggcggagatcactttcatttagagacagtatctcaggcatgctccatccccagggcatctgccagtgaaggagggaagggtcatattttcaaggacctctattggtaatactcctggcagcctgcatctgaatgtacctggcacactgcgaatccaaggttcaccgcttaggtgacatcagtgggtatacattagattagatgctgcatggcaacttgtcatgatatgaagactattgtctatttttctcctaaacattttgggtgaaataactgaatattctgagctctaaatatacaggaatagatttttatgccttagggtatctcatattaaacttaccttatttgtcacacattttaataaaaactatctgggagtaaatatctgtctgattcatacagaactttgttaactgattattatgcttatcctcaatatagtcacctgttgtttctttctagaaacccaacatgtgaaatagtggctaaatactttcctagataataaatacagaataagaatattggtgtgtcattgaaaaagatacttctttttcacttgagcttctttatatagttgtcaagtgaaatgaatatgaatttatgatcaatcctatgcattaggattttaacacatcatttggaatatatgctataaaaccttctgacagtagaggctatcagcccctttaggtgaaagaaaatagaagcctgtgcttcctctgtatgcaaggaatacagttctaggagagttagaatcatctgatttttaggaccaagggatgcaatgattacgagaacaaagctttgctgccagccagatctgagttagtgtcctggctctgccacttaaagctcaggtgaaggtgggcaagccactgatctttatgcctaaatatcctcacatgcagactggcagtaacgcctacatcataaggtcaatgttcagattcagtgtgaaaatgttacccagtctggcagcatgcctagaacgtataggtaggcctcactacataatactaaattattaaaactgtacttttattattttcttattgtcgtttgctgttgatgctgtcattattactaccaaccaagagtatattagaggtcctttctgctttataacattaggttcttcttgtgaggccttaagcatttgctaaacaggttcaagtaagtttagtaaagtttcattactgccattgattcaattatcaaactgcttttgtacatataaagaattcttcagatgcatggtttctattaacaagatccaatgccttccttttatttccccttcagttcaacatctaatatataaagattgctctgactactacgcaataggcaaaagaagcagtgagacctacagagttacacctgatcccaaaaatagtagctttgaagtttactgtgacatggagaccatggggggaggctggacagtgctgcaggcacgtctcgatgggagcaccaacttcaccagaacatggcaagactacaaagcaggctttggaaacctcagaagggaattttggctggggaacgataaaattcatcttctgaccaagagtaaggaaatgattctgagaatagatcttgaagactttaatggtgtcgaactatatgccttgtatgatcagttttatgtggctaatgagtttctcaaatatcgtttacacgttggtaactataatggcacagctggagatgcattacgtttcaacaaacattacaaccacgatctgaagtttttcaccactccagataaagacaatgatcgatatccttctgggaactgtgggctgtactacagttcaggctggtggtttgatgcatgtctttctgcaaacttaaatggcaaatattatcaccaaaaatacagaggtgtccgtaatgggattttctggggtacctggcctggtgtaagtgaggcacaccctggtggctacaagtcctccttcaaagaggctaagatgatgatcagacccaagcactttaagccataaatcactctgttcattcctccaggtattcgttatctaatagggcaattaattccttcagcactttagaatatgccttgtttcatatttttcatagctaaaaaatgatgtctgacggctaggttcttatgctacacagcatttgaaataaagctgaaaaacaatgcattttaaaggagtcctttgttgttatgctgttatccaatgaacacttgcaagcaattagcaatattgagaattatacattagatttacaattcttttaatttctattgaaactttttctattgcttgtattacttgctgtatttaaaaaataattgttggctgggtgtggtagctcacgcctgtaatcccagcactttggaatgtcaaggcaggcagatcacttgaggtcaggagtttgagaccagcctggccaaacatgtgaaacgctgtctctattaaaaatacaaaaattagccgggcatggtggtacatgcctgtaatcctagctacttgggaggctgaggcaggagaatcgcttgaacctgagaggaagaggttgcagtgagccaagactgagccactgcactccagcatgggtgacagagaaaactctgtctcaaacaaaaaaataataaaatttattcagtaggctggattctacacaaagtaatctgtatttgggccatgatttaagcacatctgaaggtatatcactcttttcaggctataattatttgggtaatcttcattctgagacaaacttaatctatatcatttactttgcaacagaacaaccctacagcattttggttcccagactaagggaactaatatctatataattaaacttgttcatttatcattcatgaaatataaaatacttgtcatttaaaccgtttaaaaatgtggtagcataatgtcaccccaaaaagcattcagaaagcaatgtaactgtgaagaccagggtttaaaggtaattcatttatagtttataactccttagatgtttgatgttgaaaactgctttaacatgaaaattatcttcctctgctctgtgtgaacaatagcttttaatttaagattgctcactactgtactagactactggtaggttttttttggggggggtgggtagggatatgtgggtaatgaagcatttacttacaggctatcatactctgaggccaattttatctccaaagcaataatatcattaagtgattcacttcatagaaggctaagtttctctaggacagatagaaaacatgaattttgaaatatatagaacagtagttaaaatactatatatttcaaccctggctggtagattgcttattttactatcagaaactaaaagatagatttttacccaaacagaagtatctgtaatttttataattcatcaattctggaatgct

SEQ ID NO: 23796 - DNA, 4196 bp, Homo Sapiens
gctgtgcagctgaggcgccgccgtggagccgccttggagccaccgcccccgatcgccttcgccgctgcgttggggaacctggaccgcgcggcgccgggtttccctcatgatcccgggcgggtggcggcggcggcagaggcggcgggaggatgacctcttaccgggagcggagtgccgacctggcccgtttctacactgtcaccgagccccagcgacacccgaggggctacacagtatataaggtcaccgcccgggttgtttcacgaagaaatccagaggatgtccaggagataattgtatggaagagatacagtgattttaagaaactacacaaagaactatggcaaattcacaaaaacttattccgacattcagagttgtttcctccatttgctaaaggaatagtgtttgggcgatttgatgaaactgttatcgaagagagaagacaatgtgctgaagacctgctacagttctctgccaatattcctgctctttacaatagtaaacagcttgaagactttttcaagggtggaataattaatgatagttctgaattaattggtcctgctgaagctcactcagattccctcattgatacctttcctgagtgtagtacggaaggcttctccagtgacagtgatctggtatctcttactgttgatgtggattctcttgctgagttagatgatggaatggcttccaatcaaaattctcccattagaacttttggtctcaatctttcttcggattcttcagcactaggggctgttgcttctgacagtgaacagagcaaaacagaagaagaacgggaaagtcgtagcctctttcctggcagtttaaagccgaagcttggcaagagagattatttggagaaagcaggagaattaataaagctggctttaaaaaaggaagaagaagacgactatgaagctgcttctgatttttataggaagggagttgatttactcctagaaggtgttcaaggagagtcaagccctacccgtcgagaagctgtgaagagaagaacagccgagtacctcatgcgggcagaaagtatctctagtctttatgggaaacctcagcttgatgatgtatctcagcctccaggatcactaagttcaaggcccctttggaacctaaggagccctgccgaggagctgaaggccttcagagtccttggggtgattgacaaggttttacttgtaatggacacaaggacagaacagactttcattttaaaaggtctaaggaaaagcagtgaatacagcaggaacagaaagaccatcatcccccgctgtgtgcccaacatggtgtgtctgcataagtacatcatctctgaggagtcagtatttcttgtgctgcagcatgcggaaggtggcaaactgtggtcatatatcagtaaatttctaaacagaagtcctgaagaaagctttgacatcaaggaagtgaaaaaacctacacttgcaaaagttcacctgcagcagccaacttctagtcctcaggacagcagtagctttgaatccagaggaagtgatggtggaagcatgcttaaagctctgcctttgaagagtagtcttactccaagttctcaagatgacagcaaccaggaagatgatggccaagatagctctccaaagtggccagattctggttcaagttcagaagaagaatgtactactagttatttaacattatgcaatgaatatgggcaagaaaagattgaaccagggtctttgaatgaggagcccttcatgaagactgaagggaatggtgttgatacaaaagctattaaaagcttcccagcacaccttgctgctgacagtgacagccccagcacacagctgagagctcacgagctgaagttcttccccaacgatgacccagaagcagttagttctccaagaacatcagattccctcagtagatcaaaaaatagccccatggaattctttaggatagacagtaaggatagcgcaagtgaactcctgggacttgactttggagaaaaattgtatagtctaaaatcagaacctttgaaaccattctttactcttccagatggagacagtgcttctaggagttttaatactagtgaaagcaaggtagagtttaaagctcaggacaccattagcaggggctcagatgactcagtgccagttatttcatttaaagatgctgcttttgatgatgtcagtggtactgatgaaggaagacctgatcttcttgtaaatttacctggtgaattggagtcaacaagagaagctgcagcaatgggacctactaagtttacacaaactaatatagggataatagaaaataaactcttggaagcccctgatgttttatgcctcaggcttagtactgaacaatgccaagcacatgaggagaaaggcatagaggaactgagtgatccctctgggcccaaatcctatagtataacagagaaacactatgcacaggaggatcccaggatgttatttgtagcagctgttgatcatagtagttcaggagatatgtctttgttacccagctcagatcctaagtttcaaggacttggagtggttgagtcagcagtaactgcaaacaacacagaagaaagcttattccgtatttgtagtccactctcaggtgctaatgaatatattgcaagcacagacactttaaaaacagaagaagtattgctgtttacagatcagactgatgatttggctaaagaggaaccaacttctttattccagagagactctgagactaagggtgaaagtggtttagtgctagaaggagacaaggaaatacatcagatttttgaggaccttgataaaaaattagcactagcctccaggttttacatcccagagggctgcattcaaagatgggcagctgaaatggtggtagcccttgatgctttacatagagagggaattgtgtgccgcgatttgaacccaaacaacatcttattgaatgatagaggacacattcagctaacgtattttagcaggtggagtgaggttgaagattcctgtgacagcgatgccatagagagaatgtactgtgccccagaggttggagcaatcactgaagaaactgaagcctgtgattggtggagtttgggtgctgtcctctttgaacttctcactggcaagactctggttgaatgccatccagcaggaataaatactcacactactttgaacatgccagaatgtgtctctgaagaggctcgctcactcattcaacagctcttgcagttcaatcctctggaacgacttggtgctggagttgctggtgttgaagatatcaaatctcatccattttttacccctgtggattgggcagaactgatgagatgaacgtaatgcagggttatcttcacacattctgatcttctctgtgacaggcatctccagcactgaggcacctctgactcacagttacttatggagcaccaaagcatttggataaagaccgttataggaaatgggggggaaatggctaaaagagaacaattcgtttacaattacaagatattagctaattgtgccaggggctgttatatacatatatacacaaccaaggtgtgatctgaatttaatccacatttggtgttgcagatgagttgtaaagccaactgaaagagttccttcaagaagttcctctgataggaagctagaagtgtagaatgaagttttacttgacagaaggacctttacatggcagctaacagtgctttttgctgaccaggattggtttatatgattaaattaatatttgcttaataatacactaaaagtatatgaacaatgtcatcaatgaaacttaaaagcgagaaaaaagaatatacacataatttctgacggaaaacctgtaccctgatgctgtataatgtatgttgaatgtggtcccagattatttctgtaagaagacactccatgttgtcagctttgtactctttgttgatactgcttatttagagaagggttcatataaacactcactctgtgtcttcaacagcatctttctttccccatctttctattttctgcaccctctgcttgttccctcatattctgttcttccgactcctgctaacacacatgcaacaaaaaagggaagggagtgcttatttccctttgtgtaaggactaagaaatcatgatatcaaataaacatggtgaaacattaaaaaaaaaaaaaaaa

SEQ ID NO: 23797 - DNA, 79141 bp, Homo Sapiens
ccgacacaaactccaccttactgtcatcagaaaggaacacatagctatttagtcctgcgccctcaagtggttgctcgcatgttaggattcgatctttgggttgtgtttgctttctatagataccgcgttttcaattttctttcttttctgttttgctctttgaaaatcagtaacacagaagacagcaaaattgtcactatcagtataatatcgacctcttatttcgaaaattgtaattgtatttctattcatggctaataaatggctattagtgtgggacaatgtcactgtggcagattccagactctctccgttactgagtgagttctggatgtttcattcgttctttttcgcacttttctataatgttaaaatctcggtttcttgccgatattttttattgtaatattcaaagccctacctatctagccttgtgaattcccatctctgtttttactcgaagtgttctcttcagctggaaaacctgtttgcttttggacaaatcccaaactctaaccttcccagaaaaagatcctttaacatatcaaaaccaatagtatgtggtaaataactgggtttcagtcttatctcctccaactgtaacttcttagagcgcaagacacctacaccaacacgaaattctactgtagaattggcaaccaattgtgtgattgctgttcgattgtcccaatatctttaattagatatagtaagcatggcttcttaactatattttaaattctttttcctttctttctttttttttttttttttttgagacgttgtctcgcttcgctctttcgccaggctggagagaagtggtgtgatctcggctcactgcaacctccgccccctccgccctccaggttcaagcgattctccgcctcccgagtagctgggattacaggcacctgccaccatgcccagctaatttttgtatttttagtagaggcgggtttcaccatgttggccaggctggtctccaactcctgacctcagttgatccaccctcctcggcctcccaaagtacaagcgtgagccactgcgcccggcctaatttcttttttttttttttttttttttttttttttttttgagacagagtctagctctgtcacccaggctggagtgcagtggcgcgatctcggctcactgcaagctccgcctcctgggttcatgccattctcctgcctcagccaccccagtagctgggactacaggcgcccgccaccacgcctggctaattttttttgtattttaatagagtcggggtttcaccgtgttagctaagatggtctcgatctcctgacctcgtgatccacctgcctcggcctgccaaagtgctgggattaccaccgtgcctggccctaaattcttaaatacttagcattgaggcttatcataaggaagctggtgctcaatgaatgattctgaatgattacaatttgtctcaaattccttaacaatacgaattttaggtgttttttgtttgatacagggtctcactctgtcgcccgggctggagtgcagtggcatgatcatggctcactgcattttagtacttttgttgccggaaaaaggggtcttcaccgaacctggagagagggttcttggatctcgtgcaggaaagaattcagggtgaaagaagcaagtttattggaaactactctgttacagagcaggatgttctcagaaagtaggaggagaaacaccccgttcttaagtttttcttatatagtgatcttacctatgtaaaagctaggctaagctgtgcctacatacgggtgagcagacaacatgacaaattttgttactctgttgatttaaagaagacaattattgacattttagtgtgtgaatacgtaaaagcataactgtgattatcttaaaggcatatattgttgtagatattaggacatttggacttcttgctgttgtaggagtcagtcctagttatcttcaggctgtttccttaattataaacatcccatgactatgggtcgtggcaggcaaggaatgtgccttgttagtcctaaaatggagctgaacttaaaatggcattattctagctttcctaggctgctgcttccctaacacgttgacaaacacattgacaaacagtaattgtgaattgtcattctagcaaataaccaaccagataggaaacaagtagacagagtgactatcttaaatagacctattcattaattttatttcatatgtcatacattcatcggtttattcattcattcattcattgctcattcttttttatttttttccgagacggaagtcttgctctgtcacccaggctggagtgcagtggcgcaatctcagctcactgcaacctccgcctcccgggttcaagcaattttcccgcctcagcctcccaagtagctggattacaaacggtgggcaccaaatgtatttttagtagagatgggggtttcgccatgttagccaggctgttctcgaactcccgaccttgtgatccgccggccttggcctcccaaagtgctgggattacaggcgtgagccacggcgcccagcctactcattcttcaacaaacatttaacaacaagtactatgtgaccgactccgaactgtccactttcttcctatggtttgacaacagaaaattatagaaaatctagcgctgtctttacccttgttttatttaaaactgccctaacttgagtcttcagttcttcttagggctccaggaaaggagggaggataagaataccttgtacaatgttaataagttctagattgccagatagtgtattcatcaaaatctaactggaaaaaaatatgccctggacacctaagaagtttatactgcttttctccttaaaatgaggaagctgtagaatataactggttagagaaaataatataaccacttcagatatctgaaagcctcagtctcaagaagtctccctgctctctctcttttcccttttgaatttactatagctattatcattttagatttttccccccaacttcttctatctaatcattaaaaaggaacttgtcttttactcggcaggccaaatacttgagtatctcatttgactgtcataacaatgatgcagaaagactgacaataacaaaactcagaatattgattgcttcattgacagtgggaaatatccctatttggtaggaggaatgcctgcgctatctgtccaggcacatgcttccctagaattaggtccttgggaagcagatgtagtacacagatggttgcagggcccaggaaaacagtgtatcttgaggaaaattttatcccagctacagtgaatttagaagtctgacagcacagccttctcctgtaagaattaacacctccctaaggacccttttaccctcgttcccccaatttggtgtctctgtgccaaggggaaggagacactagaactctaattttccaattttcaaaaatttctagcagcaatgcttctggattaagacattctttgtgaaactgatttggcttcaggcgaatctttctcaaggtggcctgggattcctctttgaatctatctgatttgttatctgcgaggagtcaaattctcagggttcctgggacaccacccacattccaattttcctctggcaacagatcttgaagacaaagacagacaggctagaaattgggactctttttctcttgattatacttctcatccaatttatacccagtcctgtaattcttttcgtgaaatgtctctcaaatcctgtcttctcatccccactatcaataccttatttcctgctctcttcattcttgccctgctgcagtggttacctttttaaaacacagatccgaacttcttacacccctttcaccactctccactgcctccagaaaaaacacaactcaaggctcttcaaaatatgaccgcagcctcctttcctggcattctctcttcccctctttccctcactcccctcaagttgcaaaccacaaaggattcacctaatgtttctcacacttggtaggtgatttcttttctctgaatgtgcttttcctgttttctccgttctctgagtttgcttttcctgttttctctctggtgaattattcatcttttaaagttcaccttaaatgttttatccttggtgaatctttctagatgcttcttgggccagtggattttaggagagcgaggtatatgtggctgaggtacatcacaatcagcagagaagctttaaacactgctgagagtcactgtccctgctggccttgggtttcttctttattcactcttcctttttttgagacggagtctcgccctgtcgcccaggctggagtgcaatggcgcgtgatctcgtctcactgcaacctctgcctcccaggttctgtagcaggatgagccgcagacaaaactcctcagacacggagttaaagaaggaaggggtttattcggccggaagtatcggcaagcctcctgtctcaagagcctagctccccgagtgagcaattcctgtcccttttaagggctcacaactctaagggggtccgcgtgagagggtcatgatcaattgagcaagcagagggtactgtgaatgggggctgcatgcaccggtaatcagaacgaaacagaacaggacagggatttttacaatgcctttccatataatgtctggaatccatagataacataaccggttaggtcaggggtcgatctttaactaccgggcttaggtcaggcaggcccaggcctggtttcgggtctggttcttaggcgccgggttacctgcctttaatttcgcttctctttccttttctgagtataaaactatatgagaggttctgtctctcttctctcagttcaagcgattctcctgcctcagccacccgagtagctgggtacagtcacgcgccacccatgcccggctaatttttttgtatcttttagtagagatggggtttcactacgctggccaggctggtctcaaactcctgacctcgtgatctgcccgcctcggcctcccgaagtgctgggattacaagtgtgagccaccgcacccggccctcatttttacaaatgtaattgagtacttgtttgtgtacactagtagacgatgtgcttcttgagagtaaagcccaggtgttctacatccatggttcaattaatgcattggtatcttttccaacctatggcatttgagatacaacttcaaaaggatctgctgacagaaatagggcaaagtggttctggtattttttttttttaagtttttttctcactaatgttcttatgatttcgctgtactgcaatgttagctgaaacagcacagatatcaggaatggcattgttaagactgaccttagacaaaaaccctgaagtgagaggttacattttgggttctcaccatactcttcccccgctcttgtcctaattgtctaaagcttgcttcccttcctcatcgtatcagcctcccacctgaatcttcccttttcctccttcacactcatctttcttgtgcccctgtcccccatttttcccttttgtaagccattttcataaggatccttccaaatatttcccctattgattggacaacccgtaggtggcagactgttctgggccaaggcaaccaagttgagcagggccagcaatcagtgtcgggaacttctgcagggcacttcagaatcagtgttgggaacttctgctttctatttttcacggacacagacaggaacacagatatgcgaaagcaaaacaatcaaaaagcattttcatttgtttttcaggtagtaggaaagagttccagattcccatccttctgaagccaggagggaggttcctaagaggaggttagggcaagatggagacttctttttaaactagtagatttcgcaaattgcaacacatacattatctagtccacgcaaaggacaggccttggggacacggcacggggaacgtgttccacctggacgactgaatcagaagtctctcccccatcaattgaacgcctcattatttttctttctgtcttttctttctttttaaggtaaatgaattgcttctttttcgttaggtgaggccggcagagaacaagaagagctgaaacggaggcgaggttagtacccagcaaagacctgtggcgaggagagacaatgaagaggaccacgggactggaccctgagaaaggcagaggagacgctggctggtggggcccgcaggcggacagccacgcaggcaggcggaaggctcggctcggcctgggaccgctgcagacccggcctccgcgcggggccgaggcgcctgggtgggaccgaggaggcggggccttcccggcggacggatgatggacagcctgactctccaatcgcgtccttaaaagggtgcgggcaggccaatgagcggacagcgagggccggagtggggctgaggcttcggtgcagagctggagagccgcggctgggaccggagtggggagcgcggcgtggaggtgccacccggcgcgggtggcggagagatcagaagcctcttccccaagccgagccaacctcagcggggacccgggctcagggacgcggcggcggcggcggcgactgcagtggctggacgatggcagcgtccgccggagccggggcggtgattgcagccccagacagccggcgctggctgtggtcggtgctggcggcggcgcttgggctctgtaagtgatgccaggaccagggctggggccggggagtggggcccccgggcccgacacacgcccatcgcggcggtcgcaggccaggcgcgcgcactgagagccgaggtggggagggggcgcggcctgcgctctctggggccgaggggacccagcccatggggaacgcgggcctccgcgactggccgggaaggcgcagagcctctttcttctctttcctggatcctggagtgcggaggaggaggggagagtgctttaccttgctccttcccggggggcggtccaggggagcggacccggcgggcggctgcggtgagccctcgcggcgcaccctgccctctcctcgtggtgactctggatcgtctaggccctcccggattctgactcaggaactagggttctggcgttcttcacctttgggaggtggcggaaagttgcaggtttttcatttgtagggcctttgttgatttgtttcctgttaagccagggttttgttgtaagttccctttcccatgctctcattcagttttaagtctccgtaataaaagagtctcatttccgtggtctgcaaaacgccaataaaaaaatattgttacttctaggttagaatgcaaagagcttggaataccagtgagatggcctggcttaaaagaatttggtcaaatccatcataattccagacgtagccaccataatttgacaagacatagagcattaaaaagcataattttcctaaaggaaaaaaaaagctcctttttcttaccaaatattgtgactcaagcttaaggtaaacctcgggctcaatttatgggaattggatgacttgttttatggacatctgaagtggtatctgccacaggacttttctgtgttgttgttcaaagcaaagtacttgttgctgtctccgaatttagttaaataatagttataaagagggccagctgctaagaaaccacgtagatttttttcattccctttgttttcaaaatgtcagttatgatttagcatcacagtatctgaataccagagtttactcagtaatttctttcttcatggaaaagttcttaatataatccttggatcagggaaactaggtgaagttctgttggatcaccaactgttccacttaaacagtgattccaggggctgtaaagcataaatgtaaaagtctccctaccctccaggggttgacagatgatgacacactttgtgtaagacacaatccattctgtattttgtcttagaaaaaaaggttaaaagtgtgtttgttggtggtggtatttgtgtttaatcaaacaagtagaaaatagcctaaaattaaggtttatcagaaatatgcttcagacagaattgttatgcatgagaggtcagacattgctatggaggacaaagcagttagggtgatcttaattaaaatcagggtattaaacgtagaaggagtgcaaaactacatagtagtgaaaagatcactagagtaatagccccatacaacttggacgtaactcttcagtaatgaagatgaatgttgatatgtaaaaatcagcagctgatgttattggttcaacttagaaaattattgaatctaaaattcttgccaaatcacctcttttctggtcatggatactgcacataagagtttatcttttacaggatagcttctaaagttttatcaagacagttactcagcaaacattcactgagcaccttttaagtgcttaacacttaaaaggtgggaggttaggtctcactgtgttgcccaggctgctctggaactgaaactcctgggctccagtgattcctctgccttttcctcgcaagcagctggggctacaggtgtgtgccactgtgtagggtcagaagcacattggtaaagatgtactgtgggagcttgaaggagggtcattatctcagactgtagttcaggctactggaggaagggagtttaaactgggtaggcatgggggaggggcagaagtacatacagagttatgaatgaacctgttggtagttcagtatagtgggaggttggagtgtatataaggggaatggtgggagttgaggcaggagagcctgccaagggcaccagcttacaaagggccttgtctgccacacttaatccaatgaggatttctctgtctattgagatgtgaaggatgggttagagtggggtgaggctgaagccagagaaggcagaggactattgtaataatcccggggaggatgatgaagatctgaattcaagcattgggctatgaagagaggacacatgttgatgcgccacttagaaagtacgtttgatagagcttggaaacattgatgcaggcttgaaagaggaggtggataaaatgatcataggttttgggcttgggaagctgggcatatttttggccttttcacagatggggaaataggagtcttgggggaagaagatgatggagatacttttgaatatgttgagtttgagatgcgggtaagacatccaaatggagatgggcagaaaacaattggatagacagttctggaggtgaggagaaagttctggttggaaatggagatttagagagttatgtggctaatagttaaagcttggattgtttggatgagggcatccagggaaaatgcactgaagaacatagcagagagccaaagacggagttttggggtatatgaaacctgacaaagagtctctgtgagtaagagaaaaaccaggtgagtttggtatttcagcattgtcagatgaagagagataaaatgtgataagaattcactgaatttggtaattgaaatgagcacatagtatatgaggactaaatctcagtaatttgtaccatccatgtcagtaaatggaacctccatacatctaattgtgcaggccagaaacctagggtccatccctgattcttccctgtccttcacatccaatcagttctcccatctttaaaatgcatctggaattgatgttttttctacctccactcctagccttttagtcaaagtcaccaccatttcttgcctatattactgtgatagcctcccagctgctcttcctctttttccccctctggagtcttgctctgtctcgcccaggctggaatgcagtggcacaatctcggcttactgcaacctccatctcccagattcaagtgattcttcttgtgcctcagcatcccaagtagctgggactacaggcatgcaccaccatgcctggctaatttttgatttttctatttatttttaaatttattttatttatttattttttgggggatggagtctcgcactgttgcccaggctggagtgcagtagcgtgatctcggctcaccacaacctccacctccctggttcaagcgattctcctgccttagcctcccgagtagctgggactacaggcgcatgccaccatgcccagctaatttttgtattttttagtagaaactgggtttcactatgttggccaggctggtctcgaactcctgacctggtgatccacccgccttggcctcccaaagtgctgggattacaggcgtgagccaccacatctggctgatttttttatttttagtagagacagggtttcaccatgtttgccaggtctggaactcctgacctcaagtgaccggcctgcctcagcctcccaaagtgctgggattacaggcatgagccaccacgcccagtactcatcttggttcgttttaatccattcttcacaaaactgcaagaatgattttgttaaaatgcaaatcagatcatgttgccttcttttttaaaatccttaatggcttcccattgcacttggaatgaaatctaaacttcccatggcctgaaaagctctttgtgatctggtttctgcttacctctatgacctcaacttgtaccacccaccacccctttctcactatattcaagccacactgccatctttctgctctgtgacactcattcccacctcctagcctttgaactagctgttctgatgttgcccagggctggctcctttccatcacagaggctctaagtttcacatctttagagaggcctctctgaccaccttattctagggtacttacctgttactatttgctggtttgccgtttacttccttattgtaatttctatatggtttttcttctcttttttttcctccatcagaatctgggacagacaaatcatctgtcttgtttatagaagtattcctagtgcttaacacagtggatatggtagatgctaaaaatatttgttaaatggcagtgaggcataggcatgtcttgacaacagtttgttaggagtttgcaatatgtagttatgatttagcatggtatagtaggtcctcaatatgtgtttatgcaagaagaatatttttccaaagtgtgatttcatgcactgcttatttctcattatcagttcccttggccttttacttatttactagtcaggatagtaaaatagaaacttagtcttataaaatatgtatattttttactccaactccaggatatccactaggcttagatgctgccaaaagaaaaagataaatgttaagtgaaagacagctatgtgcaaaagaacataaaatgcaagtttgtgttttcattaagtctaatttatttacttattcaacgtaaatgaacacctactgggcacaaggcactgtttatgtatgggatgcagcagggagcctagatgctagtgagaagtgacagacaggaaacatctactcaaataaataataccaaaggacagattaaattcccaacaatcacaacttttaagaaaatatgattgatctaatatgaaaatttgcagcaaatttttgaaaaatggaacatcttatttgtattataaaatatttttaaaacttataagggatatgttatagggtttctttaaagattggtctttcccactgagttttaaaaacatgatttaattgggaaaaacatagcttttcagaaatattgctgtttcccctctatccagtagatgctggtctacctactaaatatttctcaccatccactttgcatccacactggagctaatatagtacagccacagtcatgtctctactggatgattagagccttctaactggagcctgactgtttttgagttatatcttttatctgagaatttgaattatttgtgtaagacatacatctcatgtgtacctcaaccttggaaagatttttaatcttgctctctaagaccacagatgtcattttaaaagggagagtaaaatggtaagctttggcatataatttattatagattagtctttagccccatcgaagacggtataattattagaagaactagaagcatctcctgaggtctcaagtgtcatatggctctgagacttgacccctaaggctggtgatattaagccttcatgtatcttgaatgatattccttttttccttttccactcttactttgctaagtcgtttgacattagcagtgccctagagtccagacaaaagtctttggaatttttgctgccgtaagaaagcagaggtcagttggctccgttcaccatagtgcataaattgagaaattgtggttgtctcctgggatctttatatctttgcctttaaacccctttgtttattcattatcttttttctttcttttccttttttttttttttgagacagagtctcgttttgtcgcccaggctggaatgcagtggtgcaacctcggctcacagcaacctctgtctcccaggttcagtgattctcctgcctcagcctcccaagtaactgggattacaggcataagccaccacgcccaactaattttttttttttttttttttctgaggcagagtttcactcctgttgcccaggctggagtgcagtcgcgccatctcggctcattgcagcctcttcctcccacgttcaagcgattcttctgcctcagcctgccgagtagctgggattacaggtgcctgccaccacgcctggctaatttttttgtatttttagtagtgatggaattttgccatgtcgggcaggctggtctccaactcctgacctcaggtgatccacccaaagtgctgggattacaggcgtgagccaccgtgccctgcccaaattttttttcttttttttctttctttctttctttttttttttttttttgtatttttagtagagatggggtttcaccatattggccaggctggtctcgaactcctgacctcaggtgatccacccgcctcggcctcccaaaatgctaggattataggcatgagccaccgtgcccaacctattcattgtctttttcaatgcatgtggctactgtaattttttattcacttaacaattttttcttgatcccattaggcctttatccaagatgatttcattgataaatcctccttcagtaggtttcttcttctaaactcagagtctctagaaactgtgataccttatgatacctctgatcttattgttagaacatagagcttgagtaattttgtagcaacagtgatacactgaatccagtacttaggtttaattgattggagttagaaatgcagtatgtctttgcctatcctgtgtattgcagataagattgccccatagaatgaaatctatgacttaagttttgttaggagcatgctgcaaccaactgaacagaccttgatgaacttgcaatgaacattttttcatactgggaccctgatattctactttaggatctggggagtttattacgtgcattttaaaagatgctgttatcggccgggcatggtgactcatgcctgtaatcccagcactttgagaggctgaggcgggtggattgcctgagctaaggagtacaagaccagcctggacaacatgataaaacccccatctttactgaaaataaaaaaaaaattagctgggggtggtggcgcacacctataatcccagccacttgggaggctgaggcatgagaatcgcttgagcctgggaggcagaggttgcagtgagctgagatcgtgtcatcgcactccagcctgggtgatagagtgagacaccctgtctcaaaagaaaaaaaaaaaaagatgctgttattaaaattaagaaatgtgttcttttctctccaaacattaagtttacaatgtggagttatatacatttaacataatcatgtgcttcttccagataacacttggtaaacttgaaaagatgaaaagttataaggtgttatattgtcagcttagcttcaatgagaacctagtgaccctgtggccagacagtgtctaatagttattctctagtcaagtccaggttatcattgctatatactttcttccaaagggtgttgctgagaattaggaagcatagatagaggactcaggttcctaagagaaatgtggtaaaatgcaaatatttgaaatctcctagatgtctgaaaagagaagagaaagagagtgagtgagcagttagggagatgttttaacttctccctctcccttttctgtttcttagcccttagaagttagggcatagaactaggttcatgttatatcttctgctctgctctcatttattgagtgcttactatgtgccacgcctttgctaaacgatttacttatatactcctcacagctctgtgcaataattatttttattaattttatagataagaagagtaagtttcagagagattgtgtaacttaagggtcttaagatcacacagctaatacatggtagagttgagactcaatttccaaagcacatgtttgcaaccaccctgctgtattatagaattttttcttcaaagtctctaaacattttggggaagattctggaatgtcttaagtgtttacagagtggctttttagctgtcctggggcatccagatttcttctttggggtgatgtttgtgccaagatccctcatgccttgatgctgctgactctgttaaagaggaataaagctgccgtgttgaagccatcctcaccaatcatgcagaatctgtttgtgccacccaatactctaaatgctcctcagggatttttaatgatgttcttttttttttctttttctttctttcttttcttttttgaggcagagtctcttgatatggcccaggctggagtgcagtggcacgatctccactcagcgcagtctccacctccctggttcaagtgattctcccacctcagccttcctaatagctgggattacaggtgcctgccaccacacctggctaatttttgtgtttttagtagagacagggtttcaccatgttggccaggctggtcttgaactcctgacttcaggtgatccgcctgccacagcctcccaaagagttgggattacaggtatgagccaccatgtcagctgatgtggttcttgtaggttcttctcactcatacctctcccgctatcaagagcacaagcatgaatccattatactgagtgataccatactgggctcagaatggttccttgcccctcattacacattacatgtggaagaagccactaagccttgactttcttcctttgagatgagttcttctctggaggctgtgcaggtccttttgccattagactcctggcatgcttgccttacagaatgtccaaacaggcccaggcatccaaaccaaagtctcctcccttgtacctcttcttggctcctctgccccattgacagaggttctgtagccatgttgtctgccacaagttggaggtctagcacttgtctgttaactcttgggaactttgagtcttgatcattttcagctattaggaatttaattctttttttttcttcagtgactgcaaatttagaagaactgcagtgaggcttgctgaaccttgcacactaatgaaattggtgaatggattaataatgaacagaggtgatgctaatttgtaatcaggttgaataatatggatttaagaccagaaaatgggccgggtgccgtggctcgcgcctgtaatcccagcactttgggaggctgaggtggacggatcatttgaggtcaggagtttgaagccagcctggccaacatgatgaaaccccatctctactaataatggaaaaaattagttggatatggtggcacacacctgttatcccagctattcgggaaggctgaggcacgagaatcgcttgaacctgggggacagaggttgcagtaagccgagattgtgctactgcacttttacctgggcgacagagtaaaactgtgtcttttttttttttttttttttgagacggagtcttgctctgtcgcccaggctggagtgcagtggcgcgatctcggctcactgcaagctttgcttcccaggttcatgccattctcctgcctcagcctccaaagtagctgggactacaggcagccgccaccacacccggctaattttttgtattttttcagtagagacggtgtttcaccatgttagccaggatggtctcgatttcctgacctcgtgattccctcgccttggcctcccaaactgctgggattacaggcgtgagccaccgcacccagcctaaaactgtgtctcaaaaaaaaaaaagggggatcagaaaatgctaaggaggcaggaggatcacttgaggccaggagttcaagactggctggggcaaaatagcaagaccccatctctacaaagtaaaaataaaccaaaaaacaagttataggtccacagtttttttatctgtaactgcaaagccacaaatactttgaaaattaagttttttcctaagtttgatacaaattctttggctgcaaaattcaacctgaagtagtaagatactgtttacaactgtgatcctatttggtatgactaattgtatttttcaccgcagagatattaatgtgtttgattgtgggatgctgccctgtactctctagggactactacataatatatagtataggtattgtattaattttttaaaatctgaaaaattctatattctgaaatacacctggccttaagacttttcgattagcttgttggcttgtacaatatcttatctcagaaatttccttctactcttgtaagtactaagaactacaaaatattgcctgggcaacatggcaaaactgcatctttgggaagattgcttaggagtggaggctgaagtaagccatgtttatgccactgcactccagcctggacaacagagggagaccctgtcccaaaaacaaaaacaaacaaaaaaaatacaaaatacagtttagttatttattttttcatttttagaaatgtggtctcactatgatgatcaggctggagtgcagtggctggcaattcacaagtatggtcaaagttccctgtagcctcaaacttttgggctcaggtgatcctcctgtctcagtctccaagtacctgggactacaggtgtgtgccaccaaaccccagctctttttagttctttttttgagatgagtctagctctgttgcccaggttagagtgcaatggtgcgacctcagctcatcacaacctctgcttcctgggttcaagcaattctcttgccacagcctcctgagtagctgggattacaggcatgcactgccatacctggctaatttttgtagagatggggtttcgccatgttgaccaggctggtctcgagctcctgacctcaggtgacccgcctgccttggcctcccaaagtcattttagttctttaaatgttttggtccacaaagctagtgtgctttccacttaagagctttcattgaaactcctttagaaatttatgctactttggactcagcctgtcttttattcaaggaattctaaatctgtgaactggcacacgtttgggaattgattgaagggtcctgactttctgtttttatgattcacattagactttttgttcacttgacctagaacttttctgtttatatagatcaagtaagaatttagtaggtttcctatctatttcacttgtaggaataccgtgaccagctgatcaatgccatagatctgtgagagtcagacttccagctgtgccttgactctgctgtccatcatggtaatcatgcctaccttgcttttagcagttcagtgctgccatttggcccctgtcatcccatgatccaattattcccactgcatttacgtgtcccaatttagtgacagcagttcccactgtaagttctaggctatagataagagtgtcacaaagttcttttaaaatgctgggactcccctcacagatctacttttcacagtcatgtggtgaaaggtgtgtcctctggctgggcctggtggtttatgcctgtaatcccagcactttgggaagctgagatgggtggattgcttgaggtcaggagttcaagaccaggctggtcaacatggcaaaaccccatctctactaaaaatacaaaaattagctgggcgtgatgatgcgtgcctgtaatcccagctactcaggaggctgaggcacaagaatcgcttgaatccaggaggtgaggttgcagtgagctgagattgtgccactgcactccaccctgggtgacagagtgagactctgtcaaaaaaaaaaaaaattagccaggcttagtggcgtgagcctgtagtcctaggtacctgaaaggctgaggcaggaagattgtttgagcccaagagttcaaggctgcagtgagctatgattgagccactgcactctagcctgcaacagagcaagaccctgtttaaaaaaaaaaaaagatatgtcctctggacactcacaggtgagtaagtagatcttaaaagataaatgcactgtaggccgggtgcggtggctcacgcctgtaatcccagcactttgggaggccaaggcggacggatcatgaggtcaggagatcaagaccatcctggcttacatggtgaaaccccgtctctactaaaaatacaaaaaattagccaggcatggtggtgggcacctgtagtcccagctactcgggaggctgaggcaggagaatggcgtgaacccaggaggcagagcttgcaacgagccaagattgcgccactgcactccagcctgggtgacagagcgagactccatctcaaaaaaaaaaaaagataaacccactgtaacactccagtctccctaggcctttgaatgccttcctccatagtaagccgaggcaggcctggcatttcaagttcatttactgagggccacattttggtccatgtttcagccagcaaaccaaactgttagagccctttctaacaccctgagttgcgtaacattaaatgcagaatctctgattagtgggcccatatcagtaaatttggcctaacccaacttgacgttccctccaccatgatcccatacccttaatatccattcccacacatattccccagatttctgtttatataaattagaaaaatcaaatagtttttttagagtatgtgcaccttcatggttcacattttgtacctcacctttaggagcctcctgagacttaagtctagttatagatctagaagcaaagagaggcgttgggggtaggtcctgaggagaatcagcagtgtcttgcaatgcagctgcctcaggggaggccattaaagtttcctcaggcacagcaggtttaattgcctcagatgtgggtggatggctgcttccactggcaaaaaagactcataagaatttagggattcaatgtttccagctccataagggagttcccacatttctccattccaatattcaggatccctttccttcccaatcaatgccctcactttagtagcagacaccctgcagacgttgggaattcagtttgtgctgtagttgagtcatttgcagaataagattctggatttgattttcagcaatttcagctctatggctaacagagataaggatatctttcagacataaagttttctgttcagatatgtagtgctcaagctgggaatttgaatccctgagctcatccatttcttttctcactttgtccattgtcattaggagtaaccaacaaatctcattatactcattagtttgacaaaaatgtttaaaggtatagtatatgtggtcacccagaaccttattcttatacgtgtttgattaaaagtacccaatggtgacattttgcatatctccattgccacatcatacccatacttttactactggaaatagtcattagtgtcctttaatccagttagagagccaagtcctgaaaccctagaatcaattcagagaactcatccttaagattctgctcctttagagccactcttaaaaccaaaattagggttctccagagaaacagaaccagcaagatgtgcatgtgtgtgtgtgtgcactctctttttctttatataaatatagatagataacctatctatatcttgctggcatagatagatagataggaattcgctcatatgattgtggaggcttggtaagtccaaaatctgcagggtaggctggcaggctggagacctagggaaaagttgcaattcaagtccaaaggcggtctgctggcagaattccttctttttcagggatggtcagtctttgttattgttaagacctttaactgattggataaggcacacctacattataatggagggtaatctgctttactcagagtcccccaattgtaatattaatcttatcagaaaacagcttcacagaaataactaatgaattttaaaagataagccatagtggagatctcaaattgtggtttcccatgattgtaaacaattctattctttgttgtctctattttagcactttctctttacatctcaacttggtgctatctgacttcctcctcctctcactatttgacactttgataaaggccatctgatattaccaaatcaactaacctgtttcagccttttctttccagacctttttgctttccttaacatggttgaccactttgatctcatttcctttgcctttgtgacattactcctggttctcatctctcttccctgtcttcttcaagtcttcatcctctgcctgtggccccaatgttgattttccttaggcaggttctgctctcagccctttgctagtctcactgcatgcttgtctttggtaatttcgtccatttttgtctgtttgttgacagtgaatatgtggcagctataggcattcaatacgtatttgttgaataaatggtgactcccaaatatatccccagtgctctgaactgcagaatcttaccaactgaccattacatacaactggacatacccatttgaatgtccagaggcacctcaaactctgtatgctcagaactcaactctatatatctctcctcctcaaactgtgcttcctccggcatgccactcgctattgttattgcttgctgctgtcctatttgtctttccctcaagtcagccaagccaaaaatttggtcttcatcctagaatccttccctttcctcacctcacctccctggatttaatcagatctctgccagtgtttaccttttatttctgaacccactccctcctttccattgtcccaggacaaatgccagtcattttaagttcatgttactgcaagaggcttgagactcctagatcgtctctctaatggtagtcatcttcccttcaggtctgccctcccaactgttgccagagggatctctctcttgggcaaatttaattgtaccactcttctgttaagatcctccatctctccccattatctctgggatgtacttaggtctgccatccccttccttgtactttattgattttttgcaacatttctgcataatactgctgttttatgtctccttgaattcgtgtatgatattttcactcttctgattacccttgtcccttatttacctggctaactcctatttagctttctcatctcagatgtaatctcaaggccaagcactttgcctctaagcttcctctatctctttatctaaaattatgtttttatatgattgtctccccaaatacaggaactgtgtgtcttatatactttgggtctccaatgcttaacataatgcctggaacatagtaaatgtttagtatatattagatgaactgttgaactgtactcaagtggaaattacaaacatcagagcagagagggtgaaaataaggaagcagaacctcccagaacttaagatcttaagagcagggtagtaatcagtcctcaactttgtactgtagacactggatttgatagtgatgtggctcagggccaggatgaggctggggagggaactgggccaagatcaggaaggggttgaggggtggtgttcaataagatcgtaacgtcagtttaacttacagtgaactttataaacgctggggggctagtatattttagcagatcgggttgttagtacattctctccctgtgctgagatagattgttctcacaagattgcccagggaatatgggataagcccagtagatgtttattgaatgacctcaatggctctggccatcaagctatcatagcctaaaacacccctttcttcacagtaggaatataactgacaggtgcattggattagttacattacctcttcactgggcagtgatgcagtgtgctgacaatgacactttagatatgaggatatggcctagaaacattgattggcctttttctggatcttaaagagatttcctggatggagagcctgtcatttagagtagattatctctacagagaaccaatatcatccattgagtactgagatttcttgtgtttttttgtttgtttgtttgtttgtttgttttgagacagagtcttgctctcgctcaggctggagtgcagtggcgcaatctcggctcgctgcaagctccgcctcctgggttcacgccattctcctgcctcagcctcttgagttgctgggactacaggcgcctgccactgtgcccggctaattttttgtatttttttagagacgaggttccaccgtgttagctaggatggtctcaatctcctgacctcgtgatccgcccgcctcggcctcccaaagtgctaggattataggagtgagccaccgcgcctggccaagatttcttgttttaaaattcattacctttttttgatttaactaaataatcaggtctctaccagatttcaagatatttagtacgctaatgttgaattgaaagaaccttggacttgagtcagtgcacaaaaatgaacatgaagaccacaaatactcatgtctgctaacaacatagtgatacaaataagatgtccgtgtaactactaaccccattatttactgatctccattgctgtactttgtatttttcctactatttatagctggaaatatattgatatggtttggctctgtgtccccacccaaatatcattttgaattgtaatccccagtgttggaggtgggaactggtgggaggtgattggatcttgggggtggggatttctcatgaatgatttagcaccatactcttggtgctgttctcttgacagtgagtgagtgagtgagttattgcgagatctggttgtttaaaagtatgtagcacatcctcctctctctcttgctcctgctcttgccatgtaagacatgcctgctccccattcaccttctgccatgattgtaagtttcctgaggcctccccagaagccgagcaaatgccagcatcatgcttcctgtgtagcctgcagaaccacgagccaattaaacctcttttcttaataaattacccagtctcaggtatttctttatagtaatgtgagaatggaccaatacatatattttggtttttcggagtttttttgagagagggtctcactgtcacccgggctggagtacagtggctcaatcttggctcactgcaacctccacctccaggttcaagcgattctcccacctcagtctcgcgagtagctgggaccacaggtgcacaccaccatgcccagctaagctttgtgttttttggtagagacagggtttcaccatgttagtcaacctggtcttgagctcctgacctcaggttatctgcctgccttagcctaccaaagtgctgggattataggtgtgaaccactgcacccagccaaagggactaatacatacacatacatatatacatatatacatatatatatatatatatatatatatacacatatatatatttatgtttattctttcttggcgttcctgctgcagtatgaatctctgccaaggcccagaaaagtgactgggacatagaatgaattcaggtgtttgttgaatgaatttattggtggtgtgcagagtgttaccatgctttgttggtttgttaattgaaagtttttaagtagaagagcttttgaattttgaaagaataattaaagctttcaaaaattctaagatgtaatttaccttatacagatgtagaaattgagctctcaagttctctgtatgtgctgccttcccataaacattaaacattgccatgacacccagagaagccccagggagcctggtaagcagccatatacctggggaatatagctagagaacttttgttttctgcctcactctcaaaagtgtctggatttgccccctcatttgtcatatccctgttaactacagtcactactctaaacatctactttggctctctttccttacccctcttatctgctcagaacctccttaccagaaaatgtagcaactccacaatcttttcccacccttcaagcaccatatccttttatagtttcactacgacagtttctggagctcatcaagtcttcccatccctccctgcttttgttttgtattcgttacttcctggctgcttccctctcccgctccaacttggagtccatagttcattgttataatcattcctttgtaaaggctcctacttccccagcccttctgtgccatcattgcacttacctggcaatccctcaaccctgggaaaaccctaccatctctttttacatccttaagcatttgttgctttaattattgccctctttagatcattcttactacaatacaaacatgagctagaatttctaatcttaaaaaccttctcttggttctatagtcctctttagctacatttctgggccgtaactcttagcaaatttttacaaaaatggactatactcctttctttgtatgtacaccctcccttcccactttcttctgtccagccatcccacagctgcctctgccactccattgaaacttctcctatcaggatcaccagaggactccaggttgacaaaccatattagttcttccctatagccaccttatatgacttctcagtccctcctctcttctcttggctttacttacaccacattctctggttttcttcccctctcacagtctgctccctttccgccaccttttcagggtcttttctccctccctgacctttatagtttgatgtctgtatgacttcggcttggctctcatcttcctctacattattttcctatgtaatagcatcttctcctgtagtttaaaatactgcctgtatgctggtaacttccaaaatttatatacaattcagacctctctgaacatcagacctgcatatccggttacctgcttaactccatttagaggtctcaaggtctcattgacattgcaaacttaacatttccaaaatggcaggttgctttctattccttctctccagttaaatctatccagttgctcaagctagaaacccaggagttattctccattcatcccttctcttcactcccatgtccaatctaatagcaagaagtcctgtatgtcatccctttctctcaccatctccttgcctctagtctaggtcatggctgcagtacacagcaccagaattactgcagtcacttctttggtttttgttttgagacagtcttgctctgtcacccagactcaagtgcagtagtgtaatcacggcttactgcagccttgaactcttgggctcaagcaatcctgctgcctcagcctcctaagtagctgggactgtaggcatgtgccaccacgcctggctaattttttttttttttttttttagagatgggggtttcgctatgttgtccaggctggtcttgacctcttgggctcaagtgatcctcctgcctcagcctcccaaagtgctgggattacaggcatgagtcaccacgtctagcctgcagtcactttttttttttttttttcctgacaaggtctcacttgtcacccaggcgtgctgtggcatgatctcagctcactgcaacctccgcctcccagattccagcaattcttgtgcctcagcctcctgagtagctggaattacaggcacacgccaccacgcctggctaatttttgtatttttagtagagctggatttcaccatgttgaccaggctagtcttgaattcctgacctcaagtgatctgctcgcctcagcctcccaaagtgttgggattacaggcatgagccactgtgcctggcctgcagtcacttcttaactgctttcccaatttcagtccgtattcccctccactccattttctacatagcagcaagaactattttacatcaggtgctgtcattttgttgtttaaaaccctttagtcttggctgggcactgtggctcatgccgataatcccagcactttgggaggtcaaggcaggaggatcacttgagctcagcagttcaagaccggcctgggcaacatggtgaaaccctgtctctacaaaaaatataaaagttagctgggcctgatggctcacacctgtagtcccagctactcaggaggctgaagtgggaagattgcttgcacctgggaggttgagggtgaagtgagccatgatcatgccactgcactccagcctgggtgacaaagtgagaccctgcccccagaaaaaaacccttgttgggaggtcaaggcaagtgtatcacctgaggtcaggagtttgagaccagcctggccaacatggcaaaaccccgtctctactaaaaatagaaaaattagccaggcgtggtggccctcacctgtagtcccagctactcgggaggttgaggcaggagaatcactttaacctgggaggcggaggttgcagtgagcagagatcatgccactgcacttcagcctgggtgacagagcaagacaaaaaaaagaaaaaaaaatctttgatcttatcaaattgttcttgttttccataatatcaaaaacccggcatataaatatataacaagtataagagtgtatcgcctaactatattatgggcagataccttaatagtatctttcaaataaaaaagatacttgccaacttttaaaataaatatatatggagtgcctgagggaatttcttaaggagtccatagtctatcatcagtctaccataatcagaataggaactatagtttattttggaatggattgtgaagattttctctcactctgtgggttgtctgtttactctgctgactgttccttttgccacacaaaagctctttagtttaagtcccagctatttatctttgtttttgttgcatttgcttttgggtcttggtcatgaagtctttgcgtaagctaatgtctagaagggtttttccaatgttctcttctagaatttttatagtttcaggtcttagatttaagtccttgatctatcttgagttgatttttgtataaggtgagagatgaggatccagtttcattctcctacatgtggctagccaattatcccagcaccagttgttgaatagggtgtcctttccccacttgatgtttttgtttgctttgtcaatgatcagtaggctgtaagtatttgggtttatttttgggttctctattttgttcctttggtctatgtgcctatttttattacagtaccaggctgctttgatgactgtggccttatagtatggtttgaaatcaggtaatgtgatgtctccagattgtatgcaggctcttttttggttccatatgaattttaggattgttttttctagttctgtgaaaactgatggtggtattttgatgggaattgcgttgaatttgtagattacttttggcagtatcatcattttcactttttttttttcttcgagacagagtctcgctctgtcgccaggctggattgcaatggcgtgatcttgcctgactgcaacctctgcctcctgggttcaagcaattctcctgcctcagcctcccaagtagctgggactacaggcgcacatcacgcccagctaatttttgtatttttagtagagacggggtttcaccatgttagccaggctggtctcgatctcttgacctcgtgaccctcccgcctcggcctcccaaagtactgagattacaggcgtgagccaccgcgcctggccttcgcaatattaattcttcctatccgtgagcatgggatgtgtttccttttgtttatgtcatctgtgatttctttcagcagtgttctgtagttttccttgtagaagtgtttcacctccttggttaggtatattcctaagtattttgttttactttttttgcagctattgtagaaggggttgagttcttgatttgattctcagcttggttgctgttggtgtatagaagagctactgatttgtttacattaattttgcatctggaaactgctgaattcttttatcagttctgggagctttctggaggagtctttagggttttctaggtaaacagtcttatcatcagcaaacaacaacagtttgacttcctctttactgatttggatgccctttatttctttctcttgtctgatttctcgggctaggacttccaatactttgttgaagagaagtggtaagagtgggcatctttgtcctattccagttctcagagggactgctttcaacttttccctattcattattatgttggctgtgggtttgtcatagatggcttttattacattgaggtatgtaatggacaggcattctaagccctttacaaatattaactcatttcattcttgtaataactctttgaagtcggtactattagaataaacttaaaagtatgagaaactgaggcatggagggctttttgcacaaggtcccacatcactctttcttgtctcgggtaaccctgtgattcacatagttgcagaccacatagtcacaccggaagtttttcaggaaacctttctagacatcttgttaaaaacttacaaaggggacaacttttgatgtgtaaaacaattaggaagcatgtccagagtctaagtgttctttaaaaaccaaaaaaaggccgggcacagtggctcatgcctgtaatcccagcactttgggaggccaagacgggtggatcacctgaggtcaggagtttgagaccagcctggccaacatggcaaacccctgtctctactaaaaatacaaaaattagtgggccatggtcgtgtgcgtctataatcccagctacttgggaggctgaggcaggagaaacacttgaacccgggggtcagaggttgcagtgagccgagatcgcaccacttcactccagcctgggcgaaagagcgaaactcagtctcaaaaaaaaaaaaaaaaagaacctccaaatagcagtttgcccattttctccttccaagttcacatatagaccttaataaaagttatagactccaacaactagtaaatatttttttccacttgtttcgttaaatttatttccattaaattgggagtaagatcaaaacagaataatgtttactgtcatcagtttaagaataaatgttgtgcttactccgcagaggcggatggatccactacttctccccccactgcaaaatttggttaagatgtggaaactgatgataccatatgtgcaccaggacggtacgaaaagggtttatgactcacttactgaggctttttggggagagcagggcaggcttcccatgcaggtacaagaatggcttgagaaagcaggaaaaggatactggctctccttttatggtgataagttgctgagtctggagtgaaggtccttatatgccccttcagccaggtcttggtttgaacttcccacctgttccaaaggatggctcacttgggctttcttattagcttgccctgaggaaaggggtacagcttgaaagctcttggcagtcaaatatcaaaaatgatgtcagactctttattacaaatatatttttaagtgcttgtcattgtttatgttatggggcaaaaatcttgcattgtactaaacaccatgtcactaatagtgtgaatagaagattcagcagactaatgtcaagaatgtttttggaaccttgaacacagggaatatcctgtgtgtcttttaaaaacacggaaaatacttaacatctctattttgtttgggttaacactgatgatgctgaaatgttgggtattgattgcctgggtcactatgggcaaagaagctttttttgtttttgtttagttttatgatattactgatttctgtgttttgtcatattctttttgtattttattaaacatgtttttaataaatgggcactcttattttcaaacttaataaataggactcattttactatgcatatcctgggttttaaattctgagctaagaaacaagagatagaagaaccaaatttgggtaaaattcagagtcttagatgccagaagccagggagacgctggaaaacaattattgagatgtgttataggttaactgatagttggaagacaacatgcctttcaggtttgtggtttactgcctttcattaattctgacacagtttttaatattttaatatctctgatattgggatatgccttacaattgttggcgagtcatagccagcatttttatttcttggggacacagaaaataatgtgtcttaccctcagtggtgtcttcaattacatgaactatgacaatttttacacctttataagtcttttaaaataaaaaattcatttatacttcagaaaaaatacctatgattagaccacgagttaggggagactttgcagtggtgattgccttggagttgccttgaaggaagagtgggagttggcccaacgggagtgggttggtggagaaggcattcagactgagagatagcatatacagcatattataaagagtgtgctgtgttggggaaagggctagaagtttgatgtggcaaaaatgtaggctctgggatgagatgagaatgataaactggctggaatggtaacctggagccagcctttgaaaggctctgtgtgccgtgcgagggagttgaggctgtcttggcatgttaggcagcattgtaaagcagctctccctccctgtttgcatcagcaaaggggtgggcagcattggcaccaataacagaagagtgaagacaatacatatgtcgaataagatctctagcacagagttctccaaaatggaaagggctgcaccctggaatcagatggaagggagaactttaccaagggggtgctatttccttctgctctgttgtgaatggagttggggttcagtggcctgttttagaagcctgtttgtgggcaagctgtgtgacaaagttgttgaaaaatgaggaatggctttcagagggcagtattaatccatttggatggaaatttaggagtggaacatgtgtttctaagctgtttttggctttttcctaagggctatatattcttaaattaaaggtgatttatcattcttagtttcctctaaaatataactttttgtagagggaggctttatcacaaaatttaagaaaaaataagtttgttattcttgctgtggttttatttttataagaaatttgggaatttgatccttcatagcagaaatttgttcagtttgggtctccaaacaagagacacagaaaatttgttcatcagagagccactgagatatatagagagttagaagatcagtcaggaaacattaatggaaccggaattatacaatagaggaagaaaactgcaaatatttctgttgtttcagcctaattttaacactcattaccatttgcagcccataagcgaattgttttgcatagagcctgcattgctaagccagtagaaggaactagtcttttaaaaacattttctaatttcattcccttttatttttgagacagggcctcactctgtcgtctaggccggagtgcagtggtgcgatctcagctcacagcagcctcaactatccaggctcaggcagtcttcccatctcagtctctcaaataactgggatttacagcatgagccaccatgcctggcaaatttttaaaaaatgttttgtagaaacaggggtctcactatgttgcccaggctggtctagaactcctaggctcaagtgatcctcctgcctcagcctcccgaagtgctgaatgaaccaccacaccaggtcttttatttcacgtttaaataaaaatgttagatagtagtatgttgacatagttcaaaagttaaaaaagaatacatgataaaaagtcttcctcctagtcccctgtccctttgctgaggaactcagtgttagtatcctgtgtatggttccagagatattttatggagatgtgagcaaatctataagtgatagcatctcatacacatggttctacagctgcttttttttttaacagaagttttactgtgatataattcacatactgtggaattcacccatttcagttgggattcagtggtttttcagtgtattcacagtgtgttgcagccgtcattacttatataatattagaacactttcatcaccccataaagaaaccttatatccattagggcttagtccctcttcccctagcaactactaatctactttctgtattagaaattttatatggatagaatcagataatatggggccttttctgtctggcatctttcacttagcataacattttcagttttcattcatgatgtagcatgtatcaatatttcatttctttttatagccataatattccattgtatgaatataccacattttgtttatctgttcataagatgagggacatgtttttctcttgtgtatatacttaggattgctattgctgagtcatcataactctgtgtttaaccatttgaggacctgccaaactgtttttcaaaaggctgtatcatttctattcccatcaacaatgtagagagttctaatttctctacatcctctccagctactggttagtgccatctttttgatatagccatcctagcgagtgtgaagtggtatctcattgtggttctaatatgcctttttgctaatgacttagtgatccttgagcaccattaagtgcttattggctatgtatgtctttggagaaatgatattcatgtacattacccatttttaaattgtttaatctttgcaatgttgatggtaagtgttctttatatatttgaatacaagtctcatatatgatttgcaaatattttctctcattctgtggatgtcttcttgctttcttggtagtttaaagcaaaaaattttaaattttgggtaagtccaatttacctattatttcttttgttactcatgcttttggtgtgttatctaagaaaccattgcctaatacaagatcacagagcttactcctatgtttttttctaagggttttatagttttagctcttacctttaagtctatgttttatttgagttaatttttgtatatgatgtgctttacattttgtacttttcatttaataatatcttgggagatcattctattccagcactaaagaacttcctcagtttttcttatgatactatagtattctcttatgttgatatatcatagctactttaaacagtctctcattgatggagatttacacaaacatttgggtttggaaattatctcaaaatgacattgtggcttgaaagttgtttcatatcacccttctcaaaaatacaatttcatccatttcacagatttggttgttccaggcaactcatgctattcagaagccctggaataaatcccagtcctttgggtagaatgaccccaaggaattcaagatatttcattccattaaatgtttacagtaagtcaggaagcaaaagtttctttcaattatctgaaaatatatggaaaaatacttttggagggacaaggtgctctaaaattttgttgtaccatctaagctacagtcagtttcagatgacttaatggcatgtgttcttttactcttttgttgaattgttgtctgtgtgtataaatcaaagtgagtagtaatctaaacttcaggcaatacaggcagccaactcagtaagatataaaatatccagagattatgaaacatataggtttctttgttaaagaggaggcttaggggaaaatcttgaaatacatcaacactttcctaatctgcagaggcatatttggccactggaaagtaaacaaaaaaaggctaataggaagctaagattagtatggcaaaacccattccttcaacttcttgatctttacctgtaacacagttcttcactaagagactattcttattttatacactgatcaagtcagtgtgatatcacaaaaaaagaacttcagaattgtttaaattctgtttctgttctctatgatctggataccttcaataagttactttccttttttgggctagagtattttcatctataaaatgaacgtgaactagatgagttttcaagcctatagtagaacaattaattagaggtgaaatagaggctactactggaggcaagctgcaatcagcagtggccacagctggcctgatctgcatggagtagacagtaagaatgttaaaagcatttacaaaagttcaaaaataatcatggctggagacatctggctaggagcaaatagtccgacatacctgagtggccccagagggcacactaagttacattatgttcctaatgtccacacaagttctgagctaccaaataaaggttaaatggaatactgtagttctttcttttgcagttttattttgatataatttctcatttacagaaagtttcagatagaacacaaagaataccatctatccttcacccaggtttttcttttcttttctttttccttttcttttcttttcttttcttttttgagacggagttttgctctcgttgcccaggctggagtgcaatgccgcgatctcagctcattgcaacctccgcctccagggttcaagcaattctcctgtctcagcctcccaagtagctgggattacaggtgcatgctaccaacgcccagctaatttttgtatttttagtagagacagggtttcatcatattggttaggctggtctctaactcctgacctcaggtaatccgcctgcctcagcctcccaaaatgctgggattaaaggcgtgagccaccgtgcctggcccacccaggtttttcagatgttaacattttattacatttgcttaaatctttctctccccttcctccccctcccaccttgtatatgtgtttctgtaccacatggaagcagtaaaaatgccgttcctttatttataaataatttaacatgtatttcctgaagactaaggacatcatgttatataaccacagtgtaattatcaaaattaggaaatgaatattgaaacagtaacagtactgttatctaatatatagagtttatttggatgatgcccgttgatccaataatgtccattagagcagaagaaaatccagaatcatgtgattcacttagccatcatgtctctttcatcacctttagtctgcagcatttcctgagtcattttctttaaagttttacattaatatttttaatgtatattatataagccagttacatagtagattgcccctcattcaagtgtgtctgatgatttaggctatccatatttggcaggaacaccacggaagtaatgttctgttcttctcagtacctgatctaaggagaaaggtgctgcttatttgttccactgctggtgatgttgactttgatccttggttaaggtgttgtctgccatgtttctccactctaaagtaactatttttttcccctttgtaattaataactatcttatgggtaattctttgaaactaggcaactatcatgtttctccttaaactttcactcaccatattatctttttatgaagacagaaggaaaataatacattttagtaagagtcccatcaaaatggttgtgatgtttaaaaaaataacttcaaggaacatggagtagtcatttgacagatataatcatgtagaattacttactatcagaaattaaatgtatgcgccgggcgcggtggctcacgtctgtaatcccagcactttgggaggctgaggtgggcggatcacttgaggtcaggagttcgagaccatcctggccaacatggtgaaaccccatctctactaaagatacaaaaaattagccgggcgtggtggctcgcgcctgtaatcccagctactcaggaggctgaggcaggagaatcgcttgaacctaggaggcagaggttgcagtgagccgagatggcaccattgcactccagcctgggcgacaggacgagactccatctcaaaaaaaaaaaaaaaagaaaagaaattaaatgtatgcaatacttagtttttaaaaatatccctcacatatctaaagtcaatttgcaggtttatacatgtaaaaataatttcatttgttagtagtattgtttttgaaagatttagagatgagtcactcatggaaatttttctatttttccagtattggaggcagaatgaaactaacaaaaatcctttggggaaaaaattattccaataaattttccagtaattattccaaatgtctcttcttttcctcccttttttgtgtatctttacaactcaaccaaaaagtccactgttactatatcaagcctgcttaagaatcctccgtgatgcccacttcctacaggatcaagttccagctcatctgaattcagactaccttttcatcttaaaacttttcctctattccagccaaattcatcttcataattcatctttaaacatcatctcatgtttttctgtctctgcaaaatgccctttcaatctattttgagtcttctcagtataccagataaaattcaagtgcatctttcataaaatattccctgacctcttcatttttcaaattttgactttaattagctacatatagtctatttgctacttcagggggatggtttagtaggaacttaccttagggaagataaggtggcataaataacaataagatacagaccaggcagtgctgactccctgcttggagggccattttcccatgccctgcactgtgccataccctgcacactgtaggacacaaagtttgttgtacacattcttgtgtatatttccatgtacagtatctaatgagactcatcccactcagaacttaggacttattatatattcaataaatgaattgttcagttgatactgtcttttaaaaattctgataaagccagcatctcaataggaagcaggggcagatgtttccattcctccctcatattttactttctgttcaagggtgagtgtttacactttgaactctttctggcagtgatgaatcagtgctgattaatcaatactcttttgccagatttttctaggagccagagagagcttgactggggtcaggcatccatttaagggcaggttggtttccttattttaggaaaaaaaatagtgcttatatgtttcattaatcataacttcactttacaggaatccaaaaaatttagtgttatctgttcactccttttgaagtgttctttgagagctctctgaccaccaggaagtgtagtaggtgctaggcacactgaagccaagtaaggtgtagttccatggctcaaggagttgtgagtctaacaggggagctgaagttaattgcaagggagattgtgcttttcactgaaaggtgtgtcttcggtagactacagccatagagtcgtgtgagaattactgaagagtgtggcagaagaaaaggtggtaagatcagggagggctttaccaaagtcacgttcaggtggagtcttgaaattctgtaagctttcagaggtgggccttgttccaagctgtgtgagtatagccctgaggtaagctggctgcgtggcatgttgaaggaagtgagagcaagctgataccagctcgccaccaacagcctttgccaaatgtaaagcaggaaaaggagggttactttgaaaagcctagtgtgccatgctgagaatgatggactttatgaagcaatggaggagcttttaaatgtgttttcaataagaaattgtcatggacaaatcagcattgaattcagatctcattaaaaacgtgtccaaaggataactcgacagtaaacatatctcgaaagtacccatggctgtaaaaaaggcgaagtatttctttctccatttaatttaccctcccctgggtgattggtttgtggttaggccgtttgtccagctgcagcagactggttttacaccctgaagtaaacttgaatttctttttttttttttgagacggagtctcgctctgtcacccaggctggatggagtgcagcggtgcgatctcggctcactgcaacctccgcctcccaggtttaagcgattctcctacctcagtctcccaggtagctgggattacaggtgcccgccatcacgccgggctaattttcgtatttttagtagagatgggatttcaccatgttggccaggttggtctcgaactcctgacctcaggtgatccacctgcctcagcttcccaaagtgttgggattacaggtgtgagccactgcgcctggcctttgaatttcttaaaaccaagcagaacagtgattttcaagctctcttcattagattctagcagctggagtttatttatttatttatttgagacagtctcactctgttgcccaggctggagtgcagtggcgtgatctccgttcgctgcaacctctgcctcctgggctcaagcaatcctccccgctcagcctcccaagtagctgagattacaggtgtgcgccatgaggctcagctaattttttttatttttggtagagatggggtttcaccatgttgcccaggctggtcttgaactcctgagctcaagcgatccacccacctcagcctcccaaagtgctgggattataggcgtgagccactgcacctggcacagctgcattttagagcttccaaatgcttagtgcgtatttcatttgtttccaaagtacattttaaaccattaaaatcacaataaaaaatagcacacacacttgtgggtggttatatgaataattcgtggactttggacaccaatgtcctgttaactcaggctgccagtgcagtcttcagaataaagtagatttttgtaatttctctgccgacatgtaaacttatacaagtgtgttattgattaagaagctgagtagagcactgccctggtattttgaaaagttcaggttcatgcatgtgcactaataatgtattttacaagtgaacatacctatacctacagtcaatcaaatgccaggcaaggtgtggctcgtctgcttcaggcatggtcttattgtataatagcatcgtaagtgaagtcccaacatctcatttgtatgctgggtagtaattacatgtttcaaatcacctgggggccttttaaaaatcctgatacccaggccataccccttaccaattaaatcagaattcctggaggtaggggtgggacccaggcattagtattcttttaagagttagactgtttagagcagttatggtttacagcaaaatagagcagaaggtacagatttcccatctgtctcctccatggcctctcctattattggtatcccccaccagagtgatacattgttacagttggtgaacctacagtaacacatcattatcacccaaagaccattatatttacgttagggttccttctttctgttgtacgttgtatgggtttcaacagatgtacaatgacatatatctattattataatatcatatagagtaatttagtatttttcagtagtttcagtaggcatcagtatttttaaatttttaaaaattttttgctgtattttggaggagaggaatatattcttattgccatcgaccgtaggcgtattctttccaatctcttgttctgtccttctagtaataattgtattggcttttctggtttcagttaaattttggttcacatatcttcaaacatactataaacctgataagatttgagagcccagaaagataagtttaaggtacagtggtctttttcctgaagagcaattttaatatgccatttcagcacctgggaagtgtaaaatatgtgagagtgttattttcttatctatcagatatgcctccagagctttcaacatgttctttatgttaagcattttagtcccctgtactctagcagaagtaaaatctgatttttcctaccaaaagttccttattttcatctgcttgctaagaaccaagaaatgtttggatgctttatgcagatgatacaattcaaactaactgcaactggggcatttgtgttgcctgcttcatgttttgagcctttagtatttaatggaagccctgcgctgtggaaagtctcctaatagcactttgtgcatcccaggggccagccacggtgcttctgcagccgcactgtagatgtttgtttatttgtctccactaggctgtccagtacatttagaggctgagtctcagtgtgtgtttgaaagaatgaatggttgattgaagaaaggagaccatttgcaggagagagagagagatgaacagtacatatatagaggagggcaagaagaaatcccagggctttagagtcaagtgattagttcagtgactggcctgattcaggaccctttgagcatttctcatttgagaaacagaaagatctttgttggtacaaaaaaggttaaggatagatatgtggccagctggacatcgatcatgagcggaaggaattgactccgagagggatttggtaatcttgtgtgttagtaaaagtacatggattttttttttttacagtctcactctgtcacacaggctggagtgtagtggcacaatcacagttcactgcagcctcaacctcccaggcccaggcagtcctcctatctcagccccctgagtagctgagatcacaggtttgagccactatgcccagctaatatttttttgtcaagacgagggctggtcttgaaactccagggctcaagccatcctcctgcctcagcctcccaaaatgctgggattacaggcatgagccaccttgtctggccagatttttttttttttttttttttttttggtaatcaaatatttcaaaaggtgagtctcctttggggtgattctctcacacagaaagatgattcttggaggaaacatatctaagcatcctccaaggtagtgtcagcattcaaagttgatcctgaattatctctgcagacactttttgtgttgggcattatgctgaagccatttgttgtagagcaagttgatttttatggctgagcttatctgaatttagtttgatatattgtattctttatttattcattcattgattcactgattcattcatttttcctgacattcaaacaaatgtttcttgaacacattgtgaaagggccaggcatttgtcaggtaatgagggtataatggtaaacaaggtagacacagccctttgccctcttgggggtgcagacagccggtcatttaagtggggtgtgaggagagcatttacaaggaaaggacaggatgtcggggagcacagggtggggagtgtggggcagacgctaggaggaagtcccttgagattaaggcctgaagcataactttagacaaagagtgcagaagagtgtgttcctgactaatgaaaagcttagtttattaatacttagggcttgttgaatggaggatacttttgcagccttcccctactttgtgccatccagccaagagaggtccacaatagcagccctgattcgcgggaggaaagagcccacttcagctgcagggtggccctgttcccaggagagatttgagtctgaccccacagtggcagcaaggcagctctgtgcctgtgttatctccaccagcacacgtcattgagtcagctttactttatccagcctgattgtagaagtcatagtagacactgtgagggaatcgtgtggaattttcactggagcattctgaaacttaaaaagtaaatcttttattgctttactaatgtcttcctgtgtctgtctttttaaaaatttttattgtaaaaagtaaaatatataccaaagagtgtatgtgtgtacagtttacactatcagtattaaaatgggcacccatgtactcatgaccagcctaggaaataaaacattaccaatagtgtgtacctttcacatcctgcctcctccaccctgtcccagttgtaactactaccctgaatttgtatttagtgttctcttttgttcctctcttctagtatgttttaaaaggtcatatttatgcttattaggagatattacagtatcagactcttgctgtgtaccaacaaagaacaagagataggtcagaacgctgtttaaataaattgcttgattgtactcttttaagcaggagtttatagtggtaacatcaaagtgcttaaaaaaattcaaaacaaaagcctttttcagtttcaaggaaaaccttaacaaggtgtgttaaaaagataaggtttttagaggttgggtgaggtggctcacacctttagtcccagcactttgggaggccaaggcaggtggatcacttgaggtcaggagttcaagaccagcctgaccaacatggtaaaaccctgtctctacttaaaaaaaatagaaaaattatctaggcatggtggcacgcccctgtggtcccagctattcaggaggctgaggccagagaatcacttgaacccagaaggtggaggttgcagtgagttgagatcgctccactgcactccagcctgggcaacagagcaagattcttgtctcaaaaaaaaaaaaaaaagataaggtttttacaaaccagtatgctataaatggacccagtagtaacatgacattgaattgcttcaaccagtaacagcttcaagatccctgcctatgttccctgctgtgaacgtgtttatttgttcctaataatactgccacagtgtatttcaaattattttatggtatgagagtttgaatttacttggagtaagatcatctcggcatgtagttgggagacattatttactctattgtttcagtaattcagaatattgaaataggtcagtcatgtcaggaaatagactcttaggtgaaccattcttgaatttgcctttttctttgtgattgtgatggatattgttttgttttctatctttgcttttttttttctttctgaaatgttctggttgtccatccaaattgtaagaatattacattttgaatatcctttgattattgtaaaaatgacccctagtcagatgattccacagactttttgattacttgtcaaatgactttgcgggcttttttcatttgaattgatttcctattttaagggtcagtgtcacttcattgctaaatgatacctttgagcaacatggtacattttagaaaccttattctccagagtactctaagagaagggttgtttggattttatttgtttatattcttgccctttaaactctagcataactcagcaggattcggtactccttatagaaccgttccccagagagaaagtaagctcagctctcatttccatgttgaagtttgtatgcaagtttacatggagctcagaatccaaagttggcaggatatgaaaatgtttgtatatcatttaatctattttatttcatttcatttctgtgtttttattcccaaagcaattggttttattcaggaatcaacagacttttttaaatccatctataagtttttgaaccaaagctttactacatttcacagccatttttgccactatgccataattataaatccttggcctcaaagaaacctatttaatatcttattcagattgagattctagtcttcagtgacatggaatgtagattagaacaatagtttctgtatatctcaatggtctttacatttgcatttttagccattttaactagcccctaaaaactctcttttatgactctgtggatgagctatctgaattcaacaataattttactatgtattcccataatactcctagtcatttaaaaaaaggcaggggaatggacaaagcaaatcattcccaattgtttaagaaaccagtgaactcatcccttgcttggactgcatagaatacagcctgagagggaaacctgtgatttagtttctctctttacccacacaggagaacacttctgacaagatgccattcgtgctcaccgtagttggtcagaaactgcggctctgtgcttggcaaaagttaatttggattttagatgctgtgtgcaaggaaaccatgtgcagttttaagcaaggatcttcactgaaatttctcgctgcaatcaactacgcagagtgcccagctctcagcatttgacacagttggccactcttcccttgtctctcatggcatcgtgatttcctgggatacctttggtctctttgtccatagcattctctatctggggtacactcacaataggcagaggaaaaacatggtaaccagggtggctgctgcaacatatttgagggggtcagggtaggcaatgaggtccgagaggtagccaggagttagctcatgtaggactttgtaggccacttgaggactggcctgatctggctgatgggaaacccatagaggattttgagtagaagagtgatatgatccaacctgaattttaatgagatctctttggcctctctgtggactagttgctgtgaagtggggaaggctgaaggaggcagacaccaattaggaagctatcaatacttaatccaggtgaaagatgacagtggcttggaccaagatggtgacaccaaatgaggcagagagagatcaatttctagataggtttcttttgttttgttttgttttgttttttgagacagagtctcgctctgtcaccccgcccagagtgtagtggtgtgatctcagctcactgcaagctccgcctcccgggttcacgccattctcctgcctcagccttccgattagctggtactacaggcgcccgccaccacaccagctaattcttttgtatttttagtagagacggggtttcaccatgttagccaggatggtcttgatctcctgacctcggtgttccgcccactttggcctcccaaagtgctgggattacaaacgtgagccaccgcacccggcccctctagataggtttctaagtagagatgacatgtgtagctgacagcttggaggaaagttgtgcaaaagagaggagtcacaaaacagtccagggttttggtctcagccactagaaaactggtgttaccatttactgatttggagaagaccatggaaaggaagtttggggggtgggaatcaggagtttaatttggacatattaaatttgagatgatgccaattacatccaagcaaagttgaataggctgtgtgtgtgtgtgtgtgtgtgtgtgtgtgtgtgtgtgtgtgtgtgtacaggtgtcatcagcatttgaaactgagtgaggtcaccaagagaaggaatgttaaatagatacgcagtcagagaaatgatctgggctcttaatcatatagaggtcaggagaaccagggaaggagcagtcaatgagataagagaatcaagagggagaggcattccaaaagccaaactgttaaaaaacaaaaaaaaaggttttagcagggagtaactttcaaaggttttagatagggcaataagacaagatttgagaattaaccatggaggtcattgcattccttaacaaaaacagtttctatggagtaacggagatgaaagcctaaattggatttatccaagagaacagaagaggagagaaattggacacagtgtgtacagacagttctttcaagattgataaaataaaggaggacaaaggggccagagctgcagggagatgcagggtcaaggttttttttctctaaacctgggatataaatataaatatgtatgtttatattgctgctggtggtaattcagtagtgagtgaaaaattcagaagagggagaattgctggatcaataaatgtccttaggtaggcaagagatgagatgcaatgtgcagtggagaggttcatcctggagagggatgcagacagacactttctacataggagtgcagggaaagcagaatgggcacagatgcagggaggtgggtagctatggtgtctggacatagggaggttctcttctcattgcttctgttttctcggtgaaataagcagctcagtcattagctgggagtgagaaaccagaggaagtggaaatttgaggttagagaggaaggtttaaactagtcctctagggaaatggaaagcagatggattagggcaatgtgggtggattgctagacagcattaagagtccctttaaggttagtgaccatacatttaaggcgaaaatagtcagtgggattgtgtgcttttgtccagctgtggtcagccaccctggtggagatgcatagtggatagagaattgaatttaaccaggatagaggttccaggtgaaggccctgaagggagaggcaagagagctgattgtgtatgcaagggggtgagtataatggtggcctatggggtttagtctgagtaaggcaaatgaagacatgctgggattttagtttctgatgcagcttagggatcagtgaactcagggttttggaggatattggaaagctaagaggtggtcaattagggagtagagaagcctgaaactacgattctggagtgggtgcaggtactgatgattgggtctagagctagtgattctcaactggggggatttcacctctgaggaggcatttgcaatgtctggagacatttttggttgtcacaactggaggcagaggagatactgctgtcatctagtagaggccaggggtgctgctcaacatcctacaaggtatagcacagtttcccacaacaaaggattgtctgtggcagttgtcagtagtgctgaggttgagaagccctggtttagggtataaaagaaaaacttcagctgaattaaatttaaaggagtttaactgaacaaagaatgaactgcgaattgggcagccttctgagccaaggtaggctcagagacgccagcgcagccacgtggcggaagaagatttatggacagaaaaaggaaagtgatgtacagaaaacgggagtgaggtacagaaacagctgcattgattatagctcagcatttgccttacttgaacacaatttgaacagttggctacatttgattggccaaaactcggtgcttggcccaaggtgattggctacggcctgtttacacctacacttgttatagttcacagtgtacagaaaaacccttaggctgaacttaaaatatgtaaggaggcagctttaggctaaacttgattgaacaggtatgaccatagaaatgagtggctggggtaggcctgatcttacccagattattggagaagataaacagactagggttttagaaggtttatcttacaactgatgaaatctccaaaaatgatgacaagagtagtattagagaaaagtgtagatagccagggatgggaggaagttaatttctcagtgtgtggcatcattttctttttcttgagctagctgatgggctagctttggatttcataatcctggctaagagctacacgttcagattagccaaagagtgttgtgtgttttttaaaaagccacctgtttattacctaactttggtataatgaaatctgtgtcttaaatagatgcctaaaagccatttgggaatttggttagtctttttgctcaaaattctgtgactgtaaacttggacacttggtctaattccatctttaaataatgtctcgggatgacaagtcttgcagctaggcctcgaggaagggatctggtttaagaaaatccttgaagaaggctgggtgcggtggctcacgcctgtaatcccagcactttgggggggccggggctggtgaatcacctgaggtcaggagttcgagaccagcctgggcaacatggtgaaaccccgtctctactaaaaatacaaaaattagctgggcgtcgtggtgggtgtctgtaatcccagctactcgggaggctgaggcaggagaattgcttgaacccaggaggcggaggttgcaacactgcactccagcctgagtgacaagattgagactcggtctcaaaaaaaaaaaaaagaaagaaagaaaagaaaatccttgagaaactttatttatagacttttagagactgtggctttccagtactcatcaccatggagaaaactagtcaaaatcacacagagtgaataagggttgcaagccagtgctgcttcctggaataagctggtccactagtctagtcttgtgctttgtccttcattttgaactcaagtgccctggggctgcttttctgcgtacccacaatagcaaggaactcttttgtttgcatctcctctgaaagaaatgcttgttttgaggtttggaccgcaaataataatctattgttccctgtaataataatccaccctctttcgcagaaaaaaaaatctgcttgatgcagtatggctatcagtttatttaaaagaatagccaaaagtgcccattatgtcctgagaataaacatttgcaagatggttgggaggaatgggggagtactcttgttctccttggctgagagtcagttaagtcttcaaggagaaaaaattctgaaaatgaccatcagtcctggctgacaatactcttccttattctgcccgtctgttacattctaagaattattgcaacactgcagatatttattccaaacgatttctttaaaaaatatggaagatgggtatttttaagttaccaattttgggccaaataagttttttttttctgactttcattttgtctgtgaaagcatttcttttatagcagtatgttcaaattagcaatctttaagaatttggcaaatacttttaacagcaatccttaacaattcctgcagttgcctactattgcagatcttgaaaaaagagccatttttatattctaagtggtagacacatttcaattactatttcctgggcttaggctaactgacaaaacttgatgggtgaaatgaaaatgtgatatacggtgtaatcagctgtttacttacctagcacagtgaaatcttatggtaggtatgattgcactaacaaaaccaaaacatgcatttttcttccttaagttctttataagaaaaggatcagttaaataataaatgtggctttaaaatgaagttatatcttaggatagttttaattgcattacatatggatgatgagaaaagttcagtgtgataacaattgcgtaacagataagcatgagaactacttaaagaaataaaaatatgcccatcacctcattaaaaatagaccatcagggaagccaccaagaagtccttcagtaggtgaatgaataaactgtggtacatccatacaatttgtatattattcagcaataaaaagaaatgagatattatgccacaaaaagacacggaagaaagttaagtgcatattactaagtgaaagaaggcaaccttaaaaggctacatgctgtataattttaactagataacattctagaaaaggcaaacctatagagacagtataaggtcagtgtttgccaggggtgtggggggaaggacggcaggaataaattggtgtagcacaggggatgcttagggagtgaaactattctgtatgatactgtaatggtggagacgtcactattcacctttgtcaaaatccataagatctacaacactaacacaaatcctaatgtaaactatggactgtggttaacaatgatgtaaccatattggctcatcaattaaaacaaacgtataacactaatgccagatgttaataataggagaaacaggttggccatgggagagtgagggaatatgagaattctaccttctattcaatgtttctgtaaacctgaaactgctctttaaaaagtctattagtttaaaaaaaaaattcaatataaccagactaataaaaatatcttaactaaaaagcaatacaaacctaaactgtcagcaattattctgtttatagtgctattctgattgaacttagctgtagaatattctgccagaaatatgtaatggcagtgaattactgtatatatctagtaactttgctgtatcttttcttgtctggcaaaaatgcacagtggtattcatgttaagtcctactttcaactacccttattcctttctcttcagtgacagctggagtatcagccttggaagtatatacgccaaaagaaatcttcgtggcaaatggtacacaagggaagctgacctgcaagttcaagtctactagtacgactggcgggttgacctcagtctcctggagcttccagccagagggggccgacactactgtgtcggtaagaatgcttgacttctcttggctagtcctgcctcacaggtttctttactgctgtataattggtgatccatttttctgatggttcatttccaaaatgagtgtattttttatctgttatagacttcaaggcccttcttttgcttcaggataaaataagttcagcatctcttaaatgcgtctggtttccttgtctttgatcagttcctctccaccatcaaatcccattctgaaattgatcttaattgaccacactgactctaatcaggatttatcctgcatcttttcatcttttattgccccatatttattgatatttgttttatgtattatcaaattttatatatatatgtatgcatcttctgatttgattatctttttttaatttagcgtatagtccatctgatttagcaatattgatttgggagcttactatgtagtgggttatgtagggccttcaaaaatgtctaaaacagaatccttgctctcacctagagatgattaggaggaaggctgatatatagatgactttggagtaagataaaggatgtaacagaaatacagcaccagagcattgaaaaaaggttatttagtaactagtggagtgctggttattaaacatgaactgactatcttggttctggtctgtaaaatggagacgataaaacctcccacacaagggtgttaggaggataaagtaagattattcaagataagtgctcaggagagtgtctagctcttgagttactaaaatacaccatttgttgttactgttgctctcccagcatgtggaatgcccttcatatattggcacatattttagtactgttgcatgtttcaggttgtcagtgtttagcaaggacagtctgtcatctatctttaagaatgcccaattcttcttctgaatggtgagttacattgttgatcaccacctagatgttgggcccatcatatgcctatgccatttaatcttcacagctctatgaggaagacagggtggggaggatgggagacactgactcaagagttattcacctgtggccataccacacaggttagaattgtttaaacttcaatacggtatgatttcccttatgtattatttctctctcaggtagaaaaatctgctaataatatttacggcctcataggttttagggattacctaaggcagtgcttctcagtattttttaaaatttatttttaaaaggagccttttcacatttttcttaatctctgcccccttccatgaaattttaatattgtagatatcctctgcaactgttttacatataaaagagaaagattttctcaaagcttcccacccaagagccagtgtttgctcccttgggggagaatctcccctatggagaatgcatagtctagaggtctttataagagaggccttcccttacagtagccataagggtgagcacaggaatccatacagataccatggaaagacataaagaggcattctctgcttcacgtaaatatggcatcagcatagaacatacactaatgttcccatagaggcaagattaaacacataagtttactcaagagagtccaaagaactatttaaacatttaaagatttcccactgaagtcttctgcaagagtgggtgtgagagccacccagaggtaataactttcttttaaagagcggttccatttatgctggaaacagtcttgtcgtgtaggtccatgaaggtttacataactcaaaacttaatattaagaacatgctgtaattctgattaatatttttagctaatcaatttatacttacacacgagtctgattgcagttaatcccagcatgttcagttattgacataggatcctttaattccaaaatgtcgggacacatttaataagatgagtgggttgcttttttgtttttataggttttacaggaaaagtatattcaaacccagtatattcaaaagccatactgtggatggcttttttggcccatggccttgggatccacatgtctgaaactgaactcattttttctcccttctgtttcccttttctgctttttttttttttttttttttttaggttaattgtgttcatctgcagatgagttttgtaatcattttgttttgttttgttttgttttgttttgttttgttttgtgttttctgtcctttccttccctgtcccttaccacttcccttctgcccccaagaaataagaacctttgctggttcttcctactttgtttctggtgtctagctttttgtcagccttcctgtgtctctgctgtctattgagcaatgttaactgtgtgcctggtcttgtgcagtagccccttgttattcttctgcttctgtttttctcatctttcaatccaaccctcatatgccagcaggtgcatagtcttagaacagctctttcaccttgccactgcaggttatcaggaacctagattcccattgtggacaacatttgtctagaattaaaagctcattacaatttggcccagcctaccactttagcctcacttctgttctcttatggcatcacttccagtttagtaaaaatgctttgtgctttgttttcctacttctgaacacttgtcatttaagctgtaccccatttttaccctctgtctcctccataatgcctctttttttttttttaaccttttagcccttaaaactcactacccttatctgggccattcctataatacagatcccttaatatgacagttttcctcttcttcctgaatatgggtgttttaagaggacttgcctgtcttacatctttagtatacctcatagctttagcaccatggcttgtactttaaaaatattgattgataatgattctagtcttttctgtgaatttttcactgttttatttccatctctcactggtttgaccaagacgttattcctcagtttgattcagcaaactatgtagttcctgctgtgtccaaagtgctaaggagtacagagataaatacatcttatcctctgccttcaaatggcccccattcaatgagggagcctgactgagggagctgtctcagacccagtgctgagaaacagcatcatgtagctcatccccgctggttcagaaatgcaaggcagggaatatgtggagatgttgtgggaagggaaggcagagagcaggtgatggaaggattcatttgcaaagctgagagtttatggttcattttctagtgaagaagagagagtgaagaactttgaacagataagacatgatctcacctgagaggccttaaacattggaaatagcataagctttgaaatcagagctgagtttgaattccatctctaaaacctgtgactttgggaaagtcaccaaggtttcctgagcctcacattccctatttatgaaatatcaggtaggcgaatctcaccttgcagggtggttgtgagggctagagagttgttgggagacagttttctatgggtctttcacgtttttgcacaccttgctagcaaaggcactggctgcctttgttctggactttttttatacagtaactagctttggaaggcagagatgatgttaccctctggagcaaaggacaaatttgtgtattcttgagtatagtaaaggtagtgtctcctttcagggctgaagtcagacatgtcttctgccccttgtaagagaatagtgttccctgagcttggggttcctcggctgtgatgcaacgcctctgcctgcacaacatccatgtgagcccctccatgtcatggctatgggacttgcggggcaagagaaacaaacacatgctttctgctcataaggttctttgtttctgagtcttcttcatgggagtgaagatttcacaggagtccgtgtcttctgtcagcacctatgaacctgtggccaactaactttgttagcttgtaagtagggtaaaatctcagacccttcacggttcttaacaagcatttaggtcatatgaaatgcagggtaaatatttgataaatgttataataataaccattattctttatcagtgatcatttaggcattgtggaagatgatgagttagacataccagttaagaggccatagtccaagatgatgaaaacataaaaacagatattgtcagtgggaaccgaatagagagaagagagaactgagagaaactaatgagacattgacaatattgggggattaactggataggaagaaagagaatcaaggatgacttcaagatttatggttttggaaagaaacagtagccatcagtgaagacacgatacatgaagaggggaagatgaagtttgtaagagagggtgacaagcttgggggagaggggcagccaggtggtaaagtgagtaggcaaggagtctagagcttaggggacgctattgatggagagagaggtttgggagttaagaaaatctagatgatcattaaatcataggaatggatgagtctgcactggggttttcaccgtgctcaaagggttctgaaaatgttctgtttgaattgctaatagagctggtttctatccccagctccaccatcaccccgtccattaaccagaacaaagacatcaggcctccagcatagctgcttggattagagccaagtgtgaggatagatcccctcccactgggccttaaccctgcttccaggtgctgagtttgacaaggtttactttgagaagacagttcctttgctgaaagcaggactgaggagagactgaggagtggaaagagaaaggggctaaaggctgaactttcaaaagccggcaagagtatcttgtgttatctgggctttgttcctttcacacacccatgacttttccataggaaaccagaaggaagagggcgaaactcagattagctgatctgagatatttaggattcttctcctttgtgcttctgtgtatcttagtggtaagctaactcaacactaagctttctgaagccttgggaatcactgggctcaatcatggtgttactggaagaacattggctttgaagactcagatgggcctaaattttactctgggtccccaatttactatcattggtaccttgggaaaatggcttctcttaagtctccattttgtcttttataaaattatgggtggtaataattatatcaatgaaatattgagaggattagaggtgatatatgagtctgattcttccattgaaacctggcagggttgagtgccgtgatctctaaacttctgtctggcttagattccataacttgtgatttgtaatatgatgttgcatttctttttttttttttttttaattgatcattcttgggtgtttctcggagagggggatgtggcagggtcataggataatagtggagagaaggtcaacacgtgaacaaaggtctctggttttcctaggcagaggtccctgcggccttccgcagtgtttgtgtccctgggtacttgagattagggagtggtgatgactcttaacgagtatgctgccttcaagcatctgtttaacaaagcacatcttgcaccgcccttaatccatttcaccctgagttgacacagcacatgtttcagagagcatggggttgggggtaaggtttatagattaacagcatcccaaggcagaagaatttttcttagtacagaacaaaatggagtctcctatgtctacttctttctacacagacacagtaacaatctgatctctctttcttttccccacatttcccccttttctttttgacaaaaccgccatcgtcatcatggcccgttctcaatggtcgctgtctcttcggagctgttgggtacacgtgcagaaaggctgtcacttcacacttggaagattgcacagcggccaggcagaggcgctcctcacttcccagacggggtggtggccgggcagaggcgctcctcacttcccagacagggtggccgggcagaggggctcctcacatcccagaggatgggcggccaggcagagacgctcctcacttcctagatggggtggcagctgggcagaggctgtaatcttagtactttgggagaccaaggcaggtggctgggaggtggaggttgcagcgagccgagatcacaccactgcactccagcctgggcagcattgagcattgagtgagcaagactccatctgcaaacccagcaccttgggaggctgaggcaggcagaacactccaggtcaggagctggaggccagcccggtcaacacggcaaaacccctctccaccaaaaatacaaaaaccagtcaggcgtggccgcacgtgcctgcaatcccaggcagtcggcagcccgaggcaggagaatcacaggagcccgaggcagggaggttgcagcgagccaagatcacggcagtacagtccagcctcagcaacagagggagaccgaaaaaaggaggagagagagggggagagggagagggagagagatgttgcatttctttccgtatgaagtctttaaaagaacctttcatagcatgcacattacagagtttaggaattctgcctttgagaatagttcatgtgttccttttttctaattgcagtttttccactactcccaagggcaagtgtaccttgggaattatccaccatttaaagacagaatcagctgggctggagaccttgacaagaaagatgcatcaatcaacatagaaaatatgcagtttatacacaatggcacctatatctgtgatgtcaaaaaccctcctgacatcgttgtccagcctggacacattaggctctatgtcgtagaaaaaggtacttccttgagtattttggcagtaataatgcagtctcctttatctcatgtttggttggaaaacatgagttgcatttcatggtgggtttggagggaggatttttgccatacagttgtgctccctgttgccacgaacctgtggctctaccaaacacacttggagctgggaaacttgttgctcattctgacccagagtggctgatttctccatttttattcctaccgtctggtgcctattggtctaatttcaggagtatgaatttttcagtgttaattagaagaaagaccaaattcattatgtttggatgtgatgggcagtgggaaagaaggagattcatactgttttatattctccaggagaaagctttcaacaacagcacagttatttcttccttttgattttgagaacaaacaggaaatgcaggttctggtgtctcatttttgagacaaagtctgttttgttggagagtagatccaggtaaattcacacctccggtttttctttagagcactgagagggattgtaggtgtagaaatgcttagttccatagttcattctttctcatctaatattcacatgtcatgaattacatagtaataggatagatagtaggatctcatagtttggataataaaagagggtacggtaactgctaaatgaagatacttgctcgttaatttaataaaattccatgttttctctctgtagcaatgtaccttaaaactattttgttctttctctctagagaatttgcctgtgtttccagtttgggtagtggtgggcatagttactgctgtggtcctaggtctcactctgctcatcagcatgattctggctgtcctctatagaaggaaaaactctaaacgggattacactgggtaagaaacactgtttttttagggcaggggtggagggagggaatcagggtttatagaaacttctgtatttaatgaaaaaaggattttaaagaattaactactattttctttcatgtcagaatcaggcagtctccttaggaggtgttctaacatgggcaagtggaaatcagtgggcctgctattaaatgtggaatatgattctaatctctgttccagtttccttcttaggtttggtgagatgagctgctcagcagtctgtgctctgtgtttcaataccatccactatgcaattagtattcttaagacatcacttacccaatttaagagtttaatttcaatttcttgctaataaactcacaaggtggttctttccagttaggaaatataaaaccctaattaagaagttgtgagctggaattagtggcatgtgcctgtaagtcccagctacttaggctgtggcaggaggattgcttgagccgaggcgtttgaatctagcctaggcaacatagcaagatcctgtctctttaaaaaaaaaaaaaaagaaagaaagaaagaagaagaaaaagcagtggttttaataaactacctcccccagcccagtgtgatgatggtgcagggcttttcctttttgtagttcccctaccccactccaagcttaagtagctttattgctttgatcattcttagctagattcacccaaaatgggataataagaattgatgacaaaatatatcagcaataaagaaaaatagactttctttttgtttatggcttctcagatggaacacgtttaagcatagggtgtgtatctaattaaaggaccttctcttttccccactccagctggaaagctaacccatataagctatgtagaactcatgtggtaagactgggagcagaggctggattcaagttgatatagcatgagcagtgttgcagatgcacagatctaactttagccatcctgaagggactctgatgtgaaaggattgcatgtcctgaactctcttgctggtggatggtgggaacctctatctatgggctctgctgatctagagtttttaggagtgctgtgttttaacaagtttgagtgttcaaattcagatattacttgcttggaatgcttctattctgctgactgtatctgccccccttgcatggtgagtgttttatgattaaatatagttggactattggtttcaacatgagactaatccagggtggtgacatgccggtctttgtagttcttgcttcggggttaatgaggggcaggaaagagttccttagactcctgcatggcatcatgaatgctgctgttcttcttaccttggtttttttcctcctcctctaccttttctaccttggtgtgctgggatcagatcctgcttatcttccacttcttaagaaaagctgacatagaagacacattgggactataacagggctgggtctcctcttccactcccactagacacatggtaactaatcacattgcccattactgttaatattcctgtgtatgtattcagcccctctcccttgttgatgactaaccagctagctctgagctaacccaacagctattatgatttgtccatgaatatgtcacatgtttgtattggaaacatgttgagcatactatctggatgaaattggattgtgaagttacatagagtttttatgcacatctgaatatttgtgctcttcatgtaaaatgccattgtgtatgtgtgtgtgtgcattagttttcttttttcatatatgtattatgttatcaatatttaagatcctgactgattatgtattagaataattaaaccattttggttcagagcatgtagcctcccatttcacagaaggaacagtttgcagaatgcatggtatgctttggtcttagtaatgacactttaaatgtgattctccccaaactcctaagttttaaaagtatatatcaaaaggctttaagctgtactgatgacacatctcattggaaaatccctacgctgtaccccagctttcttacttcctggcattcactttccctgattcatttatgagatagtgcttgttgttaaagactactgtcaccgtgaaaaggttcagcctgtgtgacctggcattccctaatttctcattcatgacttcctgagtttttggggggatttgattgtggtattggtagggaataaaaatatggagagaacaagataagccaagacttgcctggatatatatctgtaatttaaaacatacattcagaagaggtttgcctttgattataacaaaagtgaattgccattaagctaataaaaggtaccatagagcttgttcccttaaacctttatcccaaaggagggttgatggcagggggaaaagacaaacagcaaaaggataaatgtgtattgtaactagaattccaatatgatttttgtaaactgggttgaagaggttgtaccatatttgtttctgtgcctcccccagtgatgagttcattgacttagaagaatgagtgagtgtcaggtatagaaaatagtttaaaaacatgtgatcattttgacacccattgttatgttgtcttttgtttttatatatctgttgcttcatcttgccgtcagttgcatttctatatttttgtttctatttatttattattattattttttacatttgttcttcaaattgccaattcatcagctgcagtacatcagagagtttgtcaccagttaagcaggctcctcggaagtccccctccgacactgagggtcttgtaaagagtctgccttctggatctcaccaggtaatggctgattgcgattctgcccactgcactgttccctacagcttggtgctctgtcacttccttgggtgtggaaaagaatactgagctatgagagacagagacagagacagacagacagagacaaagagagagtgggagtgaggaattaaagggctggcctaggaagaccacaggaaaatatgtggtgaagaatctgcttgagtaaagatttccatgaaaccaccaataacataaattgtttactaaccatgtagcttccttgcctcaagcagaattaggaaatggctttgtcagtaaaagattctttaattgcccaaggaaatgaatctaatgaaggagattctttctgtattgaggtactctaagataagaaattagcaaggaaaagttggtattcttagtattgataataaaaccaaaattattttctgtggattctttagaaaaaatggaaagtaagcatttatctgaataattaataggcttgatgaacaaggaatggttttggtttctacttgtagaaagtacagaagagaaacaggttttatttggaagttagcatataatctagctttgtgtgttttggctgtagtattttaattataactgtggcttggcaaaaattccatagcttagttcagtttgatttttctggggtagaaagcatgctaaagaatttggccagttatagctttgtcctaaaaaggtgttagctggtgggaatggatttaagaggaaataaagagagtaacagtgttttgtgggaaaagtacccatagtcttattccatagttgttatatgtggtgaggaaactaaggcattgtgatgttaaattactaaaagcacacacccagttagtgacagaactggggctagaacccaggtgtctagatagcatgttctctaccacagcatcaggctcattacttgttcctgttctatctgtctgtctctctctcacattacataatatatgtcagatacctcagtctactaatttgggttgtgaacaggaatatggttgtaaatgaagacatgaaagttacatacacataggcatagcatctaaaaaagcattggaacatttttattccgcccttgaagcactatggaagttgcttttttgctgaaaacaaaccagaaaaaagaaaaagaaactgtggttttcaagacagtggaacacaaattatgcagcactgtcatccccaaaagaaaggaaacagacaatgtgagccgtgttattgccccagtgtactgccttgaagcagtttccacactgcagtgtaggtggggaaaatggaaactgggcccagctgtctcactcaattgagaaggcggaaatcagaatttggggaggtcaaggaggctaagatttatgaggctgagtaccaaagaaggaaccatagagagagcgtgctaggatgagcacgagcacttcagagatttggagcggggtccccttgagtctttgtctgattacagagttgtatacacataggagaacactctctgaaaccaggggaagaactacctgaaatgcagtaggttgcacaatgcctggtgctcacacaggtgagggactagtttgtgttcctaagagccagagtagagagacttataatacacagggtattggttggggttctcaaaatggtcatacctaaatgggttaaattagtaccagaataaaggatgctatggacccaccataacaaagcttaaaaggaagcctttaaagaatcaaactaatccaaaagtaatttagttgcattttacaacaaaatccaacacgctttatgctacaacaaaattcatcacccaacaatgtacaatttacaatgtctggcaccaatcaaaaactaccaggcatggcctggtgcggtggctcacgcctgtaatcccagcacttagggaggccaaggcgggtggatcacgaggtcaggagttcgagaccaacttgaccaacatggtgaaaccctatctctactaaaaatacaaaaattagccaggtgtggtggtgcacacctgtaatcccagctactcaggaggctgaggcaggagaatcacttgaacctgggaggcagaggttgcagtaagccgagatcacaccactggcactccagcctgggtgacagagtgagactccatctcaaaaaaaaaaaaacaactatcaggcataaaaagaaaccaaaaaataaaacacataagccagatatagtggtgtgtacctgtagtcccagctacttgaaagcctaagtgggaggattgcttgagcccaagagtgtaagaccagcctgggcaatatagtgagaccctatctcaaataaatagatgggtggaaagaaggaaggaaggatggatggatggatggatggatggatggatggatggatggatagatttaaaaaaataataatttaataattaattacaataaaaaatcaggagaaatcaatcagaaacaaattcagaatggatggaaatgatgggattcataaacaaagaccttaaaatgagtattatcaatcttattagtaaacttaaagatgtaaaggaaagcttgaacccaatgaggaaagaaatagatatctaaaacagaccaaaatggaacttctggaaataaaaaaaaattggatggtgttaacaacagattagatactgcaaaaaaaaaaggtcaatcaacttgaagacatagcaatagaaactatccaaaatgaagctcaaagagaaagacagatggcggggtgaaagtgaacagagcctaacacggtgaaaacccatctctactaaaaatacaaaaaattagttgggcatggtggcacgtgcctgtagtcccagttactcaggaggctgaggcaagaaaatcacttgaacctgggaggcagaggttgcagtgagctgagatcatgccactgtactccagcctgggcaacagagcgagactctgtctcaaaaaagaaaaaaagaaaaaaaagaaagtgaacagagcttcagtgagccaccggacaatatcaagcaatctaattagaatccgagaagaaaaagggagagaaaaaaatatgtaaagaaatagtgaaatttttagtaaatttaatgaaaaacataaacacacagaaagcaatagcgaaaattgctgggcgcagtgactcaacgcctgtaatcctagcactttgggaggctgaggtgggtggatcacctgaggtcaggagttcgaaaccagcctggccaacgtggcaaaaccccatctctcctaaaaatacaaagattagttgggcatggtggcaggcgcctgtaatcccagctacttgggaggccaagacaggagaattgcttaaaccacagaagcggacattgcagtgagccaagatcgcgccactgcactccagcctgggcaacagagtgagactccatctcaaaaaaaaaaaaattgactctttacagcaaaaataatgacagcattttatgaggctataacatgtggaagtaaaatgtatgacaacagtagtacaaaggatggggtggaaggatggaagaatactgttgtaaggtccttatattatccatgaaattataatttgaaggtagactgtggtaagttaaagatatatgctgcaaattctagagcaaacactgaaaaaaataaaagagatagatacagctaacaagctctatctccgaatggcaatactgataagaacaaaattctgacatatgctacaacatggaaaatggtaaatgcggatggtaataatatcaacgttggcatcagaacaagaaatagaaccagagatagagggactttttatgatgataaagcgatctacttacaaagaagacataatcctaaatgtttatacttgtaatagtagagcttgaaaataagtaaaactgagagaattggaaggaaaaattgacgtatttacaatcatagttggaggtttcaacaagaaactttaatgtaatcatttcaaaatactcagttaatccaaaagtgagcaggaaaggaggggaaaatgagcaaagggtagatggggcaaatagaacacaaataatgaagtggtagatttaaactcaaccagactgatgattgtattactataaatgggctgagtgtgccaataaaaggtggagatggacaaattggatagaaaagcaagaaccaatcatatgctgtctgcaataaaccactttaaataaaaagatccaggtaggttaaaaatattaatacaaggatgaaattgaaagcagagtcttgaagagatatttgtacatccatgttcatagcagtattattcacaagagccaaaatacagaagcaacccaagagtccatcagtatacaagtggataaatagaatgtggtatatatatacacaatggaatattattctgtctttaaaaggaaagaaattctgacacatgctacaacatggatgaatcttgaagatatgccaagtgaaataagccagccacagaaagacatactatgtgattctactaatatcccataccctacagtggtccagttcatagagacagaaagtagagtggtagttgttggggaaggaagaatagggagttgtttaattggtacagtttcagtttttgcaggatgaaaatatcgtagagattggttgcacaaggatgtaaatgcacttaacactactaagctgtacactttaaaatggtaaagatgctaatttttatgttatatatattttaccacattttttaaacagtaaaaggatggaaatgatatgctacattaacactaatcaagagaaatctgggtggtaataatatcagaataggcttcagaacaagaaatagaaccagggataaagacagactttttatgatgacaaagtgatctactcatgaagaagacataatcctaaatatttatacttctaataatagagcttgaaagtaagtgaagtaaaactaagagaattgaaaggagaaattgacatattcacaatcatagttggaggtttcaacactcctttctcagcagttggtagaacaggtttacagaaaatcaaaaaagatgcggaagacttaacagtgaaaccagtttgagctaatagacatttataaaacactccttccatcaagcgcagaattcttactctttttaagtacacatgaaaattaaccaaatatagaccatattctggttcataaaacaattctcattaaatttaaaagggttggaatcatatagagtacgttctctggccacaatggaattaaacagaaatcaacagaaagatacctggaaagtctcaaatatttcaaaattgaacaacccatgagtaaaacaagaagtcacaagaaaaattagaaaatattttgaactgagtgaaaataacatatcaaaatttgtgagatatagctaaagaagtgctttgaagatttgtagcattaactgtttatattagaaaaaaataaagctctaaaattgatgatctaggcttctgtctgaagaaactagaaaaagaagagcaaattaaacccaacataaacagatagaattaataaagagaagagctgtggaaaaatcagctgacattctcattgtttccctgtaggtaatctgtcgcttctctctggctgcttttcggatcttctttatgcctttggtgtttggcattttatatactatttaattatagattatcccttgttgcatctgcttgtaatttcattggacctcctgagtcttaaggttgatgtctttaataaattctaaaaaatttctagtcacaatctctttgaatttttcctttctgcattttatctatttatctttttatggaactctgattatatgtgtattatactttctctatgctctaagtctcttaacctctcttgcagatctttcattgtattgtctttctgccattttctgcataatttcttcatctgccttcattcactaattccttagctgtgactagtctactgtttagccccttttaaaagtttttaaacttcaatttcatattacaggtttattttctagaaattttatttggttcttttttaaatatacctggttaattttgatagttccttataacttcatattttcaactatcttatttaagcatgttaaatattcttattttatacctcaaaactgataattccagtgtctgtagtctttattgatctgactacggtttttgtttctatatttcttgctaatggtggctattttctcatctcatgggtgttttataatttgaagactgtacttacgttcttggcactttgtacaaattgattgagtcttcatttaaaatatatttactcatgagaagatttgtatttcttctgcctgtgtcttggatactaccaacccagtgagaagaaatgcacaggaggtaaaaaaattttgagaacttgaatggtagactataatggccccacaaagaggtccacattctaatctctggattctttaggatatgttaccttacgtatcaaaaaggacttggcagatgtgattaaattgccttgagatagggagattgtcttgggttatctgggtggctccattgtaaccataaaggtccttagaagagggaggcagaagggtaagcatcggggagagactggaagatgctatactgctgactttaaagatgaagaactcatagccaagaaatacaggcagcttccagaagctggaaaaagcaaggagacagattctctcctagaacctgtggaaggcacgcagtcctattgacaccttgatcttagcacagtgaaacacatttcagacttctgacctgtaaaactgtgagataattaatatgtttttaacacctttaaaattgtctttattctcctccctcaaacttgattgcgaatctggtggggtaggattcccagttggaaatcattttccttcagcattttgagtcattgctgattgttctggcttccagcattgtggcttagaagctgatgccattctgattcactcttagggcagaggaaggtagggtcatctacctgagcaaagggagagtaaagaccagaaccaaactggggctcttccagccaagtggagtgggaggctgggttgggaaggtgttagataggcactacctagagtttagagtgttaaggcactgtggaaaaaaataagaaaattttttttctttgtgaagcttagttttgaatgagattggtataaagtaatttttgtatatgtatttgaggagtagttggttttctagatccttttctggatatcgttgatgctctgtatgcaaaaggtaggtttttgggttatgttgttaaacagtgattgaatggaatatttatgtatttgtcaactatagtgcatagcatagacagggtaatgtttcaagaagtagttatgtgcgtttttcctttagtcctcacaacagtcctccagggtaagttcttctgttgtctctattttacacatgaagaaactgaggcttagttaggcaagtcacttgctcaaggtcagtagttagtggctgagccagatctgtctggttctaaggcacatgtatattttatcctgtccaatttttttcacctctgctttgataatcagtatttgtctcatttatctcaaagaaagtcataatacatagctgtgtttcatatttatattttacttaaaaaacagtggaataaatactaaaaaaaaaggtgttctgtcagtagtcaatgagcacatggtaaaaatagatgttctttcttagtgattcgtgctaggcttttggggatgactcctctaacacctgaaggactagaatcaaattaaatagggctacaggctacagagactgtgaaaggtgtactacaggacacaacataatgactcctgagcagttaatttgtagttagaagcaggtctctttgcttttctagaatcctttcttcctggaccttctcccccaaccttcaccagttatggtttttttattggaataaataattaattttggtacaagtaaacttcagaggtaattttatctctagttgtaactaaaataataggcctatattaagcaatgtgtttcttgaaacattttcaatagctaaggcctattcatgcagaaagtagctgaaaacatactcagaccaatttttcactttattgttgtaattctttgtgtaaaagcaaagataaataaataaatgaaatggagggtggggagggtgagtaccaagagatagagtaaaacagctaggttaatgtaggttttgttgttgttttccttctttattatacccaaaagtgaatgtcttaacaatggtaggttcatttcaaagttgatcgtggttctgtggatcctcttgaagtcctgagcagcctcatttgccctcaaaatcgaggtgctgaggcatgttccatagagactcagggctccttccacctctaaatagcactcagaatcaaacttcatagaggtgttctagattgagctagatctgtcagcagaccccaatctcaacctacatctgcagtttctctgcatcctttctttcatccatcccttcatccagcacctgtgttctgccaagttctaggaagttaacaaagtccctgacttaagaccttattatattctaagggggaagaggaatgaggataacatcaggcagtggtaaacagtttgaagaataccaagtccatcagcaggaagggatttcttcagtgttttcccatttactttcatgagatagttgtattcttttgacatgaaagacagtactgtctcacatgaaagacctcattgatattttaacatttacagactaaaagataattctgtgttctttttcctctttactttctctgttctcattcttttctactcacataatatatcaattatctactgctacgtaacaaaccccccaaaatatagtggcttaaaacacgcactatttatttggctccccattctgtggattggtcgagcagattctggtctggatgagctcagctgatctctgctggctcacttgtgcatctgcagttggctagaaggttgactggtagctggacagtctacagtggtctcacttacagtctaaccattggcaggctgttggccaggcagacagaggacagctgggccatgcatctctcatcagccatcaggctgactttggcttcttcacatggtagtggtggctgtgtgggtcccaagatcagtgagagtggaagtggcaaggtctgttgaggtctgggtgtggaaactgcacagcatcactgctgcctcattctgttagtcagagctgatcacaagatcagcccagattcaaggggtagagaaacagatttctactcttgattggaaggacctacagcattatgttgcaaagagtaagatgcagagaaggaaagagtttgtagccatttgtgcagtcagtcacacattgtaaaccccttctcccatgaacataccctaaaactcttagtgagtttttaggaattatgatatggggttttattatctaagaatttatataatttaatgttgggagttccgtcctattcttggaaatagctgttaccagggaacagttagtttaattctgttcctagtagaaaacagtcttttttttgtttttttgagacggagtctcgctttgtcacccgggctgaagtgcagtggcgctatcttggctcactgtaagctccgcctcctgggttcacaccattctcctgcctcagcctcctgagtagctgggactccaggcgcccaccaccatgcccggcgaatttttttgtatttttagtagagacggggtttcaccgtgttagcaaggatggtctcgatctcctgacctcatgatccgcccgcctcggcctcccaaagtgctgggattacaggcgtgagccaccacacccggccgaaaacagtctttttaacttccttttgttttttggtggggttagcatttaacttgtagctttctgagatgaatatagagggtctgtatgattattaaccatgtgatctgttaatatttcctatgacagccattatagactaaagataaacacacagagtttgactatttaatttacttgaccagttacctcagtgcattttaaagtatgtttgtgtaacaagacgttcataataataactaacatgtattaagtactgtctgtgagacactgcctaagttataggtatcatcttatttaattttcataacaacaaaaaacaaaaatgtagatattattagtagtaccattttagagatgaagaaacttgtgcttagaaatttacaaatgtgcccagggccacgtgaccagtgctcttctctaaggttcaacaaagacgatatcataattcagactgcagatctgccaacattcaaatggctctagtcctcgagtgttattttctaactccgcttttagatgcaccattgtatagcccttacaactgggcctgtcccttctgtagatgtgggagtagctgaactccacagaaccccaggttacacactaaggacacaggttgttagggctcctggatgagggtaagtgtgtttattttaaaccacgtgcttttggctattgagcttatgatttcaaaggtgaaagcttaagcacgttattagacttctcaaggagagttcccctagattgggagaaaagttgacattgggtaatattaaatctttcttttaaaaccagggctattttgttgttgtttacaattttaagagtctagactgaaagagtcatgaaatgcagccacctatctgacctcttcccccaacagttagggaattcgctctgcccccaggccacccaaccttcccttgctctcctgaatgggaccctgacaattccctggaattgtaacctcttccttactgctgaggctgagaagaggatcttttctactttactccatttagggtttttctttatatctgtgtagattgtggctttttgttttttctttttaattttattttaaaacaggaagaacagttatctgatattaaaaatcaaggaagcaatatttgtattggtcacaatacgctcagactaaaagaattatgctgtaagtagttgtattgaagaatatttgaagtgcttttaaactatttgtttaaaactatacctatttgtataacgtgaccagatcaaattgattgtatctttgggtggcaccaaatatgttggtttcttgcatggattgattattctgaagctcatgatttctgtgggtctcaggtgcgtggaagttcccatcttagtccttaagactcttaccccaattgtaagagctgaggaattctgtgatagctattaagataagagatattcctaagaaggaatatattattacagaaattttcaaacatcaaaaaggtttgaaagaataatgtaacaaagccccatgtacttgctttaactattgtcaacgtatgtccaatcttgtttcaaagtcagtcctggatgtatcatccataagaagtcttcctgaagacattcaagagggaagtctttgctttggaaccctgatgtgatcacgttaatcattgcttctatgcctgtagctgaaggaaccgccagcgttttcagtcctctaatccttctgcttcccttttccagggcccagtcatatatgcacagttagaccactccggcggacatcacagtgacaagattaacaagtcagagtctgtggtgtatgcggatatccgaaagaattaagagaatacctagaacatatcctcagcaagaaacaaaaccaaactggactctcgtgcagaaaatgtagcccattaccacatgtagccttggagacccaggcaaggacaagtacacgtgtactcacagagggagagaaagatgtgtacaaaggatatgtataaatattctatttagtcatcctgatatgaggagccagtgttgcatgatgaaaagatggtatgattctacatatgtacccattgtcttgctgtttttgtactttcttttcaggtcatttacaattgggagatttcagaaacattcctttcaccatcatttagaaatggtttgccttaatggagacaatagcagatcctgtagtatttccagtagacatggccttttaatctaagggcttaagactgattagtcttagcatttactgtagttggaggatggagatgctatgatggaagcatacccagggtggcctttagcacagtatcagtaccatttatttgtctgccgcttttaaaaaatacccattggctatgccacttgaaaacaatttgagaagtttttttgaagtttttctcactaaaatatggggcaattgttagccttacatgttgtgtagacttactttaagtttgcacccttgaaatgtgtcatatcaatttctggattcataatagcaagattagcaaaggataaatgccgaaggtcacttcattctggacacagttggatcaatactgattaagtagaaaatccaagctttgcttgagaacttttgtaacgtggagagtaaaaagtatcggttttattctttgctgatgtcctttctgcttgaaataacagtcaccatacagctaaaggagaggagtttctttccttctaagtaggcagaaatggtatcattatgttgccgctctccaatctcccagagctcgctctctagagaatcaccttctttcgcttttttttttttttttgaggtagagtctcactatgttgcccagactagccttgaactcttgggctcaagtgattctccctcctcagcctcccgagtagctggaacgaactatagttgcaccactgcagctggcaagaatcaccttctttataaagcgtcagtcatgcttccagcaagaggcagcatcagtcatggctttataacagcttcatggtgcctcaaagactgttgaggttaatgagagcctagattagacagtttggctgtccttccctaaaacttgttttctcctattcactactccccaccgcacttaaaatctatgagtttttactttttactgggaatggaaagtgtggtgaagatcattcaacacttatgttgtcatttctcccattttctgaatttttttttaaatttccccccttttaaaattgttcgaaagcccacagttatggaaagaattactgtctagatggtctgcagaacgtgtttggggtgagtgggagtgaggggcaatgttactttttctccctgtagtttggagtccattatgagctgctgctttttcttctcatcttgtcatcttctggggatgtttgaaggctgagttccaacagaattcacaaagggaataaaacaggattgagattttgaggtgtgcacaaggtggtaagataaagggcatatgagcttcaaaactaatgctgttgcatacatgaagccttttgttttttgaggagctatttttgttattcttgtaacgctccaccttacatgccacatctgtgtgagtcaacagggatcaggtttggtcaccacacatgtctgaagctgggcagcgtctgctctgtgttctgtgtggaatggagaaaaaaacgcctgccctgctgccttccatgttcataggcccagcccaagagagtgacacacagtgctggccctgagacatttccacaaagtggtcaactctgccttgcatcctaaaactttttgggcatctattttgaaaactataggagcctttggaaggcctcttatgtttggaggggaagggtgttgagattgtcaccatccttcaagctgagactcctggtgagcctttgccaccatgaaaaccacatagctgaccagggctgtgcttgaggtacagaggacacacattgtagacaggcctgtgtcatgtttccttacagtcgttttttacagagaaaaggggcattgttttttcactgctttctcaacagttcctgtgaataaatgaaacatttcggagctccctgagagcaagagccttcacttcttcttgcggtgccgggaccatgtgttggtgaagctggtgctgtgggggccactcactcgaatgacacctggaggcctgttcctcccttaccactcccttccccagcccgacttcttggcctcctgcccaaccagacacctcaaactctgtcagtgccctggcattctggcagagaatcctcaccagttctcaccaaccttccccccaggcaagggcagctgccagcatggtgctctgccaggacaggtttccctgaaggaagctgctcacactgagatgagcctctcagggcaggacctcttcccaagccctgcacacccacccctgcagcccttttggctccccttttccctgtgcctcagcactcctttcctggttgcagataacgaactaaggttgcctaaagggcagatctgccctctccatgtcttcgtcctggcaaacagggtcgtcttaaaattatgcgctaattctgtatgggagcactcaaaaggcattacttagagattgaaatttcaaactatctctagtttttcaatggaaatatatcagctagggaaaaaccatcaagctcattattattttttgatcttcagttgtatttttgtgaatattttaatacatctttttcaatttctgaattgtgttgtgtgctcattttgaccagaatagaaaaagagatatgcctttcactcatatcattccagctacacctgccttcttttcttcaaaaatgccgtccgtgtgcctgcttctgggcctttgcacatgctgttccctgggcctgaagcatgccttctgccaatattcctgtggtttgctctctgacttcctttaagcctctgctcaaatgttacctcctcagggagaccttctgtgatatataaaagagcaagccccccaccccaccgcctcagccttcctggccccctcagttctgctctagttactctatttctctccctctttcccagtacacacttgtctgttctcccgcattagaacatagttaacaagagaccagaaccttgctgttttgttcactgctccgtctgcagtaaagggaacagcacctggcacttagctgctcaatacatgttacgtggatggatgagtaggtggaagcattcatccattcagcaacctacactgagaacaatcctgtgccaagcactgtgctaagcataaggaaacaaaacaagacaaagctcctcaaggagcttgccacagggtggaggtgacaggtgacatgaatggaagtaactagtagttaccaaatacttggtgtgagccaggcactttgcatttctttctctattatttctgtgagttaacagtaattgtactaatcttaatcccattgtttgaaagattatatggcttacccagggccacttagctaataaaggaacagagaagaggggctgggcctggggccgctgtttgatccacagccttgttcctaaccactatgccctgtggcctctcacaccaaaaggaagtaccaaactgcttccttactcaaataaatgtgctgaaatgcagttgcagttttctcccagtcccttaggagctggttagagagtcccttaggaacttgagagggtagtgtagtctaggtggtaggcacagatgtctgagagctttaacctcagtctggaagacaatgtggtgacttaatttgttgagaactatgttacaaataatgtgttactaataaaacattgaggcttcgcagtgacttagtaattttataaattaccatggattcacaatgagcccctgccttgcataactttgggcttgcaaaacctaatgcgttcttgagtgggagaagatgagttacagctggcaggaactcccctgggagtaattctcacatgtgaacagcatccatcttgcgtgatgtgacaaaaagaaaagggatgcttccttcaccacacaagggcagcagtgagtgatggaatcacatttttgtcatctctgcaattccttccaagtcagcactaagtgtcggagggcatccacctgctggggctctggtttccaagctacataggggccttgccaaccaaagatggactttttatttatgagagcagcttccacccctgagggagctgagttgagcagtgtttagaggaaactcagatactctctcaccccagttggctcccttctgacccctctgggtagttcctgtgctaactggactggggaaccactgacttcatcctcccactgtgcaggaaaggcgagggagcagccacggggaggaaagtggcatctgtggtattggtagagctggtggtaggagccaaccatctgcttttatggcgggttctcccctgcactttcctcttgcatagtcaagatattgtatgaacaatttcaatatattttgtttttttgtagaattactttaatgaaattaccctttgatataatttgaaaaaaatttttttttgagacagtcttgctctgtcatccaggctggagtgcagtggcatgatcttgcctcactgcaacctccacctcctaggttccagcgattctcccacctcagcctccccagtagctggcattacaggcacgcgccaccacacccggctaattttttgtatttttagtagagatgcccgcctcagtctcccaaaatgctgggattaccggtgtgagccactaggcccagcccctttgacataattctatcagcctacattgaagtatgtcataaaaaagagtcctaggaaactagctacttattgtactttactgccagcatggctttgagaacgttattccctgtcatacatttttcaatgttataaagacccacagcacaaatatctctctggatttaataccagatgatatggttgagatctgtgtcgcagcctaaatctgtcgaattgtgatacccagcattggaggtgaggcctggtgggaggtgattggatcacagtgggtagatttctaatgaatggtttagcaccgtcctccttggtactgttctcgtgattgtgagttctcatgggacctgtttgtttaaaagtatgcagcaccctcccactctgctctctcgctcctcctcccgccacgtgagacgcctcatgagaagcctcactacccctttgccttccgccatatttggaagctttctggggcctcaccagaagccaaagacgctatgcttcctgtgtaacctgcagaacggtgagccaattaaacctcttttcttcataaattacccagtcttggggttttgtttttgtttgttttttgtttgtttgtttgttttttgagatggagtctcactctgtcgcccaggctggagtgtagtagcacgatctcggctcactgcaacctccacctcctgggttcaagcgattcccctgcctcagcctcctgggtagctgggattacaggcatgcgccaccattcccggctaatttttttttgtattgtagcggagatagggtttcaccatgttggccaggctggtctcgaactcctgacctcaggtgatctgcccgccttggcctcccaaagtgctgggattacaggcgtgagccaccacacctggccttcagtcccaggtatcttttatagcagcgtgaaaacaagtaatacaccaggaaaactgtttcttatgaatattttgtttcaaactagtcatgtgcactgacttgtcactgattgtatttgtctctttgcttttgctattctctaggtcctagccaaatttgtgggtcactttctaccactgtacacagattgtacactccatatacactttgtacattaactttactcatagctttatgtgtatcttggattatgttcagctctatgatctgtctcagttttttccagtgatacaataatagatgtgtcctgatttagatagagaaagtaggtaggcagagattctggccatggcatcagagattcataatgccaaccacagacttactcttgactccacaaaaaccatttcacaaattcctattgttgcccaaaagaggtgaaaataaaagtatatgactggctgagtgtaacaaaactacatgacaggaattacgactcacatacagcctggagtcacctttctgttacaccctgttcatcagtgatggaaaggcagcttcctatgtgctgaaagttcatctctcttattgcaggtatgatttccactggtattaatgagcttgaaatatgaaggccacttaaatttcccagaggtgtcaagtgatgtggggatttcagagcatgtatcaactcacttcagcaatattagcatttttgtttgaaatacccagttagacaggaaacttgaaagataattgtttcaattatttgtatcatcatactgaaaattgcttaaaacgttctggttgttccttgaagacattaaaagaatagatcctattaatgccccataggttatttgatccttttggaaatgaaaagattgactgatgattgattgaattttctgctttttattaaattg

SEQ ID NO: 23798 - DNA, 6390 bp, Homo Sapiens
cccgcgcagacttgtctccggccagtcgcgcgtgggtagaggccttaggcgggcgttgcgaagggttgtttgctagagttcggaccttgttacggcgcgaagttccctccttggggcgggggaaaggtaccgcacccgctacctagtgtgaatgaactgtggcgtgggctgctaagggcaggctgcggagtacccgggccgtggccatgaactcacccgtggaccctggcgctaggcaggcgttgaggaagaagccacccgagcggactcccgaggacttaaatactatttattcttatcttcatggaatggaaatattatcaaatctcagggaacatcagcttagattaatgtctgcaagagcacgctatgagagatacagtggcaatcaggttctcttttgttcagaaacgattgccagatgttggtatatcctactttctggatctgtgcttgtgaaaggctccatggtcttgcctccttgcagttttggtaagcagtttggaggaaaaagaggatgtgattgtcttgtattagagccttcagaaatgattgtggtagagaatgccaaagataatgaagatagtattctacaaagagaaattcctgccagacaatcccgaagaagatttcggaaaattaactataaaggagagcgccaaaccattactgatgatgtggaggttaacagctatctttctcttccagctgatcttaccaagatgcatctcacagaaaaccctcatccacaggtgactcatgtgtcttctagtcagtctggttgtagcattgccagtgactctggaagcagcagtttatctgatatctatcaggctacggagagtgaggtaggagatgtagatttgacacgtcttccagaaggacctgttgattctgaggatgacgaagaggaagatgaagagattgatcgaacagatccattgcaggggcgagatcttgttcgagaatgtcttgaaaaagaacctgcagacaaaactgatgatgacattgaacaattgctggagtttatgcaccagctccctgcatttgcaaacatgaccatgtctgtaaggagagaactctgctcagtgatgatttttgaagtggtagagcaggctggagctattattcttgaagatgggcaagagcttgactcatggtatgttattttaaacggcactgtggaaatcagtcatccagatggaaaagttgaaaatttgtttatgggaaatagttttggaattactcccactctggataagcagtacatgcatggaattgtcaggactaaagtagatgattgtcagtttgtctgcatagcccagcaagattattggagaattttaaaccatgtggaaaaaaatacccataaagttgaggaagagggagaaattgttatggtacatgagcatcgggaactagaccggagtggaaccaggaaaggacacattgtgatcaaggcaacacctgagcgtctcataatgcatttaatagaagaacattccatcgtggatccaacttatatagaagattttctattaacttacaggacatttcttgaaagtcctttggatgttgggatcaaactattggaatggtttaagatcgacagcttaagagataaggtgacacggattgtattattatgggtaaataatcattttaatgattttgaaggtgaccctgctatgactcgatttctagaggaatttgaaaaaaatctggaagatacaaagatgaatggtcatctccggttattgaatattgcctgtgctgcaaaggctaagtggagacaggttgtgctgcaaaaggcttcccgcgagtcccctctacaattcagccttaatggagggagtgagaagggatttggtatttttgttgaaggagtagaacctggtagcaaagctgctgattcaggactgaaacgtggtgatcagattatggaagtaaatggacaaaactttgagaatattacatttatgaaagccgttgaaattttgaggaataatactcatcttgcacttactgtgaagaccaacatttttgtgttcaaagagttactttttaggactgaacaagagaaatctggtgttcctcatattcccaaaattgctgaaaaaaaaagtaatcgccattctatccagcatgtgccaggagatattgaacagacatcacaggagaaaggaagtaagaaagttaaagcaaatactgtttcaggtggaagaaacaaaatcaggaagattttggataaaacacgatttagtatcttgcctccaaagctatttagtgatggaggcctaagccaatcacaagatgacagcattgtgggaacaaggcactgtaggcatagtctggctataatgcccatccctggaacactctcatccagcagccctgatctcctgcagcctaccaccagtatgttggatttttccaatccttcagatatccctgatcaagttataagagttttcaaagtggatcagcaaagttgctacattatcatcagtaaagacaccacagctaaagaagtagtttttcatgctgttcatgaatttggtttgaccggtgcatccgacacatattctctctgtgaagtttctgttactcctgagggtgtcataaaacagagaagacttccagatcagttctccaaattagctgatagaattcaactcaatggaaggtattacttaaaaaataacatggaaacagaaaccttatgttcagatgaagatgctcaagaactagttaaggaaagccagctatccatgctgcagctcagtaccattgaggtggccacccagctgtcaatgagggactttgatttgtttcgtaatattgaaccgactgagtacatcgatgacctttttaagttaaattccaaaacaggaaatactcatttgaagaggtttgaggacattgtaaaccaagagacattctgggttgcctcagaaattttaactgaagcaaatcagctcaaacgaatgaagattattaagcattttattaaaattgcacttcattgtcgagaatgtaagaacttcaattccatgtttgcaataataagtggcttgaacctggcatctgtagcaagactcagaggaacttgggaaaagttaccaagcaaatacgagaaacatcttcaagatctacaagacatttttgatccatctagaaacatggcaaagtatagaaatattcttagtagtcaaagtatgcagcctccaattattccactcttccctgttgtcaagaaagatatgacatttctacatgaaggaaatgactccaaagtagatggtttagtaaactttgagaagttaagaatgatttccaaggaaatccgccaagttgttcgaatgacttctgctaacatggacccagctatgatgtttcgacagaggtcactgagtcaaggaagcacaaattcaaacatgctggatgttcagggaggtgctcacaaaaaaagggcacgccgcagctctctgcttaatgccaagaagctatatgaggatgcccaaatggcaaggaaggtgaagcagtatctttccagtctcgatgtagagacagatgaggagaagttccagatgatgtcattacagtgggagcctgcatatggtaccttgaccaagaatttaagtgagaaaagatcagccaaatcatctgaaatgtctccagtgcctatgaggtcagctggccaaacaactaaagcccacttgcatcaaccccacagagtaagccaggtgcttcaggtgccagctgttaatttgcaccccatcaggaagaagggacaaacaaaagaccctgcactgaatacaagtttacctcagaaagttttaggaacaactgaagaaataagtggtaagaagcatacagaagacactatttctgtggcgtcatctttacattctagtcctcctgcatctcctcaaggctcccctcacaaaggttacacacttattccatcagctaaatctgacaacttgtctgactccagccatagtgagatttcttcacggtccagcatcgtgagcaattgttctgttgactccatgtctgcagctctacaggatgaacggtgttcctctcaggccctggcagtccctgaatccactggggcattggaaaagacagagcacgcttcagggataggagatcatagtcaacatggccctgggtggacactcttgaagccatctctaatcaagtgtttagctgtctcatcgtctgtgagcaatgaagagatttctcaagagcatatcattatagaagcagctgacagtggtcgtggaagttggacttcgtgttcaagcagctcccatgacaacttccaaagccttccaaacccaaaaagctgggattttttgaactcttacagacatacccatttggatgaccccattgctgaagttgaacccactgactctgagccctattcctgttctaaaagctgctctagaacttgtgggcagtgtaaaggaagcctagagagaaagagttggacctcctccagttctctgtctgacacgtatgaaccaaactatgggacagttaaacggagagtattggagagcaccccagctgagtcatctgaaggcttggaccccaaggatgccactgacccagtttataaaactgtcacttcaagtacagaaaagggcttgattgtgtactgtgtcacctcacccaagaaggacgataggtatagggagccacctcccactcctccaggatatttggggatttctttagcggacctaaaggaaggaccccacacacacctaaaacctccagattatagtgtggcagtgcagaggtcaaagatgatgcataacagcctctctagactgccaccagcttctctcagtagcaacctcgtggcctgtgttccatcgaagattgtaactcagcctcagaggcataatttgcagccattccatcctaaactaggagatgtgactgatgcagatagcgaagcagatgaaaatgaacaagtttcagcagtctagcctttggatgacctatttgaaaaccactgaaagtcgtggaggaatgggcaagaaccacctcatgattctgcaggccattgctaacgaacagctcattgctacaaccagtccagaggttttattccctctactccgagcaatgaaatagacctgagttatgcttcctttcatttaatttctgcagataaatagtttcctgagcaatggatgctatgcctggataccagtctccactttgcacgccggaactgccttgggaccacagttacagaaaaaatgtaaactcagagtgatccttgtgtatattgctatagatttttctttaacaagctattttaaagataatggcattattatttccaagccatagcttgggctgaaggacaaattgaaattgtctgccaataccaaggatattcttgtatatttgaaaaataacttattatttgaattgttgtggttttgtttgtatttgagagctcttgttagctgatattcatgtttgaggtcataaaattgtctctggtctgaccaaacagaagtcatctttacagaggtgatatgcttgatctacacagagatgtgacttgatctgtagcaccaatacaatgtaggtctcagtttgagagaaataggaagccctttgcagttgaggtgttaggaacctgctggtcatggtgtggaaggccaaatgaagctgccacagggtttcttgtcagtcctttgggaaatgggagggagtagtttggggaggagggtgggaaccctaatttccacagaatgaaattttgatgttaaatgacatgtatacaaattcttccttaagtgaaagttatgctgcatcgaattgtaactgaaagtatagatccaacaaatagagactgggttctagagagttctggtctatagaaacccaaaactaaaatctctcataactcaagtatggaatactttttttaaagaaattcttatcatgggtgttgtaataatgaagacgaatttgactttatgcagtgttctgcagcatgcctcccccacatctcatagcaccaggttgtgtctgacctgacataccctgcagctctcagctggctgcagtaacattttgtgggagaaagaggagctggagttacagaaatgattgtctcttggttctcagtttttagcccttgagaggacatacttttccagcctcatgggtatggcactcttaattaaaatttcagtggctgtttactggatgaggcagatttttcacatttttgccaattaaatatattttatatatagtaaggttaattttttcagtttttttaatgtaaaagcaagtgaaattttaataaacttctgtaatttcccaaaaaaaaaaaaaaaaaaa

SEQ ID NO: 23799 - DNA, 3380 bp, Homo Sapiens
ggcttagagttggggctggcgctccggagttgctgggctcagcgcagctcccattcattaaggaaccagctgcggaggaaggtggccgagcgcccgcgctgcccactcgctcgctcgcgcactcagacgcgcgccacaacagcgcgccccaagctgcgcagctctgcaaaagtttctgctcgggatctggctctcttccccttggactttagaacgatttagggttgacagaggaaagcagaggcgcgcaggaggagcagaaaacaccaccttctgcagttggaggcaggcagccccggctgcactctagccgcctgggtgtgtggctgctgttgcgggacgtcttcgcggggcgggaggctcgcgccgcagccagcgccatgcaaaactacaagtacgacaaagcgatcgtcccggagagcaagaacggcggcagcccggcgctcaacaacaacccgaggaggagcggcagcaagcgggtgctgctcatctgcctcgacctcttctgcctcttcatggcgggcctccccttcctcatcatcgagacaagcaccatcaagccttaccaccgagggttttactgcaatgatgagagcatcaagtacccactgaaaactggtgagacaataaatgacgctgtgctctgtgccgtggggatcgtcattgccatcctcgcgatcatcacgggggaattctaccggatctattacctgaagaagtcgcggtcgacgattcagaacccctacgtggcagcactctataagcaagtgggctgcttcctctttggctgtgccatcagccagtctttcacagacattgccaaagtgtccatagggcgcctgcgtcctcacttcttgagtgtctgcaaccctgatttcagccagatcaactgctctgaaggctacattcagaactacagatgcagaggtgatgacagcaaagtccaggaagccaggaagtccttcttctctggccatgcctccttctccatgtacactatgctgtatttggtgctatacctgcaggcccgcttcacttggcgaggagcccgcctgctccggcccctcctgcagttcaccttgatcatgatggccttctacacgggactgtctcgcgtatcagaccacaagcaccatcccagtgatgttctggcaggatttgctcaaggagccctggtggcctgctgcatagttttcttcgtgtctgacctcttcaagactaagacgacgctctccctgcctgcccctgctatccggaaggaaatcctttcacctgtggacattattgacaggaacaatcaccacaacatgatgtaggtgccacccacctcctgagctgtttttgtaaaatgactgctgacagcaagttcttgctgctctccaatctcatcagacagtagaatgtagggaaaaacttttgcccgactgatttttaaaaaggaaaaaaaaaatgttttactatgtggccttccaaaataggtagtgtttgcctatgtggaaacaacagcaaactaacaccaagtgccagagtcctggatgtgcaattggtttaagtgttcatgttctagtgaacacagcttgttcaggaacaaacactaaaacgatttgagtagaggctgctggtcaccttttgtgacctgaggaatcccaggcctgtgagaaaagcaaaaattcacattgcagcacatgatgccagaaatagcactgaatcaagaaaatagccattgcggagctgccctcttgagtctttctgtccatcccattctattctgtactgtgactttagttcaggaagttttgttttgtgttttaaataaaaggaaagagcaagtttgctcagtcaagtgatcagatcccgaatctagattcccagttctaaggccttatcacctcccctgcccataggccaacaaccatagttcctcacattagtgattagcagactctttgtggacgagtgaatttcacaaacagcacaatttcagaagaaatcgagggcacaggccctcacttttcttcttttgacgcatcatcctgtgatgttgaaatgtcaattgcaggatgctgatgttgtgcacgtcaatcaccgggcacttgcatactcttagaaacagttcgacttcggttactgccttctcccttgaaatccttgctgcgtgcccaccaggatttcctgtgagggcccaggaatgagcaaggcatggtctgccaccagctgacggaaagcagccttctgtacaacagatgggagggtgaagggggcagaatgaaaatcgaaccaaccttttagctgttgcaaatcagaaggagccagagaagcaggcagtctcatgcatgagaggttacccttcaggatgacagagctgagggtctttgtaggagttgctcttgctgtgtaaagcactattgtcttggggttgagccctagggcagttcttggtaggttctgctgggcagaacatatgggttaaatctcggtagagagtttccctcatcctctatccgtaagtgtccttccatgcaaggtcccactctaggtgatagacagggaccccttctactgaacctttgaggaaaggaggaaggaagaaatgcgtttagatcttggatgcagacctttcaaagggttaaatgtaaccatatggatcaaccacatgcacatccttactacagaatccgtcctttcatttcaacttatagcaagctatgatttttatatataaatattatataaataatgtataaaacattaaaagttaactatgtaagatattatttctgaaacaatttagctatatccactatgattataaactgtgtctcgacctgtgttatttacattagctgcttaaaaaagcattgagttaatttttttaaatatcaactaaaatatcatagttctgtggtagacattgttttataatgaaataactgcaactagagaaaactgtataaaaacattaaattgtcagtatttttgtaaggttccattttgtaaagagaataatattcaaagacttttgtagcatacaaagtgaaaacttgtatctgcgaaactatacttgtattaaatgtgctttttaaataaaagctcgtaacacaactctcatctcaggctcttctaaagagcttttgtattctaaagaggatttttccatcagagaggtaggagctgtaggaaccccgagggcagataagcagccctcactctagataaggtatgctgggggagcttactgagggaatcctgtacacagcccacatcaaaggaaggctgagaatggcctgtggctcctgcttcccttccttgtgtttctccaacctggaagaaaaggggaagctagaaattcacatttattgagcacctgtgtgaaaaaaaaa

SEQ ID NO: 23800 - DNA, 467 bp, Homo Sapiens
gggtgtcccagaaacccaggaaatcgagactcatgactcccagagaggatggcatctagaaggcatgcaggggacctccaagcaatgatatccaaggaattccatctggcagccacccaggatgactgcagaaaaggaaggacacaggaggatatcctggttccctcttcccacccagagctgtttgcatcagtcctgccaatggctccggaagaagctgccaggctccagcaacctcagccccttcctcctccctcaggaatccacctatccgcctctaggaccttggctccaactctattgtactcgtctcctccctcccattctccttttggtctcagctccttgatctaagcctcccagagagaccctagaatgtttccctcaaggacctttctgcctggaagtctgttagcctttcagaagtaacatgtccaaaataaaatttgattcctcccaaaaaaaaa

SEQ ID NO: 23801 - DNA, 1440 bp, Homo Sapiens
ggggtctgtggctgctgcggttacctggatgggcgagcacctctgaggctggctttgttacctgggcaataagggactagcagttcagccgttttctatgcctgctggatttgtttgtatttgttcccagccactgctcatgtaatgtactcccttaaccaggaaattaaagcattctcccggaataatctcaggaagcaatgcaccagggtgacaacgctaactggaaagaaaattatagaaacatggaaagatgccagaattcatgttgtggaagaagtagagccgagcagtgggggtggttgtggttatgtgcaggaccttagctcggacctgcaagttggcgttattaagccatggttgctcctagggtcacaagatgctgctcatgatttggatacactgaaaaagaataaggtgactcatattcttaatgttgcatatggagttgaaaatgctttcctcagtgactttacatataagagcatttctatattggatctgcctgaaaccaacatcctgtcttattttccagaatgttttgaatttattgaagaagcaaaaagaaaagatggagtggttcttgttcattgtaatgcaggcgtttccagggctgctgcaattgtaataggtttcctgatgaattctgaacaaacctcatttaccagtgctttttctttggtgaaaaatgcaagaccttccatatgtccaaattctggcttcatggagcagcttcgtacatatcaagagggcaaagaaagcaataagtgtgacagaatacaggagaacagttcatgagttgcattgtagcagacaatggacaactgtagtttctgaattgacttctatagccatcttttcccttttttggagagtagactagcaaaactccctttttttctcttgccttttttatgcataaatggaggtcaatctgattgtcctgacctactgtataagtaaatttcaaatgtcattactttctctttgttattataatgtgtgattaaatgcttttttaaattgctaagggaaataacaaagtgttagtaatcattgctttctgtagaagaaaaaggtttaaatttaaaatgtgtatttagagcatggagagaatcatttaatgaagcctatttttctgttccagcctgggtgacagagcgagactctgtctcaaaacacaaaagagaaaagctaaagtaagagcatataattggcatcactgtggacagattgtcaatgaaaattcaatagaataccttatttaaggtaagagaagatgctgagttactgtcagattaaattaccctacattctaactatgactgcattgagattatttgtacatagtgtggcacccacctcccacgctcatgcaaacaggctgttatatctttgtaatagttattttaaaatgtacaataaattattgttgactgc

SEQ ID NO: 23802 - DNA, 2958 bp, Homo Sapiens
atgtctcggatcgaatccctcacgcgggcgcggatcgaccggagcagagagctggcgagcaagacccgggaaaaggagaagatgaaggaagccaaggatgcccgctataccaatgggcacctcttcaccaccatttcagtttcaggcatgaccatgtgctatgcctgtaacaagagcatcacagccaaggaagccctcatctgcccaacctgcaatgtgactatccacaaccgctgtaaagacaccctcgccaactgtaccaaggtcaagcagaagcaacagaaagcggccctgctgaagaacaacaccgccttgcagtccgtttctcttcgaagtaagacaaccatccgggagcggccaagctcggccatctacccctccgacagcttccggcagtccctcctgggctcccgccgtggccgctcctccttgtctttagccaagagtgtttctaccaccaacattgctggacatttcaatgatgagtctcccctggggctgcgccggatcctctcacagtccacagactccctcaacatgcggaaccgaaccctatccgtggaatccctcattgacgaagaggtaatctacagtgagctgatgagtgactttgagatggatgagaaggactttgcagctgactcttggagtcttgctgtggacagcagcttcctgcagcagcataaaaaggaggtgatgaagcagcaagatgtcatctatgagctaatccagacagagctgcaccatgtgaggacactgaagatcatgacccgcctcttccgcacggggatgctggaagagctacacttggagccaggagtggtccagggcctgttcccctgcgtggacgagctcagtgacatccatacacgcttcctcagccagctattagaacgccgacgccaggccctgtgccctggcagcacccggaactttgtcatccatcgcttgggtgatctgctcatcagccagttctcaggtcctagtgcggagcagatgtgtaagacctactcggagttctgcagccgccacagcaaggccttaaagctctataaggagctgtacgcccgagacaaacgcttccagcaattcatccggaaagtgacccgccccgccgtgctcaagcggcacggggtacaggagtgcatcctgctggtgactcagcgcatcaccaagtacccgttactcatcagccgcatcctgcagcattcccacgggatcgaggaggagcgccaggacctgaccacagcactggggctagtgaaggagctgctgtccaatgtggacgagggtatttatcagctggagaaaggggcccgtctgcaggagatctacaaccgcatggaccctcgggcccaaaccccagtgcctggcaagggcccctttggccgagaggaacttctgaggcgcaaactcatccacgatggctgcctgctctggaagacagcgacggggcgcttcaaagatgtgctagtgctgctgatgacagatgtactggtgtttctccaggaaaaggaccagaagtacatctttcctaccctggacaagccttcagtggtatcgctgcagaatctaatcgtacgagacattgccaaccaggagaaagggatgtttctgatcagcgcagccccacctgagatgtacgaggtgcacacagcatcccgggatgaccggagcacctggatccgggtcattcagcagagcgtgcgcacatgcccatccagggaggacttccccctgattgagacagaggatgaggcttacctgcggcgaattaagatggagttgcagcagaaggaccgggcactggtggagctgctgcgagagaaggtcgggctgtttgctgagatgacccatttccaggccgaagaggatggtggcagtgggatggccctgcccaccctgcccaggggccttttccgctctgagtcccttgagtcccctcgtggcgagcggctgctgcaggatgccatccgtgaggtggagggtctgaaagacctgctggtggggccaggagtggaactgctcttgacaccccgagagccagccctgcccttggaaccagacagcggtggtaacacgagtcctggggtcactgccaatggtgaggccagaaccttcaatggctccattgaactctgcagagctgactcagactctagccagagggatcgaaatggaaatcagctgagatcaccgcaagaggaggcgttacagcgattggtcaatctctatggacttctacatggcctacaggcagctgtggcccagcaggacactctgatggaagcccggttccctgagggccctgagcggcgggagaagctgtgccgagccaactctcgggatggggaggctggcagggctggggctgcccctgtggcccctgaaaagcaggccacggaactggcattactgcagcggcaacatgcgctgctgcaggaggagctacggcgctgccggcggctaggtgaagaacgggcaaccgaagctggcagcctggaggcccggctccgggagagtgagcaggcccgggcactgctggagcgtgaggccgaagaggctcgaaggcagctggccgccctgggccagaccgagccactcccagctgaggccccctgggcccgcagacctgtggatcctcggcggcgcagcctccccgcaggcgatgccctgtacttgagtttcaaccccccacagcccagccgaggcactgaccgcctggatctacctgtcactactcgctctgtccatcgaaactttgaggaccgagagaggcaggaactggggagccccgaagagcggctgcaagacagcagtgaccctgacactggcagcgaggaggaaggtagcagccgtctgtctccgccccacagtccacgagactttaccagaatgcaggacatcccggaggagacggagagccgcgacggggaggctgtagcctccgagagctaa

SEQ ID NO: 23803 - DNA, 468 bp, Homo Sapiens
gtggtttgctagggtgctttgaggattcagagaagggaaagttcttcgttaaacattacacaggatatatgtgacgcagctagccttgcattaagaaaatttgatttgtgaagtaggatttggaaaagatttgtgaactggcttgagagtcacagctttccatttgtcgccagagggctggttttcaatatataaaacaggaaatcacacttcttttgataaaaaagaaaaagaaaaagatgtttgttaaggtgtttgtacaggtatcttagtgtatatcttgccctttgttaatatatatacatctctctctttcctgattccatccacctttattttgtctttaaagatattctatagagtagttgcagacattgcgccgggagtggagcttctgctgttcatgaagagcgaagactatccccatgaaactatggcgccggatatccacgaagaacggcaatatcg

SEQ ID NO: 23804 - DNA, 1880 bp, Homo Sapiens
atggtgctggaaggaaaccctgaagtggggtccccccgaacctcagacctccagcaccgggggaacaagggctcttgcgttctctcctctcccggtgaagatgcgcagccaggcgaggagcccatcaagtatggtgaactcatcgtcctgggatgctgtgaggaaggaggtgaggaaaccgaggctcagagaggggaagtgactggcccaagggcacacagctgctacaatggttgtctggcaagtggggacaagggccgccggcgaagccgcctggcactgagccgccggtcgcacgccaacggggtgaagccagacgtcatgcaccacatctccacgccgctcgtctccaaggcactgagtaaccgtggtcagcacagcatctcgtatacactgtcccggagccactcggtcatagtggagtatacacatgatagcgacacagacatgttccagattggccgctccacagagaacatgattgacttcgtggtaacagacacgtcccctggaggaggggctgccgagggcccttctgcccagagcaccatctcccgctatgcctgccgcatcctctgtgaccgccggccaccctatactgcccgcatctatgccgctggcttcgacgcctctagcaacatcttccttggagagcgagcggccaaatggcggaccccagatggcctgatggatggactgaccaccaatggagtcctggtgatgcacccggcaggcggcttctccgaggactcagccccgggtgtctggcgggagatctcggtctgtgggaatgtgtacacattgcgggacagccgctcagcccagcagcggggcaagctggtggaaaacgagtccaacgtgctgcaggacggctctctcatcgacctgtgtggggccacactgctgtggcgcacaccggcggggctgctgcgggctcccacactgaagcaactggaggcccagcggcaggaggcaaatgcagcgcggccccagtgccccgtgggcctcagcactctggccttccccagcccagcccgtggccgcacagcgcccgacaaacagcagccctgggtctacgtccgctgcgggcacgtccatggctaccacggctggggctgccggcgggagcggggcccccaggagcgcgaatgtcctctctgccgccttgtggggccttatgtgcctctatggcttggccaggaggccggcctctgcctggaccctgggccgcctagccatgcctttgcaccttgcggccacgtctgctctgagaagactgcccgctactgggcccagacaccactgccccacggcacccatgctttccatgccgcctgccccttttgcggggcctggcttaccggcgagcatggctgcgtccgcctcattttccagggcccgctggattaggctccctggggccccctgctgctgtgcccacctgcccacccaggtccccacctcctgcagcccagagggagctctgcatgtgggacactccctgctggcacagccacaccagatggacatgttggatgggctgtgcccttccccccaactgtggccccccaaggaggtccccaagatctccaccccagtcatgctgatggggccttcagcaccagctctgtcctgggtcgatggaggaaagcccagccccatggccttgcccttcctggggcatcccacatcgtgccgccgacactgtgtgcccctgggggagtgaaggggccaggggcctttgacccccagcttaggctggctatgccctgagcctgccaacccagtttcagacactcatccttcatccttcctgctgccgccctgggttcctctataaacctcgctgctcagctgcccccacgaaaaaaaaaaaaaaa

SEQ ID NO: 23805 - DNA, 1919 bp, Homo Sapiens
gaattcccgcggcccagcccggccggccgggggcggcgccccgagcccgggccccgcgcggcccgcggcgcgggccccgctgagccctgggggccccgctgcggccgaggccatgttcccggtgtttccttgcacgctgctggccccccccttccccgtgctgggcctggactcccggggggtgggcggcctcatgaactccttcccgccacctcagggtcacgcccagaaccccctgcaggtcggggctgagctccagtcccgcttctttgcctcccagggctgcgcccagagtccattccaggccgcgccggcgcccccgcccacgccccaggccccggcggccgagcccctccaggtggacttgctcccggtgctcgccgccgcccaggagtccgccgcggctgctgcggccgctgccgccgctgctgccgccgtcgctgccgcgcccccggcccctgccgccgcctctacggtggacacagcggccctgaagcagcctccggcgccccctccgccacccccgccagtgtcggcgcccgcggccgaggccgcgccgcccgcctccgccgccactatcgccgcggcggcggccaccgccgtcgtagccccaacctcgacggtcgccgtggccccggtcgcgtctgccttggagaagaagacaaagagcaaggggccctacatctgcgctctgtgcgccaaggagttcaagaacggctacaatctccggaggcacgaagccatccacacgggagccaaggccggccgggtcccctcgggtgctatgaagatgccgaccatggtgcccctgagcctcctgagcgtgccccagctgagcggagccggcgggggagggggagaggcgggtgccggcggcggcgctgccgcagtggccgccggtggcgtggtgaccacgacagcctcggggaagcgcatccggaagaaccatgcctgcgagatgtgcggcaaggccttccgcgacgtctaccacctgaaccggcacaagctgtcgcactcggacgagaagccctaccagtgcccggtgtgccagcagcgcttcaagcgcaaggaccgcatgagctaccacgtgcgctcacatgacggcgctgtgcacaagccctacaactgctcccactgtggcaagagcttctcccggccggatcacctcaacagtcacgtcagacaagtgcactcaacagaacggcccttcaagtgtgagaaatgtgaggcagctttcgctacgaaggaccggctgcgggcgcacacagtgcgacacaaggaaaaagtgccgtgtccttggtgcggcaaaatgctgagctcggcttacatctcggaccacatgaaggtgcacagccagggcccgcaccacgtctgcgagctctgcaacaaaggcttcaccacggcagcatacctgcgcatccacgcggtgaaggaccacgggctccaggccccgcgggctgaccgcatcctgtgcaagctgtgcagcgtgcactgcaagacccctgcccagctggccggccacatgcagacccatctggggggggccgccccccctgtcccgggagacgccccccagccacagcccacctgctgaggggaccccgcacccaccaggtactggtgaggtttgtccaatggcggcggcagcggcagcggcggcagcggcagcggcggcagcagtagcagcccctcccacagctgtgggctccctctcgggggcggagggggtgcccgtgtgctgtcagccacttccctcccaaccctggtgagctccaagttggttcggggggaggggagatggagtagagtcccttggtacaagctcctctcccccctcttttcccaccaactcctatttccctaccaaccaaggagcctccagaaggaaaggaggaagaaatgttttcttaggggaattc

SEQ ID NO: 23806 - DNA, 2004 bp, Homo Sapiens
atgtttgccgcacccccgacactgcccccgcccccggcgctgccggccagcagcctggtcctcccaggacacccggccgatcacgagctgctcaggcaagagctgaacacgcggtttctggtgcagagcgccgagcggcctggcgcctccctgggcccgggggctctgctgcgggcggagttccatcagcaccagcacacacaccagcacacgcaccaacacacacaccagcaccaacacacattcgcccccttccccgcagggctgcccccgacgccgcccgccgcacccccgccgtttgacaagtatgcgcccaagctggacagcccctacttccgacattccagcgtgagtttcttcccgtccttccctcctgccatcccgggactgcccaccctgctcccacaccccggccccttcgggtccctgcagggcgcttttcagcctaaggtgtctgacccgtaccgggcggtggtcaaggtgagcacgtgttgggaaggcccgtggcaagggaggactctggtgcccccggggcggcctcggggggcccgtgacagcaggagtctgcagaaaacatgggtgggggtggcaccagccccactgagcgcttccatcctgtcgcagaagccggggaggtggtgtgccgtgcacgtgcagatcgcctggcagatctaccgtcaccagcagaagataaaggagatgcagctggacccccacaagctggaggtgggtgcaaagctggacctgttcggcagaccccctgccccgggcgtgtttgcaggcttccactacccacaggacctggcccggcccctcttccccagcacaggtgccgcccatcctgcctccaacccatttggaccctcagcccatcctggcagcttcctgcccactggccccctgacagaccctttcagcagaccgagcacctttgggggcctgggcagcctgagcagccacgcctttgggggcctgggcagccatgcactggctcccggtggcagcatctttgcccccaaggagggctcctccgtgcacggcctgcccagcccccatgaggcctggaaccgactgcaccgggcaccgccctccttcccggctccgcccccgtggcccaagtccgtggacgcggagcgggtgtcagccctgaccaaccatgaccgagagccggacaatggcaaggaggagcaggaacgggacctcctggagaagacgcgcctgctgagccgggcctcgcccgccacccccgctggccaccccgtcagcggcctcctgctccgggcccagagcgagctgggccgatccggggcccccgcggagcgcgaggccgaacctcgggtcaaggagagccgctccccggccaaggaggaggccgccaagatgcccgcgcgcgcatccccgccccacagcaaggcggcccctggagacgtgaaggtcaaggaggagcgcggggaggacgaggcctccgagcccccggcgggcggcctgcaccccgcgcccctgcagctcggcctgggccgcgagcgcctgggcgcgccgggcttcgcgtgggagcctttccgcggcctggagctgccacgtcgcgccttccccgctgccgcccccgccccgggctccgccgccctcttggagcccccggagcgcccctaccgcgaccgcgagccccacggctacagccccgagcgcctgcgcggggagctggagcgcgcgcgggccccgcacctgccgcccgccgcccccgccttggacggcgcgctgctgccctcgctgggagccctgcacttcccgcgcctctcgcccgccgcgctgcacaatgggctcctggcgcggaccccgcccgccgccgccgccctcggcgcaccgccccccctggtgaccgcggccgggccccccacgccccccgggccgccgcggagccggactactccgctggggggcctcgggccgggcgaggcgcgcgactactccccgtcccgaaatcccccggaggtggaggcgcggtag

SEQ ID NO: 23807 - DNA, 1459 bp, Homo Sapiens
ccacgcgtccgcgacactgcgcgcgcctccaggcaccggcgttagcgggtcgccgacccgcaatccccgccgcggctgcttgcctaccggagtgtgcgccggcacctgccgccggagacatgttgcaaaaaccgaggaaccggggccgctctggcggccaggccgagagggacagagactggagccatagcggaaaccccggggcttcgcgggccggggaagacgcccgggttctcagagacggctttgccgaggaggccccgagcacgtcccgcgggccgggcggctcgcaggggtcgcagggcccctcgcctcagggcgcccgccgggcccaggccgcccccgccgtggggcccaggagccagaagcagctggagctgaaagtgtccgagctggtgcagttcttgctgattaaagaccagaagaagattccgatcaagcgggccgacatactgaagcacgtcatcggggactacaaggacatcttccccgacctcttcaaacgggccgccgagcgcctccagtacgtcttcgggtataagctggtggaacttgaacccaagagcaacacttacatcctcatcaacaccctggagcctgtggaggaggatgccgagatgaggggtgaccaaggcacgcccactacgggcctcctgatgatcgtcttagggctcatctttatgaagggcaacaccatcaaggaaactgaagcctgggactttctgcggcgcttaggggtctaccccaccaagaagcatttaattttcggagatccaaagaaactcattactgaggactttgtgcgacagcgttacctggaataccggcggataccccacaccgaccccgtcgactacgaattccagtggggcccgcgaaccaacctggaaaccagcaagatgaaagttcttaagtttgtggccaaggtccataatcaagaccccaaggactggccagcgcagtactgtgaggctttggcagatgaggagaacagggccagacctcagcctagtggcccagctccatcctcttgaaaggtggattcagagggacccccgggacaagggtctgagacccaaaggcacagtttagaggattgggggaagggagaacgaacccagggagcatattgctgtaaacgcttcaatgtgtgtagctttaggatgtgtttgcaaagttttgtttttttaatgttgtgttattttgctccagattttcatctataaacaaaggagcatttgttttgattttactctttttggtataaaaaattttgctagcttagtaaaacgaattggaaaacttgactatgatctggaacagataatgcaagaaggaacacataagtaagttgctttggtgccaagaaaataaaaaagctattatcaggtctcctaactaccccagtttgtaaggaaaaataaaagtttttataaaattaaaaaaaaaaaaaaaaaaa

SEQ ID NO: 23808 - DNA, 29755 bp, Homo Sapiens
  misc_feature (27693)..(27693): n is a, c, g, or t
aaggactttgtaaaagaatatgaaacatcatgttcagaggtttgccaaatgttaatgacaaagctggggatttaaatcagggatattaattatctcgtgtcggtaaaagaactccgtgtgatgagagaatgtgtatatagatagaaaaaaaaggactaaataaaatagatttcgtgatgttaacagtggttatttccaagtaatggaaacaagtgattttcatttttgtttacttgtattttctattttctaataacaaaggtggggggtttctatacaaaacaattcctctactagttcaactatcaggcatttctaggtatagaacaaacactgcgggaggtgtccctctagtggaaggagggatttttaaaaatagtttattgtattgaagtctttgggaggcaaacagaggtctgaagtcagtaaatgattctgcttattccacagccactgcactccagcctgggcaacatatcaacatcctgtctcgggaaagaaaaaaaaaattaaaagaaggatggggagtaatcgcaaaaggaagggccaaaaaccaccctaggaaacaggtgctactaactcttggcgcatttggaatattgaccagtaactttttcaactgtcgatgtcgggggattaagctccttaggcttacttccccttcccttgctttttggcagcttgaggctagggtgccaggggatgtggaaactcaaaagagacgtgaatggagcctgatatctgcaagctacaccgacagggggcgccagcccctacaggtgactccatgaatcttcggctccactcggctcttcttcggctgagttcggccaacgcttgccttctcaggctcggctctcttcggctttctgagagcgcgcctgtcgtggcctcggctcctcttcggctgcgttcggcccacgatcatctcagtctcagctctcctcggctacgttcggctggctgccgtcctctcggactcggctctcttcggttgagttcggcctactctccactaggagtcggcttccttcggctgcgttcggctgcgacccggaagagcttccatggagtcagggcagccggctcgacggattgccatggcgccgctgctggagtacgagcgacagctggtgctggaactgctcgacactgacgggctagtagtgtgcgcccgcgggctcggcgcggaccggctcctctaccactttctccagctgcactgccacccagcctgcctggtgctggtgctcaacacgcagccggccgaggaggtgcggccgcgctggcgcgggagtgaggggactccgagagtgttgagggcctcctgagcggatgcgaggcctctgacagggatggaggggctctgagggggattcaggcccctgacactacgcgatgacaccagagaaggatggcaggggtccccagggggatgcaggtccctcacactgcgggaacacagacgtatgtaaggggtcgctaggaggataccggtcgctcacaccgtgcggggacactgataagaattggaggggccccgagaaggctgcaggtccctggcaggagttgaagaacactaagaggaatgccagtccctgacactgtgcggggactctgagagggaagggaggggtcccaagaaggatgcaagtctttgaccagagttcaagaacactaagagaaatgggaggggtccccaggggatgcgggtccctgacactgtgcaggcacagtgagaatgatggaaggggtcccgagaaggatgcaattccctgacaacactaagagggatgggaggggtccccagaaggatgcaggtccctgacatgggtgcaagggcactgaaaggtgaaggggctctgagtggtaggagaggatcggaggtcgctgcaggggagggggagatgtcggaaggaggatctggataggaataacgggagagtcctgaagttggccattaagggagtttctgggggcagaaggaaggtccctgaaagggaacagtgatgaggatggaagatctctgagggtgatggggagacatgaaaggagatgctgaggcgctggaaaaaccccaatagggaaaaggagggaccaggaaataggacattcaccaaggctgtgttaagagggccatagggtcagaaagggattggagcttgacgctgaggatgttggcaaaggttaactacagttaaggacaatggagaacactgagaaagatggaatggggctacacatgggtctgaggggtgttgagaggggacacagcttggtcggacaagtctgatgatcccctagatatatcaggtggccgggagaaaaatgtcagctgagaagagtgaccacagtctctttgagggcagggatcctgtttgattcatctaggtatccccagtgcttggcatagggcctaaggcaacacacagggcctagtaaagatggttttaaactggggatataaataaaccaagccaagggacccagtgacatgaagtccctctaggatagattagcacagaactgatagtctaaaacattgtctggggaaaggattcccttgttatcatctcatagaatgtgcttggctacaaacctggctttggtgggaagtattttctaggtagcagaaatcttttaatccaggcttttaaaagtttgaggttttgtatgtgtgtgcatatgttattgtagttgagtgctgataatgactgaagtgcaattattccttagtgtaaaccccaaaacaagaaaacctcattaaatgtagactggttggctgaagttactataaagaagtaacttagtgtgtatattcattattaagttcattatctcagagaaagacagcacattattttaaatatctgtgacctattaaaaactgccctgtattaaatagcctactaatcaagtttgatttgatttaggagtattttatcaatcagctgaagatagaaggagttgaacacctccctcgccgtgtaacaaatgaaatcacaagcaacagtcgctatgaagtttacacacaaggtggtgttatatttgcgacaagtaggatacttgtggttgacttcttgactgatagaataccttcagatttaattactggtaagaatttgaaatcttattattagtatgtaaatttgtacttttttttttttaagtacaatttccattttatttttctccagagaatagtctgtcttcagtcttgaaggactcagctccctacatcacctttggtaggggtcgtggggcagcacccacaggtctaaatctgggtgggggtgttcggtccttgcaggcttcacaagatcgattcctgactactttgttgtgaattgcacaactcacacagtaatttagcttcacatacatcttgggaagcacataggcgtcgaagatgctcgcttcagaaatgtccctgactgctgtggcctccactgtgttttgaatgacgaatttcttaatggctttatccttgggcacacatcaggcacagttcgtgcagcaaataggctgcacatggccgcagccctttttggcatgaccgttgtcctttcttttctttgtcatcttggaggcacggaccggagagggtattttctacatttttatttttgtctgtctcctctgctgaacgctctactagaaccttctagtgggcactactggatccttttgttcaacattatgcttccaactttcagcatgatacctgacacattgtagatgctcagtaaatatctgtgacctgaataagtaactaaatgttagattaacttttcattgttttctaagctcttattcagtaaatacttgcaattcgttagcatttgcttttagaacttaatcagatttgaaatgtttataaataatctttgtatatttcctaaaatatttagttttcctccttaagattttttttggcattatttgaaattaaatcaagtagttgcttgcttattttgaggaaaaattattttagctagaattaaatagaaaagaaattcattttcattatcctttcaaaaccttttctgatgtccccaaagctaatgtaggggctgtgcctctgtgccctcatattaccctgtatttctccccagtcatagtgctcacaacactacattatatttatgtgtttgtctatctcactcacaagataagctgaagcacaaggaacaagttgttcatcccaggctaaataactggtacatggtaggcactaaagacgtatttgttgggtgaatgatggatggatatagtactgtgatcgttagtgaacttctggaggcagagagactctgaaattcataatcttacttcccactgtatctgtcatgttgccctgaacctagatgaccctcaagaaaaatttgataaataaatgtgtcaatgaatgcttcaatggtaaaccgactgaagaagtttggttactcttttataacttttataattgttataaacagtatcataggctcacctggttttgaatgctaacaccctgcttacaaagcaaactccttaattttcattaaccccagttttctcattaagaaaacagtgcttcctgaagttattataaggattaagttaataaaataatttcttagtatagtgcctggtacacaacaaactcttagtaattcataccaaataaaattggccttttgtaaccagaaatcttgatacaccagtcttttactgtttgctgctttcttataagcttggttttactttattttttaaattgatttaaaaaaatttttttgttgtgtttaaaactaccactaggtgtcagtaatatcctgtgactttcagttacagtgcaacctaattaggcagagagcaatgtgaatttatgcaacgttgaagtctggcttatctgtagctcctaatgaaaaatgccaaattccctcctcctttctgatcaaagcccaccgaataatgaagctggagctgttactgatgcttggctgagtggaatgtaaatgaatgccaaaaatgaattcttttgaattctttcatcccctgggatcatcccccaggactgaccaaagagcagtgcgtgaagtgcaggtaaccctctggaaaggctgaatcccccagccccaacttcttcacctgtcaccacccattattaccaccacaccccaccctgggaatccctgctaaccagaactcctaacacgtgggagaactatataaatatctggtgaggttgtaccttgaaaagaacaggacaggaggatgctttcattgccaaaactgaccctgacatctccagacagaactaagaacacactttctgggaaatatatatgtatttttcagttacacttttgatttgtgtacccagtgctgtgcctccactttatattcattcaacaaatatttaactcactaagggtcccttgtttggcaggaagggtgctgaagatagacagatgaatgggacagtatggtgaactcgtgagttagactgcttctgggtttgagttatcttcatcttgcaccagctgtgtatttttaggcaagtttcttaatttctctatgcctcagcttactcacccgtacattggtgataaagatagtaccttcctcctaggattgtcagggtgaaatgaaatgcttatatgtaaaatacttggtagcatggcacatagtcagcattctatgatctctgtgatctctgcctgttggtgttacgatgttcctgttctcgggcagtttaatggaggagacaagtaaagaagtagttatagtacagtatgggtacaaaatgtcataggaacaaaaaaaactaaagtaggcttttgtggagctaaaactcctcccaaaaacctaacctgcttctattatttttattttttgaaaaaggagtgtcttgagttggtgtgactaaataggaataacatgattttacacatgatttggaaccttcggcctcccacttgcttgctggatgaccttggttaaaagttgcttcccttccttggtctcatcatgatacctactgcatggaattatcataacaattaaatgaaatgaaaatctatagaaacacctaacccagttacctgggatgtagtatcagttctcttcttcctcctgggttccaaccaaaataaagacaactttttggagcgcaacattttcttaaattgagtttctccttttctttggaagttcatttttattattcttgactctacgtaatatttcaatccaggctaacaaaatgtggcctcttagagtccttgggaaaacccaccaattaggtacagaatattttctgagtagtaaattagttatgtacgtgtattgggggggttattgaaaatcctttgtctatgaattcctaaataacattattaatttttactatatttggaagataatttgctgagctagagtaaatttagctccatccacctctatccaaaacttaaaacattaaaatagtaaaatctgagtttagtttattgaactattagaagggtcataaatcactgttagtattattgtccatacccttccagatatgagaactggatcaaaagcatgcaagtaccattatgccaaatatatataaggtaaccagcttgatttaggtctaaaagacagactcgtcttggagtaattgtggttttgatctagaaagcatgtctgtatgcctttatgtcatctcatgtttctccctaacttagcactaatcacactgcatcagatgacacaatatatatgaaagatctgggtcagtagtctcatttcataaataacaaagcatgtataattgttcttatttttgagatgctgaggtgttataatcatgtacacccccaaagacatgtataagtatgtcgattgaaggtttttgttttaaatggactaatttacctctgaattgactatcttctgattctgaaaattgaattcatctcataggtaatgtagatgttgcccagacttctaaaatgtggctattttgtatagtccacatctgattcatacattaaaaaaaaaaaattcatgacctactttgctttcagaaattcttcctctgacatgccagaaacaccccaccccagggcctgtgccctcactgtcccctcagcctggcagcctggaactctcttggcccagatggtcacaaggctccatccagcctttattcagataccaccttggtgagaccacccctcatacatactccctctcctccttctctgattcattttttcttctcagcacttgtagcatcctaaatattttacgtatttatattgtttatagtcaattccttgaggacagggatttatctctgttctgtgcgtggctatatgcccagtctagaatggtgcttattcattctcttgtaagtacttaagaaaaatgtgatgaatgaatggcaattacctacctgttctgtagtttaaattatgtttctccccctcaggcatcttggtgtatagagcccacagaataatcgagtcttgtcaagaagcattcatcttgcgcctctttcgccagaaaaacaaacgtggttttattaaagctttcacagacaatgctgttgcctttgatactggtttttgtcatgtggaaagagtgatgagaaatctttttgtgaggaaactgtatctgtggccaaggtaaagaacattatgtgacaaataatgatgacattatttgtcatctttgtttgtgagatctactgtaacttagttgcactttgatgtaatataatgtaaaattcattgtaattttgtttgatagaacctagtcagttttataacaaacacatccagctataaatatgtattcaccaagtttgtggttttatttaagtcgagagcaatttgatggttgcttttctgctggtccatcacatccatccaagacagccactttattctttcttacacatttagggaaactcccagggatctagagacccacatatacaacagctttaggtgtacagcagatttattggctaacattaccacttctgctttgaaaattactcaacagggaaataaagcacaaaggttttgaagaagttttattaatttctaggaataacattaaggtttcagttttcaaacatttttgcaacctatgctaccatgtattttggttataatatatgttattttgagagtagttgtacaccgggtgcagtggcttacgcctgtaatcccagcgctttgggaggccaaggcaggcggatcacctgaggtcaggagttcgagaccagcctggtcaacatggtgaaaccctgtctctactataaatacaaaaattagccaggcgtgttggcacatgcctgtagtcccagctacttgggaggctgaggcaggagaatcacttgaacccaggaggcagaggttgcagtgagctgagatcgcaccattgcactccagcctgggcaacgagcgaaactccatctcaaaaaaaaaaaaaaaaaaaaaagagtagttatagtatttttaactttcttgattataccttgttttaggagtcaacaaactcttcatgtaaatggccaggtagtaaatattttgggctttgcaggccatatagactgtcacaattactcaactctgttattgcccaaaaacaagtatagactgcttacataagtaatggtgtgactgcattccagtgagactatagaaacaggtacaggatttggcccagaccgtagtttgctgaccctttccttatctgaataatacactgcttctattcattgaggttcaaagtgtttttgaaaatgttgttgctttgcttttcatttgtttgttgttttgcttttcgtgttgtttgtagcatttataaaaatggggtgttaaaccaagaccagaaatacatagctgctgaaactctagaaaattgttgaaaaatatttgtctctttaggttccatgtagcagtaaactcatttttagaacagcacaaacctgaagttgtagaaatccatgtttctatgacacctaccatgcttgctatacagactgctatactggacattttaaatgcatgtctaaaggaactaaaatgccataacccatcgcttgaagtggaagatttatctttagaaaatgctattggaaaaccttttgacaaggtactctttttccttttaagcacagtttattatgttgtaattttaaagaatgcaagttattttaatatttgcaatgttgttaataggaatttgctgttatttaagaataaaattggaggtcacttaaaaacatagcttctttggtttactggaaagtaataatttatagtaaagtatgtggattggcatataagcatcactctgacttttgcagttatagtaagtgattatctcttattttaactataatcaagaagaaaataaataactttttttactttgaaatgacaacacttggatgtctacaggtagaagagttttacataagaatgctccataattgtacatgaatttatgatctcttttatggaataaaaaataatttggatgagttttcattactgaggagtgtgaaacttgctctgtcttaaaattacattctgaattgaggaaatggtaagacatcagttccaggaatttttattctaactaattttttattatagattaatattgcagatatataaatgtctactttttcattatagattaatattattacagatacataaacgtctagtattgaattggagatccagaaaatgctgaccttttagaaattcttggcagcctttttgtcatattctggtagaaaaagtttctgtcttttaaactctgagtcaatctctatgtcactggcaataatgcgtggcgattataaaaaaggaaaaaattgacttatttctctgattcttcaaaaaagtcagttgactatgaatattgatacataaaactaattttatatattctgttcctctgtgcttaaagttttttatgatttagtccatggtgattttttttaaatcccacacaatcttttaatagaatgtgtatatccctagaaaaataaaattgtagcctaacatgtttcacactgaatttctgttgattatcccccggttagtaacagtcacttcattgttttagatattcttttagtaaccatatctaaatatagatatcccatgtgtcttgttaaaatgtttaatattttgtagatgattttacaaaaaaggcatgtagttatatatcccagtttgttcaggatagtcccagtatctacctgttgtcctgcagtgattataaatagtgtatcatttctttttccacaagtgttctggtttagacaataaactatacagtcatccagatacttctcctgctcattattaaatttgttagataagattccgtgcaatggtactgcttttatatcaggctacaaatttctgattaaaaatcagataattctgtacctaaaaagtaacagaatcagtctgtgaaggaaacatacatatacatagctgtggatatgtaggtacctacatagtgtatacataaagctgttctttgttttagacagcattttggaatcttaaaaaataattggccgggtgcggtggctcacgcctgtaatcccagcactttgggaggccgaggcgggcagatcatgaggtcaggagatcgagaccatcctggctaacacggtgaaacctcgtctctactaaaaatacaaaaaatgagctgggcgtggtggcaacgcctgtagtcccagctacttgggaggctgaggcaggataatggcacgaacctgggaggcggaggttgcagtgagccgagattgtgccactgcactcgagcctggctacagagtgagactccatctcaaaataataataataataatcaaacttagtccattgttaatttaacaaatattttcctatcatgaatccactttagaaaaaacactaaagaaatttttacaccaacaaattatggtacgttgttatttaatttgataattcttatttaatttgtacatgggcatcaaactaaatttttcatttcttggttataccttattttaaaggtcaaaaaacatgatactcatgtacaaattaaatagcaatgtaccttaatttgttagtaagccatcgtgcttgtgtatgccctctgcttggtccatttggatcccatgtctttatccatccaggatagtcagagtcaaacttggcaggaattgaacatatctgagctacatgcttagattctgttcataaaaacaaataattgattatctgatgtttataaggtcttttctcccctgacagtaatatatatttggatgatagattgactctatctgatcataaagattctagcagtaagacattcttctatatttgaaaatttaaacattattattagaattttattaactgaaatgttctagccacttccttgaataatgcttgcagtttttttattgtagtaaaatatatatgacataaaatttaccattttaaccatttttagatacacaggaaataatccttttgaaagtatgatttgtattaagaataactatacttaacatattttagcaataccaaattttattcttgttttagacaatccgccattatctggatcctttgtggcaccagcttggagccaagactaaatccttagttcaggatttgaagatattacgaactttgctgcagtatctctctcagtatgattgtgtcacatttcttaatcttctggaatctctgagagcaacggaaaaagcttttggtcagaattcaggtgggagattaaaatactaataatattctaagagctgatttgaataaagtgttaggttttagggggaatcaggtgtgaaaagtgctatattcaactatatgttatactgagatttcaaattatgttttatgttcatagcacaaagatgtaggttttattgatagctaatgtttccgcctacttaacgtctgttctgtataataataaatattcatatccgttccgggcaattttatttctagaaaagactgtgtgtagtacaggcagtcctcaacttagaaataggttgtgttctggaagtttagttgttaagaacttaaaattcattttcctcaaagcaaaagcaagggagtatggggcttccatcagctagagtgccaaagactgaagagcagaagagattttagggaaatatacatatacagctggccaccatctcgtttggctaccactgttttggcctctgtcactgtttgaccagaccagcggttttcaaagtgtggtccgtgaacccctggggtcaagatttaatacagttaataattctgatggttctttagggacattcttaagtgatgaactgcagaagcatgacagtaaagaatgcactgaatgccagtacactttcatggcactgccttggttcatgctacggcaccagcatgtacaattatggagcattcttatgtaaaactcttctacctgtagatatccaaatgttgtcatttcaaagtaaaaaatgttatttattttcctcttgattatagttaaaataagagataaccacttactatataactgcaaaagtcagagtgatgcttatatgccaatccacatattttcctataaattattactttccagtaaaccaaagaagctgtgttttaaatgacctccaattttattcttaaataacagcaaattcctattaacaacattgcaaatattaaaataacttgcttttacgccatcactggaaatgtcaacgcagtgaaaaaagtcaaataatgtcatggtattgttacgagaaaagttctgacatcacatagccctgaaaatatcttgggggcccctgggagttcacggaccacacccagaaaaccactggtccagctgaacagcgacagatcacagtagtgggaggcggtgtggttggtaggaagacaggatgacagccagttacgtatgtaggtcatgtgaccatcagagactgttttaaattaaccataaattgatggcactttttcttttaacttttcatattaggttggctgtttcttgactccagcacctcgatgtttataaatgctcgagcaagggtttatcatcttccagatgccaaaatgagtaaaaaagaaaaaatatctgaaaaaatggaaattaaagaaggggaaggtatcttgtggggttaagtctttaaatgtgttttttatttcggtatttggtatggaaatttaaagtgcaatttaaagtcttctttggccatgtgaaaagtgtgttccttgaagataaatgtatgtatgtttgttatatgtaacatgtaatgtatgttgaaagtatatatgtaaagtatatgtgtaatgtatgtcgaagtatacagcatggcaagtcttgcagtctattgcccagggcttccaaataacagatgtcaaatattgatcaaaagtatgctacatgaggagctatatattgatttttttagaacttcaaagtaattattatttttgagtcagaatgaggttggggcatggtggcacacacctataatcccagccctttgggaggccgaggcaggaggattgcttgagcccgggagttcaagaccatcctgggcaacaaagcaagactccatctctacaaaaaaaattttaaggctgggctcagtggctcacgtctgtaatcccagcactttgggaggctgaggcaggccgatcacctgaggtcaggagtttgagaccagcctggccaatatggtgaaaccccgtctctattaaaaataccaaaaattagccaggcgtggtggcgggcacctgtaatcccagctactcaggaggctgaggcaggagaatcacttgaacccaggaggcggaggttgcagtgagctgagatcacactactgcactccagcctgggcaacagagtgagactcggtctcaaaaaaaaaaaaaaaaaaaaacacaaaaacttttaaagtagcctggcgaggtgatgtgcacttatcgtctcagctacttgagaggctaaggtgagcccaggagttgaaggtgacaccaagatatgatcacaccactatactccagcctgggtgacagagtacgactgtgtctcaaaactaataaataaagtcaggatggaatatttgaatatcctttttaatttttaagcaacataaatatactagaatgaggcaaatatgggttttattccagcatcttatctagtgataccgtaaatatcactagttttttaaggcatgggatagggttaatgcctgctttctgcctagtttaaaggtctgtttcaaaacttaactgaggccgggcgcggtggctcatgcctgtaatcccagtactttgggaagccagtgcaggtggatcacctgaggtcaggagttcgagactagcctgaccaacatggtgaaatcctctctctactaaaaatacaaaattagccaggagtggtggcacatgcctgtaatcccagctacttgggaggctgaggcaggagacttgcttgaacccaggaggcagaggttgcaacgagccgagatcatgccattgcctccagcctgggcagtaagagtgaaacttcgtcttaaaaaaaaaaaatctttttaaagaaaacttaattgaatatattattgatgtgtttgtgtttgaatgcgtataggaacaaaaaatttaattgttgtctacttttatccatgttcaggattatgaaagtcatggggattttagaaatagtaaatactgtcattgtgtaccgatgcctttgttttgtatagctgcttatatatagtgtcacagaaacaactaacacagaatggtctctcattagtgaccatgcatataactttctaccaaggcattttgaaagccatattaatggtttgaagtatctttcatttacaccttaagtagatctttttcaggaaagcagattccatctaacattataaagaaagcttaaataaatgggcatatgtactgatgctcgtgttatctgttgttttaaaagcctttggaagactttatgggtaaatattatcacatagaatgagatatttttatttctctacagaaacaaaaaaggaactggtcctagaaagcaacccaaagtgggaggcactgactgaagtattaaaagaaattgaggcagaaaataaggagagtgaagctcttggtggtccaggtaggaaaaaaggagatgaaaacatttgcttccaaaatctatcaaatgagtcctgatttaattagctctttaaaagtagttcaagactagcctgaccaacatggtgaaaccctgtctctattttaaaacactgctattttatctataaaatgtagacaaataaatggcaaatgaacactgagatcctagtggcaacctcatttctgttcgtttgatgttgttttctccaggttgaatcattgtatattcatgaaagcaggtttttaaactagttgggttcttagaacttctatttaaagattgagctaatctctacacatattcaccaagctttaaatctggaatccccaaggaataaactaatgggtctcctgttttatatcctcagccaagtatctttccaaaaaagcctcaactcttctattacttcaatatgtaatgagccggtacaaactgaagacattgtctaaattggcagaggagactaacacaattcacaaaagaggaaaaatccatttggaattaatttaggcatatatgagatcctctggaaaaaaatattaattaaaaagaacttctttaaagccccaattacaccacagttgtactttcataagattaaatagtctggcttcaactttactgaaaagatttaagtaatcttgccagagaggagaaagcatttgatcaatacctaagaccctttttaaatagtttgtaaattgtggatctttaataccaaagggtaagatgtcttcccttcgggtgaaggaataagggggcacagggaaactaggaggacaagtgaggtaatagtaacataatgttgttttctattttcaggtcaagtactgatttgtgcaagtgatgaccgaacatgttcccagctgagagactatatcactcttggagcggaggccttcttattgaggctctacaggaaaacctttgagaaggatagcaaagctgaagaagtctggatgaaatttaggaaggaagacagttcaaagagaattaggaaatctcacaaaagacctaaagacccccaaaacaaagaacgggcttctaccaaagaaagaaccctcaaaaagaaaaaacggaagttgaccttaactcaaatggtaggaaaacctgaagaactggaagaggaaggagatgtcgaggaaggatatcgtcgagaaataagcagtagcccagaaagctgcccggaagaaattaagcatgaagaatttgatgtaaatttgtcatcggatgctgctttcggaatcctgaaagaacccctcactatcatccatccgcttctgggttgcagcgacccctatgctctgacaagggtactacatgaagtggagccaagatacgtggttctttatgacgcagagctaacctttgttcggcagcttgaaatttacagggcgagtaggcctgggaaacctctgaggcaagttataaagaatcacagctttcagttgcacagttctttaggatttaacccagaaactataccagttgcatgttagttttctttaatatccgttacgatgctgcttatgtttatgaaaccttattttgcttcctgatgaatctgggaagttggataggaaggatgtcaagtatcacagcagaacaacaaaccaaggggactgctcttgttctcgttacgtgctgctgtgcgttctctcctttattctttgggtattggtttgcatcgtatggggtactgtatctgaaaaagtctgggaaatgcataatattctaatttctaacaaaagttaatataactgtgactcggctaagtaattttaatcttctaaaatatctttcctataaattttaagaaatgactctaaattacatccatataaaactaaagtgttgggggaattactgtaccaggttttcttgagtttcaagatatatcagatgaaacatctacagaaatatcagatgagaaaatgatgcctcccaaagaagatagtgttctggctttccaattatctgaggggaaataaacagcaaaattaatatcctgaactcagtctgaaccaaaaacggagccaaaagaaaccttcccctagcattttaactaacacagcctttcagagtagagatgaatggaggagctggatcagaaataatgcaggatgaagagattagatgaggctggtaaaataattataggctggtaaattttttgtaccgtgctgttgatcaactttgtagatagcttatgtacaccaagcttctttcttgcctgagaacagaatagtgtggtatttgggagcaaaatgttagaatcagaagggacctgggagttcaaccacttactctatcaacgggaaactgaggcccagaaatggtgactgagttggccttggccacatgacacatccgtgggagagctgagtctcttgactcatcacccaatgatcttttctctgtttacacttcaaagaattatcatctaggaagataacagctaaaagaaaaaccaaggctcaaaaaggaaaatagctttgactgaaggtgaagcaaagggacagaggaggtgcttaattcagctctcttagcaacaaacaagatggaaaagcaggccttttttttttttcctttttttttttttctttgaggcagtgtcttgcccagatgcccagactggagtgcagtgttgcaatcatggctcactgcagcctcaacacctccccctttccctgactcacgtgattctcccacatcagccccaagtggctgggactacaggcatgtgccaccatgctcaactaattttttttttttttttgtagagatggggtctcagtatattacccaggctgatcttctgagctcaaatgatcctcccacctcagccccccaaagtgctgggattacaggtgtgagccaccgtgcccagcctaaaaaccaggacttttctaagagaaagtagatcaaattattctttgagatgcctgatgtaatccatacgtcttccatgcccatgtatttatataaaatgtgtgaccgctgtattctgttaagacatgaattaaaaaaaacgttcataggctggttttcataactactgtccaactttttaaatgattgtttggctgaggtacaaagaaagaattggagaagcctctaaaatttgtgtgtttttctgtttgtttatagttatgaggagagaattattctatccctctagttatatttcagtgtttacctaaactcgtttcttccttttggcaaaagaaaataaaaaatgccctgtgtggtaacgagacctttaacaggtggggtttaggcagcttaatttgagctagtgtgtgataaatgaaacctttgattcttagtcaaatatttattatttgagcgctctaggttgctgatttcacatgttctgctgttcctttcagggattaaaaatgctgtttttccaacctaaaagttctgtcttaacatgcagggtttactttcttatatacggaggttcaactgaggaacaacgctatctcactgctttgcggaaagaaaaggaagcttttgaaaaactcataaggtaatacatagaaaatcagtatgaaagccccaactacattggaaacctctggatgggggaatatcagatagtcctgctcaggaaggatagggcaaggaagacgttggagaggatcacattgagataaacctgtggtctgaattgtcctccagtgtagatctcagcacatacttcctttttctcttccccgtctcttccttcatctccagttgcttttcagtggtttgtttaatagaatattagaaatgtgacaaagacaactgcttttttgtttgtgaagcagtatgataaaacacgagaaatatagctaaaatactgcttttctaagaaatacattagtaaatctccctcctccctgccttatgcacaatatgtccttgggtgggtggctgctttaccgtttattgggaaatgcttttacaacacagccaattatgatcaccatcaatagaatcactctgggaaaatatttcttaggaagtgtgttgtttgtctggacatacacgtgtatgtttttaagaatgagtatctggtactattccaaatccaagtagaaaatgcccttccattttacgaaaggaaaatggtgagatgttcacaaactggttggctacctcttgccctgaaggcattcgataaatctgataaccacctaccagggatattgtcaagaagattgcagcctggtgtgggaagatgggccagataatctctaagggcctcagaagccagggcaagtgctggatggggcatcacagagctgagccagagaaagttagatcagcagagaccatggcctggacggagtgggctgggccagagcaaacttccaagcctcagacattggcaatggagggcagaaattatttttagcagtagtcaacctgcgaggactgccaagaccctaggccaaatttcaaaatggataaccattctgcagtggtggctgcgggttctcagtgtatgtgcaaaatatacatataacctggatagcccaggagaagaattcttggaaatgggggtatttgctgaatcagtggcatggagtcccacgatgggggtcagcatggtgcatgggcggtcccctcttttcccttcacatcctctcgaatggtgatatgccttggccatggattcatccagctgctagtcatacaagtattgctcagtcctctcagcctatgaaaatatgtttcctaccagtgtgctctatgggattgtttatgtcgtatatgtgggtatatatatttttcaaaaacctagttcagaaatcgtgttataacagaccaggcattataccagccgcctcttgttccaggctctttgctcctctctgtcttactctttgtctgctagaccttcacgccacaaggctcaaagagtaaacaggtatttattaagcatctggtatgtgccaggccctgtgctaatattaaagtgctgaggttacaagtggtgcagaaaaagcctctgccctcctggaacttaccctttagtggaaaagacagacattaaattattataaatattgtaataagtagaggtatacagagcaccgctggctgcaaaggtaaaagaagagggtgtaataggagagtacatcaaagacctcacccagaccacaagctgatcgggagccgcttccctgaggaaatgatattcaagctgatactaggcagatggggtggaaagggggttatgttgaacaaaggcgtgcacgaaggctcccaggtacaagaggccctgtaaaggatttagggcttcacgggcagtaagaccgcactgaagcattctaagtaggaaagggacttaggtatgtttgtaaaggctttctctggcatcaagctgaggagtgagtgagggtggaaaccagtcagaatgctagtgcagtctgatgggagaaggtggtagccaagattaggttaatggaggaaagaagacagatttgagagagatttgggagatagaatcaaagaattggtgatactggatgtgggccagtacctcctgaccattccttcactctttttagaacagcctttgcccaagttttcgctcattaaaataattgtcacctagatagaaatgagtgcacagagctaaaatactcagattgggttttcagtgttcatgtcagggttccccaagatcatcctcaggctcgatgattcactagaactcacatgagtcagaaaaggtgttatactcacaatacagtttcttccagcaaaaggatacagattaagactggatgcagtggctcacgcctgtaatcccagcacttttgggaggccaaggcgggcagatcacttgaagtcaggagttcacgaccagcctggccaacatggtgaaaccctgcctctactaaaaatgcaaaaattagccaggagtggtggcgcatgcctgtaatcccagctacccgggaggctaaggtgggagaatcactcaaaccccaggaggtggaggttgcagtgagcttagatcgtgccactgcactccagcctgggcaaccgagtgacccccgtctcaaaaaaaaaaaagaaaaaaaagattaaaatcagcaaagggaaaaggcacatggggcaaagtccaggtaaaaccaggcctaagcttccaggtgtcctctcccagtggagtcacatggatgtgctgagtcctcccagcaacagtgtgtgaccacacatgcaaagtgttgtcaacagggaaactcacctgagccttgagtccccacatttttactgagctgagtcacatagacacagagtacctccatggctggctacagctcctcagactccagcccccaaagcagcaacagacatttacgataaatcacatcgtcagcataaactatctgatccagctggcacattgtgacccaaggcctcaggcatataaaaaccttatcagggagaatactccaggggctcagagctcatctcccaggagctgaccaagagccagtgttgaggagagaagcctttcttggaaacatgcagagtttgagcagcccaggcctgctgagttaatcctttcctgcacagcgttagagccagaggagcctgatagaatgggaggaagacagcacctgagtaggtgagtttcttgcttcgcctgtcttcatgcagctgcctcttctccagtgcatcagggaatctaatctagaaaagagcacttttagtagatagtagtaaggtaccagatcccatgccattcctgatttatgcacctgcttctacacatcaaaggactcagtgacaagatgtggattagccttatacatactggaaaacctcactcagcagaacctggatcatggactctctcccacatttcaatccatagaaaaatttctgcaccaggttttaacataattttatctgttatctggcataatttttaatgctttcaatgatgattgtctacttgtcataaataagatcttcccattttacccagcagtcaatcagatagttgcactgttaagaatcttaagatacttactttcccaggaaacttgggaaatttgagaggtgcttcttttgcaaagcaaaaacatatttgaggtgcattgttcaaaaaacatttgcactgtgtacttaagagaaaaatttaatatgaagatgagacaatgtgcttttaccaagacctccatgggtgatgttgtaagaacaaaagcagttgtggctctttaaccagaaaggaacaaatcaggtgaactgacagtgaaaggattgtttagctggattaaagatctgtagattatagataacagataaagtggaaaagattacactgctaaatatcataataattttatttctacccagggacgtaaaatgctccctgggtagaaaacttagtaataacatcctcagtatacatagctttgaggaggtcactgcttttcaaaggaaagggtaagattatttgaaattttactttttgaaaatacgatcacaaaatgggctagcatgagggcttaagtaaatgcccattggaagagacttctagttcagtgctactttcctatgttgccataggattatgttgtacacggtattcaaataacattgaagactgggtgcagtggctcacgcctgtaatcccagcaccttggaaggccaaggcgagaggatcacttgagcccaggagctcaagaccaccatgggcaacatgtgagaatccatctcaatttgtttaaaaattaaaataaaataaattttaataaaaataccattgaagatactaaagcaaacataggaaagcttggtgctttaagcagaaataggaatctgaattttttaattgttttgtgtctgtcacataggggaacttggataattatgccacatgttgaaagcaagagactggctgtttataattacgatacatttctgttaaactgaattactgcttaggaaggcttattttcttcatagtccaggtttcatctcgaatatattttttctcacattcgacttgtagttaagttataacatttagtggtaaactagctgttttctgtagctattaatggaaacaattgtggaattatttgaaagcaaatcttcagttttttagtataatcatggataattagacgaagagattaccacgttataagaaaagtacagtaataataacacctaacatttatatagtgcttactaggtgccaggcactgttctgagcgccttgcatatgttatgtaatcctcataacagtcttttgaggtaagtttttaaattattatcctcattttaccaataaagaagttgaagtacagagccatgaaatgacttgcctaaggtcacgtggccagtaaatggtttcagatccacacactttggaaccggaatctgtactctaaccccctaagattatacagactacaaattaatcaggaaattgggatgatcccatgtgtgatatacagcttagccagtgtaacaagtagaaacaaagtgggggacacaacataataataccaaatgaatgttaaggaaaaatagaagagcagtaatttttttgaatggtctgccctttgtcctaaccagagtgcaatagagagaatggagtggtaatgagtggcagccagagccattgccattgcagagggcttttcagcaggtagcgcttgagtctggtattgagaataatgagaaaaacatggaactgaaaccattgtctgcccccttgtgatctacttataaaatttgtactaataatatatttgcatttataggttgtttcaaatagtataaaattttaaattacaatttctgttctttagtagtatcttctagtgataccctgctctaaaatatttatccagagtggttgaagaattgaaccctctgatttcatttcctctaatgggtgtattagtccattttcatattgctatgaagaaataccccagacttggtaatttataaagaaaagaggtttagttgattcacaagtttcacatggctggggaggccttgggaaacttacaatcatggcagaaggggaagcaaacttgtccttcttcacatggcagcaggagagagaatgagtgccagcaggacaaatgccagacacttctaaaaccatcagatctcgtgagaactcactcactatcatgagaataacatgggggaaaccacccccatgactcaatcacttcccaccaggtcccttccaggacacatggggattatcggaactattaattcaagatgagatttgcgtggggacccagccagaccatatcaatgggaaaatcttggttgttttaacccttgttgaaattaattaacattgatggttcctcttctgttcccctcaccttagtctgttttatcgcagttcctcagttccagttgtttttttttttcttctcatgtttgctttgttccctcgacatcagttgtgaacccaagcagggaaggagactcagcttatatatcttttctgtcatacctggcagaattaattataacatactttatcaattttgaaaaataaggctaccgcaaacctggcttactctttctgtgattattgaggatcttgtcatgatgtagttccaaattgcgaatcttagttatgattgtactgtcctctagatctaccgtataagatatgagccaccttgaagacaggaattcttgcgtgatcacgattatatccaaagtacctagagcaccacgcaggaacactccataaatgtttttcaataaatgcatgagtgagtaatgaatgctgctcccaaggcataacctgagctgttgattttttgttttaatctctgatagaaatttgatttcttatatctatttcaaaatcttgatcttgattttcctttaaaactcagggtgtttaatgggacctcccacctggagtttttaacatcaaaattctatcatatatgttttttagtttcttaatgatttttaaccacccctatttgtgattaccctgaaaatgtttgaatataaatgatttacatttacactttaaccttacaaacagtctcaagaatctcttggtggcattttttacatgtggcattttttgacatgcttgtgttgtttcttaaatatttgaatataaagtcaaaataaacaactgctttttttactctggaaaatcaagaagtagtatccgaccaaggcactttttactgactttttctacttcctttacccatcatttgtcttggcatatttacttctaatatattccttgtttttgtttttgtttttctcttactgctatcatcatgtagatcattttcaatactacaatttacacacaataaaatctagaattttgaaatttgtttcagaagtgttgacaatgttttctcccacagggaaaaagcaagcatggttgtccctgaagaaagagaaggcagagatgaaacaaacttagacctagtaagaggcacagcatctgcagatgtttccactgacactcggaaagccggtgagtcctgcactttgtcaggcacctccattgcctgcaaagggggctgtgaagttccagagttactctgccaaggcttggtctgtattaacaaactcttaaaaatgggggttgggccaaggagaggatgtgtacttccctactctaatctcagctctgccattcactaaccatgtgtcctccccagagtgaaggcactgtgtcatctgcgaatcatgtgaggttgagttttaggcaccccagcttagaatgggttatgttccagcatttcctttatatttggttggttgagactcagaatgtacttttgcaaataaactttgttaaacggtgattaggttcttatctcaacctaaaaagccagtttaactcagagtagttaaaggaagtttctccttccctcctctgcctctccccttagttgtatacataggtggggtgcatacactcctcctctccttctgtattcatttcttcttggtagctccccagatacctggtgtctggtacgcattgctgtgcagtgtccaaactgtggcatgccaccaagacctgctgaattccaagtgcactgtgatccagaagtcaccattttcccattccccaaattcctattttcctatgccagcagctgatttcagccaggtggcatgagaaaagcaatacgattgagttggtttaaccttcggtgaggccaagtacagttgaagcagtgggtgtcagaatttagtagactttagaataacctcagatgctcattaaaactgtagattcataaccctcaattcatagaaattccaactcagtggatgtgaaatggagccagcagctcgggggcttctgatggaagtggtttttggaccatactttgggaaacattgcctcagagcctctgtgtcttgttcaaagaagattctttgaaatatcaaccaggttgttgacatttcatgaagaacgacagaatgtaaggcagtatgggtaccacacagagagctgttcgtagaagtctttccttagagatcagttctccacgccttcatattagttgcctatggctgctataacgaattaccccagacttagtggctcaaaacagcacacattttattatgttacagttctgcaggttcaaagtccaaatgggtttcacaaggctaaaatcaagatatcggcatggctgcattcctcctggaggctctaggggagaatccctttcctggccttttccagcctctagaggccacctgatttccttagcttatagccccttcctccatcttcatagccagtagcatagcatcctcccttctctgatcatcctgcctccatctttcacttctgagaatccttcagcctacctagataagccagataatctcccaatctcaaaatgcttaacggagatacattctgagaaatgtgtcattaggcgatttcatcattacatgaacatcacagaacgtgcttacacaaagctagacggtctagcctgctgcacagctaggctatgtggtatggcctatggctcctgggccacaaacctgcacagcatgttactgtactgaatactctaggcaactgtaacacaatggtaagtatttgtgtatgtaaacacatctaaacatagaaaggtacaaaaatacagtattgtgatcttacgggatcactgtcttatatgcactttgtcattgaccaaaacgttgttgtacagcacatgaccgtattaataggttgcagggatttggatgtggacatctttgcggggtaccattattctgcctacagcagcccttgatacttaaaaatgtgatccttaaacaagcagcattagcatcacctggcattttgttatgaatgcagattcttagaccccttagatctcagacctactaaatacaacatctgtttttttgtttgtttgtttgtttgtttgtttgtttttgagacgngagtttcacccttgttgtccaggctggagtgcactggtgcagtctcggctaactgcaacctccacctcctgggctcaagcaattctcctgccacagcctcccgagtagctgggattacaggtgcacgccaccacacccggctaattttttgtattttttgtagagacggggtttcaccatgttagccaggatggtctcaaactcctttcctcaggtgatccgtccacctcggcctcccaaagtgctgggatcacaggcgtgagccaccgcgcccggcccgaatctgctttttaatgtgaccccaggtggctcatgtgcatgttataatgtgagaagctgtggtctaagatgttcatgtttttcccagctccttccctttccccatctctggactcactgatataaatacaatagtccctaaatcactagatttgctcagtgagcatttttaacatctactggggccgctattttaagcctctaccctcaggctttgtcctaggaattgggaatacattgaccaacaaaatgtggtcagtgaggaaactacagaggggagaccttagcaggtatgtgtggatttatgaatcatcgcaagtaaggaactactgacagtctaactttcctattagctcggtttccttcaagggaaattgcctctactttataaacaaatctttttgaaaatatagaaattatatggaatattaccatatagaattatgtaaccatccatcagagttaacaacagaaacatcgatttttagattttgttatattccttctttgagagttcttccccagtgacattacttactttttctctgtaggtggccaggaacagaatggtacacagcaaagcatagttgtggatatgcgtgaatttcgaagtgagcttccatctctgatccatcgtcggggcattgacattgaacccgtgactttagaggttggagattacatcctcactccagaaatgtgcgtggagcgcaagagtatcagtgatttaatcggctctttaaataacggccgcctctacagccagtgcatctccatgtcccgctactacaagcgtcccgtgcttctgattgagtttgaccctagcaagcctttctctctcacttcccgaggtgccttgtttcaggagatctccagcaatgacattagttccaaactcactcttcttacacttcacttccccagactacggattctctggtgcccctctcctcatgcaacggcggagttgtttgaggagctgaaacaaagcaagccacagcctgatgcggcgacagcactggccattacagcagattctgaaacccttcccgagtcagagaagtataatcctggtccccaagacttcttgttaaaaatgccaggggtgaatgccaaaaactgccgctccttgatgcaccacgttaagaacatcgcagaattagcagccctgtcacaagacgagctcacgagtattctggggaatgctgcaaatgccaaacagctttatgatttcattcacacctcttttgcagaagtcgtatcaaaaggaaaagggaaaaagtgaacagtgatggctgttttcttatcccatgcctgtacttttcagcggctccttgccagacatcataggtcattattaattattggtttgctatttcattcttttccaatgctcttaatgattgtacggtggaccagaagccaggattcctctctgaactctgcagttaggcatcacttgaacttgcctgtgcctgctctttttcctccctgcaccgtctatgccgggcttagcatgtttctttttaaatgaggtttgtcaggatcaggtaaagttcctacaagtgattacagaaggtagaaactttacctgatcctaacagatctcatttagaaaggaatatgctaagcctggcatggacggtgcagggagggaaaagagcaggcacaagaaagctaccatttttaacagtccttgttatctagtgcaacataaataacagtcttaattgcacttatacccatgtcctgtggctctccaaatctggtctttgctgttgtg

SEQ ID NO: 23809 - DNA, 39638 bp, Homo Sapiens
tctctctgtcttgtaatgatggccataatttgtcatatacactttagtagggttaagttttgataaacagtaagccaggattggggcaaaacaccagtccgggtacggtccatagccaatcatttgattgtctttactaatttagcaaatgtatcttggtaacttagtatataccatggctattctgggtgcagggattctacaaacatgaacacaatgtcattcctcccttggagtaagacacgtacataaataattataatatgaggcaggagtgattatatgtcatcaaaaagagataaatgccatataaggagagttcagaaaggaaattaataaattccaagtaaaggggatcatggacttttgcaccaatgtccagggacaatagtgcttgcctttgtctaaactatcagaataactagatatgtggttattaaatgttaaggagatgcagagtagggtaaattgtttatctgagaggctgggcttaggaaataaggcaaactataacgtggtaacacgcctccccctccttagataccacttgagaatttaatttctctaagtttttttgaggaaaaagaatatttactgtggaagaatatactttgatggctggaggagggaaggaaggaggctggaggatgggagggggatcatctcatgtttcaaactgttgatttccagtttccacctggtaacagcctaggggccagagcataatgatacaagtcaaaacacagagacctacacagagacaactaacagcatccagcaagggaattataaaagctcaaaaaagatttccagtggctaaataaatacctttccttgtagttgcacttgtttttcttttcatttactgaaatttggaaagacacatagactctattgccttttcaaagttctagtttacataaaagtataatctatgaaaatcaaatttttcatatatagaggatgaaactatgttgtgatcaactacaggttatctatgtattttatttaaaaactggtggacagggagaaagattttaaactatgattaatgaaagtgatagatgacatacttttcatataaaaccatgactttctttcaggacactttagaaatatgtccaaaatatacagaaaaactccacagcatagtgcttgaatttacacaaacattccaaggcaagtaggaatccgaatgagtagtttcacataaggctactcatttatttttgcagtccacatttaaaacaactacaagattaatttcattccatttttctggacttacacatcccaaaagcaagaaaaaaatgtcattttggaagtataataaatgctacttgtaaacaaggctagaaagggtggagaatgaaatgagatggggggtggggaaacaaaccctttagttacaatatcttagggaaatgaatctacaataagacaaatttcaaatcaagttgctccactatactgcataagcagtttagaatcttaagcagatgcaaaaagaataaagcaaatgggaggaaaaaaaaggccgataaagtttctggctacaatacaagagacatatcattaccatatgatctaatgtgggtgtcagccggattgtgttcattgagggaaaccttattttttaactgtgctatggagtagaagcaggaggttttcaacctagtcacagagcagcacctaccccctcctcctttccacacctgcaaactcttttacttgggctgaatatttagtgtaattacatctcagctttgagggctcctgtggcaaattcccggattaaaaggtatggttttcaataattgtcctgaactctgctacagactaataaaacttcggtcaagttgcgagcaaaagggattatttggtgagaaaaagaaaaggaaaaaaaaaactgttaaacttttatagtttttatgcaacattttaaacaagtattatttgaaaacagaagttaaatatttgataaaatgattgaatgcattgttttatttctttctcttctgtttttgcaaagatgcttcttaaaaaactgtaacctaacaccatgactctctatattaatgtttttgtgtttgtattaatgaatgtttagctcttcaagagatggtaaccgaaaagtattctgaagtagcatatctgtaattgacctatatatttaaaaaatgtatttttctcctgaatttttgattgctttaaggacttttaaaagcccagaagaactgaactctggtgattagctgaaaatacctaatgtatatttcttcaaccccagaaatgaacagaaattatcaccagagaagtgaaaataaacattgaaaatatttatgttattaaatgcctaagatactaaaaacgctgtataatttcttaaatgtaaagtgtcccagtcagtatcttcactgcaagtgaaattttaagatacattcactataaaatgaggatgtgggttaattttctaattttaaaacagggtaacacagtgaccactgattaagtgggctcccagtgatgtaaatacctgtggcttttttttttcctgttgctgtttctaaccagaaaagagccaaatgcctcctatagtaacccttgtttgtggataaatgccgcctttattctttattttaaaattacatatattataattgaagtttttaatcatctagtgctgtaggattttaattttgttttgcatttatagcttcacttatctcttgagggttaaattttgactttgaaagtgacaccagaggcatagataacataatgcaaatgttgatctggatgacatacttcatttaatgggcttaactagttttaggaaccagaaattattatttttggtaaaacatttgtaaactatggcaactagcttcagtggagtagtgatattacattagtaattagcatcttggacattgtcatgcatttttagactacttaaaacagtttcagtataatttaaacagcatatcatctcaataacaatctctttggttactacttggacagctgctctttgctctttatatttctgattaattaaggaaagaaggaaatgacgaaaggaattatcagtattgacagcccacattaaatgttttaagatgctgggtcttgaagtaccatgacactaatttaaaacagatgattttatggaagattttgcacaaagtttctggacatgcaattattttttcacagtacagtcagggttaaatgcacacacacacatacactctctctctgtcacacacacatgaacacacacacatacattctctctctctcacacacacacacacacgagcaaatgaaaatgaaataaaggtcggtgattgaagttataagctgcctgtctatattcagcttcaatcaaaaagaatattgtttggagaatttgtaccattttaacaggagtaaacaaacataaattataatactatttctctcagctaatactcaacattttctttttgtgggttgttagtgaaacaaccaggcatgttctgctctggagaaaagatttcaaagtgacatctgcattaactgtcgttgctatttattaaatctgcaatgactttgcttcatttttcttttaaacttgtaagacattaaatatgcaaggctagcaagcttgtggtaaaccataaacattgcatttttaatgggaaacagatacaaaaccactccctcagatacaatccaaaggaacaggctgccaaaacaaaagtcttctcttaaagggatactcagtaactgaatgagagtgggctgctagaagaagcttaatgttgaacttaaagtggcagtgtgaataataatctttatgatattttgttaaatgaaaagccacaagcctgtattcaacatgtgctgccttagacacatatcagtagtaaatataaactaagaacaaacatgtaagaaactgaaaaacatttgtttcttctctagagaatctaggcaaaaattcccagaagataccttaaggttagatcatacaaagatctttcttttctcttctcttctttctttctctctctctctctctttctttcactttcttcctttctttctttttctctttctttctttccttttctttcttccttctttctttctttcttccttccttctttctttcttcttttttttaatatgctacaattggataatgactcaaaacagctgtaagattctacttacgaacgtacagctttaatatggattcgtctaagtgtacaattcaaggtagagatgatgggactaaatatctgctatgatgggactaaatatctactatgttttggagatatcagaatggtttcaatgcaatttaaaaaatatttcatctcccaaatgactttgctgctatataatcaagtatcttttgttattcagatttattacgattttgtcactcagatttatttagtgcacttcagttgatttaacaacatagattcgtgcttgtggaatgaatggataaatatggaatacatttatcaaaacaatacttgtttttttacaaaatgccctgttagcaaaatgagatcatatatacatcacataaaaatcagaattttccatatgtgtttattagcttattaaacataatgtttgagaaactaggaaattgatttattttttaaagccgatcttgcttataccaagttgaggttttcaatctgctttttttatatcagaaattcgatactgaaaaaaagctaattttgtgttttaaaaaatcagactgattgcttggaacaaatggaataaatcgtcttgtcaataaagtgatggtcaattgagtcatttgtgtgcaaaatattgtgcaaggcccgggtacagaacaaggaataataagacacgccctgaaggagtacatcgtctagtgagggacagaccaagcacgcaaaacaaattgcaatataatgtgataagttctttaaaagaggtaagagcaacgtgctttgggagcagagaagagggagaaagcagcatcttgcctggatgagccaggggacacagaagagaagcccactatctcatttaatctttacaactctcttgcaaggtcggtattctacatggcaagtagctttgattgtcagggttcaggtgaggactgggaatggagtgacaatgaaaaggaatgtggctagagctattaattcataccaatttatgagtggtctgacatacagcacagggactgtggacagtattgataagccataggaagttaataaatggtttatagtagaaattaataagacaaaattgaatttttagacgatgactcaggcagcaaaatggaagatggactgaaatagaggaaatatgcaaggcagagatgaattagaagctcttgtagtagtttagggagagatgagaagggcctggatcaaaataattgtggtaggatggagagatgtgactggcttccagagatatttctgaagcagaaattggagatctcctatgtggatagagataattttatctgaccatgtgttaagtgagcattgaaaagcccaacatgatttattaccatgacaattttgcaaatgatttggatatatagtatatcatcttagtttagacccaaaattcaaacaagcagatttaaataatactcagatttctcatcctaagtaaatagctgtgcaaatgatactataatgtacctgattgtctttcaatacatttttaatgctctgcttcctgataacaaatgaaatattattttgcatcttttctctgtgctcactgtattgtggcatattatataagaaacgacacacagattaggcagtgctactcttcttaaatctctcatttgtttcctaggttccctggttgtgaaaatacatgagataaatcatgaaggccactatcatcctccttctgcttgcacaagtttcctgggctggaccgtttcaacagagaggcttatttgactttatgctagaagatgaggcttctgggataggcccagaagttcctgatgaccgcgacttcgagccctccctaggcccagtgtgccccttccgctgtcaatgccatcttcgagtggtccagtgttctgatttgggtgagtgggatgcagtttctctttacctaccttacttgttttattcttgggaatggcaactctgagagtttagcattttcagttttaatctctctaaatttgagagacagtgccacctaatgaggagtaaaggaagcagaacaggatagaaagaaaagtagcgttgttgttctctctttctctctctctctccctctctgtccctcttccttttttcctccattactttgcaatcttggacaaatcatttttaaaaatatttctgagctttatatcccttcttctacaaaataaaattttgaattaaaaaagtcttatgttctaaaatttcagagtaatggtttaatcttaattctataatatgcttttataaaatattagatattaagaaaatcaggtcagtctctctactattcacttagcccagacaacagagtttcaacattactaaattgtaaaataatcagttatcaaaagcaaaacacatcaaattttatgacaaaatcttatctttcaagtatcaaaatactcccttaatctctgagtcttagttttgtctttacttttgacattttgtaatccagctgcttatattctttagaaagtttcaaaggaaatatttatcactaaggtatggtgtaaatattcaatataattgtgttacatatatctttagcctaacaccctaaagacagtttgatttatcatcttttcagaaaaatttggtctggaaattccaagagcattacacttagaagataaatctccagaaagattgaagctcagtggatgggccaaaggggaatgaactcagtttacatggcagctcattcacattcctccttttgaaggggtgtattttcttactggagatgaaaagaaaaaaaaatctttatatcatgattccgccatgtgtacttccttctggaagaaattccatactatgatcaggcacttctttcagaagtcctatatttactcagaacatgctttctagcagtagtttgcagaagaaaaatgcaacttctacaattggaataaactgcctataggaacccagaaaaaatataaagtatattcagtagtaacgactgaaaaacacttgaaatagcttcttcaacacatatattgtatagctatttaaaacccaaatacaaatgttatatgaagactttcaaaaggccgcaggataattccaatggatctatttgttcagtcattcagaagctatatcgggaacccatcatggatgagctctgctctaggcatggggagaaaggatgaggaagacaaatatggccctagttcttgtggatcttatgttctagtggtggtgactattactttttgaattgtgtatttgccacaggggagattggattactcttcagaaattttataagcatctagagatgacctgcattattgccttgggcaggaaaataacagggttgaaaaaaatctgaacaaagaaatcaccatttgatggatatacacaggataatcttttctgaagttactaaaatggcgaagttcccaaaaaatgtaatgcgaattaaatttcactttgcctctgagaaaaagttaaaagaatttattattactctcgctacatgtattatcaaaaatgaagggttgatatttttaaggaaagaagagttggccagtcactttagtgaagttttattttttcgtaaatatagtttgcctttgcttccatgaaaaaatagctcataaaccttgaccctgatgaaagcactgggccagttttccaattctctgttatgtaaaaaggcataagtcaattgttcaaagtgaaacaacaacaacaacaacaaaatgtagtcttaggaagcagcaagttcactgacttgggatctttatgacagttttgttgttgccattgatattgttttgtttattttttgttttcagatgagaaagttttctacatgttatcttttttctaggagctcaaagtgtacatcattcctttattatagctaggtttactgactcatatactaaggaagtagctaaaattataaaaataatttgtttttaaaaccatatttaactaagggaactaagtaagttccaatgagcagtggtctcatgcaaggtattttcaatattttaaaatttacagatgaatatttaaatatattataaaagttttaatcagctatctctaagaaaatacatttcttaaagggaaatgaaattcacttgactttaaataaaacaaatgaactcatttcatgtttttaactattatctaactcttccttactttatgatgctggcaagctgttgagagccttgacatctccatctgcagaaaaatcacagtcttagaaatcctattaatcgtgtgaggtacctgggtcatagtagcagcttcatgcagtgttaaaattatatgatgattatatgcagtaacagatgaagaaaaaaagaaagaaagcaggagaaatgcaccacctcattcattgtaaatgcagtatagttgattttttaatttgttttatgtcctctagtgatctaagcatgaagcttgaattattataataaagaaaataaatgcaatgcagttggggatggcaaatgttaatgcttatctgtatcaaagactaacactgtcttcaggattatccttggtggattatccttggcagacacttaatgagcagagagaagctacaatgttgaaggacaaaagtcctttgtcatcttattatcgaaataatgtttaatacaaataaactttttaaattaaaatgtttgactactttttaccactaagaaatattcttggcaaagttaaacaacatcaaaattttaaacaattctttcaaagctaagaagtaaaaacctatgaaattaaaattatgtaattactctgcaggataatttgatgcctctggaaaaatgcatggactgttttagtccctaattctaatttatcacagtagtattaacacgtgcttttttttttttttaagaggatgagggattgagacagtaaacatgaattcctcatagatattggccaagttgtttcattgaacttgttgcaacttaccttgtaattggaaccacaattttatgagacccatatcttgtcttcttttatctatcatgttaagaaataaaccagttccctcttaattatagcatttatttcaaaaagcaatgttaaaaataaatgtagagttagcaaattcagaagtctttcagttactttataataataaatccacaatgtaactcattcttctaaaaatcaaaaaaatttaaaacgttctgattttgatgggattttctattttatatgcttggcatcctgaagaagacagcttcccttacttaggtactctttggcttagccattcatctttggatcaagtgtcaccaggtagtataatttggtatggacttaacacctcattactgaaatgcaaatcagtcctgacaagtcaaataagaacaagtattgtcttttgactagtctccaaaattaaaataataattcttgatgtatttcttataaacaaatttcagaagagttaaaatgcctcttaaaactatttaatagtggaaagaacttgggctgtgcagttaaacacctctgatctcaaattctgctttgctgtttactacctgtaaccttgaaactttcaaaactttgtttcctcatttgataaatggaaatatatcttatttcactgggtaagaatagaaaaatatatgcacaaatgtttattatagtaacttacatttcacttaccatttcaggcaaagttggctaagaacatgaggctgtttctgatatttccttttatttttatgtattaatgagaataataggtataggccatatacttattagagactctcaatgacttatacttattattctcaattcatattatatcatattatactcattgaaaataagccatatacttattagagacttatttagagtcttattagagacttattaagagtctctaataagtatatgggttgtcaagctagacacaaaatagtaccatctctctccacctctctaaagaggaccacatcatctccaaatgtaaatagacaagaacaaaaaaaattgtgcatttactaggcaattgaatgttctccaaaccaatattcctttgaacaaaatgagtttgtttgatttgagaacaatgaagtatttggctattttataatcataagtgattcatacccccacacacttagccctctagaaatggtgccagaagatgaaacacatttaattttgccatatagaagcattgcaaataactactggtttctaataatgtaccttataatgcaaataatgttttaatttttaaaaatatcagaaaaagtacaaccttttaaattatgtagttgcttcttcttcataatcatttttcttgaactggtgaaaaattttgtcagaagttaccacttgggacatattgtactacagcttctcgcttggctggagaaactggttttccagaagcagaccttatacaagaggtaaatgaaccattagacttctcccatgaaatcaacccagaaaaataaattaggactattttgtagaggaacagacagaatgctagaggctcagttgcctttatcatttatgtctggctctgcagcagcaggggtgtgaggtgctcctcattcagagtttcgaatgcaccaaaagggtgtttccaaaacatgatatgggaaggaggctgtgcacagagtatgaccactggattgcctaaattgacattgggtaggagtggagtatgggtgatcttcagatgaagcaagagtaatgctcaatgtgacctggttaaacaagtctcctgaatccaggggttaaagatggagaggaggaagagagggagtcaagaaggtcaaagggagcgtctgtctccctgacctgaatgacaactaacatagcccttgtttccttcttggtccccaggagggagagagaggcagctgtgtgggatcaaggcattttgtgagattgcagctgtgattcattttcctttggaagaacatccctagctccaggggatatggtgggaattggttagctaaaatatcaattccctgggtaaaagaggaaaaccatgagaccctctaatcttaacttttctccttcaaaagagtggaaaaagattacatagttcctcaaaaattaaaaaaaaaatgagtctgcaattcagtcttaataaaaagagaaagcccttagcatatatactgtaacagtaaagactcagttactcttgacttagtctgtggactgctttaacttctgtagcttgcctacttctgccttttttactgtaatctacatttgctttgattattctataataatcaattatatatacatatctgtgattatacaatatcttttatctttttatatatctattttattttttttcactagaaaagaagtattgcaataatttatcttcgtacaacctctacacaacaaactgccttatactttgtagactctttacacatcactgaacgattgatgaatgaatacacgaacatatgcatggcttggttcttgaattaatgcttggatgaatattctacaatattcttgactctagcaagctgcaaagagaagggaacatgcctgattgagaaacaaaagtgatttctcagtgcatccttgctccttccctttaaggacaactgtaaaatccaggaagcttagaaattccttgagtttgactggaaagagaatagaattaaagagaagaatcatctatgtatgaagcctggtctaactgataacgcagtcagattgccatttttaagatggaaaaaggggaacatgcttgccttgagcagaaaagtttttggtggggctggagctcctaaatattattttggtcatttgcccaaaaactgaagtacaccaccaatgtcccaattatgaagttgaatacagaattataaaaaaaaattgttgaaagtcaataagaataaatcttagaatttggactcctgccacatggcagaaaaaaagcatgatgttttaagacaacctggcctttgtccaacatgatgtttaccagattgctgacattttctagcataacaatactattcatcattgggataaccaaaagaagggaaataaaaaaaaaaagaagtctatttcttactagtctttattcagaaatgatttttttggtaatatcttaagtagtatcttatttgctttaataaataacttgattttaaagaagataaacctccttacaaaaactgggagagcaaatgtctaatccaggctaccttgaaaatagtgtgttttagtggaaaatttagaattatgttaaataaaggctgctcaatgaaaaataaatgtaggaaaccactatgctcctgttactacagctgagtgaattttaccccaaaacatggtggcttaaaaaaaaatttaatttgctcacaacttgaggtatggaaaatttgggaagggctctgaagggctgttctcacttggggtcactcttgcatttgtagtcaaatgttacccgggatttataatcttaagaaggctagcctgggctggacacctgttcactctcataactgacagttgctgctgctgtcgcccacaagcttggctgttgtatcctctggattgcctcagacagcctctcttttttcctatggcccctggctgtcccagagcaagcatcccagaattgggtagcagctgtacaaccttttctgacctagtctcaaatgttatggtgtttcaggctattgattcctagaggcatcacaaggccatcctgaattcaaagggaagagagaggaattagatgctacctcctaatggtattgggataaatgcatattgtagaagagcatgcaggatagaaaatttaatgtatgccatctttgaaaaatataatcatctacatatttacttacatttatatacatttctaatgagaagtttgagcataattatgtattatgtagagaaagcccacagatattacatgtcccccatgaaggtcattatttaatgattacaaactacattaagatgttaaataattataattaaattaatttacaaattaacttcatagttacttaattcttctacttaagattgtgagaaaagtattaagtcgtatcttaatgactttgttttcattatggaacattttttggacataaattgaacctggctaattgatacatataatttaaaatgctaacattttactttttatatcattttatgaataaccataaaattcatcagtatcaataggaattatttagttaaaaatcacatacaattaatacaatcataggcttaaaggcagaatttaaatttgtttatttaaaagttaaaaaaattaaggtaggataactgtttcatagaatactatctgtttttatattttttgaagattaggtttagttcaaataagctttttgcaattatcaaaaataatctctggtcctcgtgtatttctaccacaatttacttccggcttggtgttttcagatgaggaaatggagcctgaggaatgctaacttacagattccggtcatctctccttaacagccaagttgattttaacccgagccattctgactctaatgatgtacaaacaaagagtaatattttatagatttgcaaaagagtgtagcatttgctaccattaaaatagggttaaattgaccaggagcagtttttgaggagtctaattactcattggggatcatgtgcttcctaaactgaaggcttatccaaaagccctgaacttggtagacaagcaccccaaaggccctgaacttcatgggaacaatgatgaatgcagaaagaccaggaaataactgtcaagacaaaaacatttcaggaccaagatctttagatgaacaccttgtgcttgacatacctgaaaaacagatttcagcctctaggataatatgcatagtaattgtacagaaaagaaagagttacagatgaataatcagaaagattattcagaaggataatgagagcaacaccctctattttgcttattaataataatcataggtagcaatacttgagacgctgctatgcactatggtaggagattattttgtagcatagcttattgaattctcacaaaaattctgtgaaagacttaagaaaactgaggacagagggtttaaacaatatgtcttctaattttctttttcttttttttttttttttagacagagtcttgctctgtcacccaggctggagtgcagtggcgcgatctcggctcactgcaagctccgcctcccgggttcacgccattctcctgcctcagcctcctgagtagctgggactacaggcacccaccaccacgcccggctaattttttgtatttttcagtagagacggggtttcaccgtgttagccaggatggtctcgatctcctgatctcgtgatccacccgcctcggcttcccaaagtgctgggattacaggcgtgagtcaccgcgcccggcctcaatatgtcttctaatcttaaagataaagaagaggaaccagaattgaaattcacataacagtcttataaaaaaatgttattataggagcatgtttaaatatgaaaattctgcagaataaaatgaccccattgggtacccaccacagagcttcaaccagtgtcaactaatgccgttatttttctatctccacccacttccatatcattttgaagcaaattccagatatatgattttatctaacaatacacttaccagtatgtttctctgaaaaataaagctctcaaataaaatagccatagtttatagcttatttatatgagtcaggatccagatgaagtacatacattgctttttttaaaaatagcttctgttttttggttttttttttttttttttttttagacaggatctccccctgttgcctaggctggagtgcagtggcatgatcacagctcactgtagcctcaacctccccaggctcaggggatcctccttcccgagtagatgggactacaggcttgtgccaccatgctcagctaattttttgtaaagatggggtcttgctatgttgcccaggctggtcttgaactcagaggctcaagcaatccacctgtctgagattccaaaagttctggaattagaggcaagagccacagcacccagctaaaacatctcttaactctcctttacactacagattcacaatttcttcattttcttttggaatttagaggattaatcagattcaggattaattgtttgtttttgaaaatacaaatctatgaatggggatttgtttcttcatttagaagcttctaactgatgcttttccaggagaaatatatgccatgtagagaaactcttactgctggagtagtcactctattagacagaaaaatcagtcttcttgagatatgtatgtgacaaaaggtgcttcacaaatatggcaaagacactgaagaaagtaagagcaattttcaggtgcagataatgggaatgacatatttgatagtaagtagcattcatttataaaatattcctggaaacaggaaaaaatataattattataaccagttgtatcctaatacttctgaggaaaataaaaactcctatgatagcaggttatagggagatggttataacagaacatggcagaaatgatctcaaagccatactcataaacttttcatcatgggacagcaaggcagatagactttaaaattaattaatcagaaaggcacttcttgttttcaaagcagccagagcaaaatgctgatgagaaacagtaattagtcctccttactcaggaaaaaaataaataaactaacaaaacaaacaaagaccctgaaatgcaggacagtatagtttaaacttatacatctatggcctgtaagaagtttagaggtgcaagattactgttatacaggggtggtcagcatgaatattacagaggagagggataacggatatgcttcaagggattgttagaatggaaatagaaataaatgaataagtggagttttacataaaatatgcattgcatgaacaaaaattgagtagctaggaatgagtgtaatatgctcacggaatagctgtagatcagcattagaaaatatgcacaatgatcacatgcataaatggcacaccacggctaggcacggtggctcacacctgtaatcccagcactttgggaggccgaggctggtggatcatgaggtcaggagatcgagaccatcctggctaacacggtgaaactccatctttactaaaaatacaaaaaattagccaggcactggtggcaaacgcctgtagtcccagctactgaggcaggagaatcgcttgaatcgggaggcggaggttaaagtgagctgagatgatgccattgcattccaggctgagcgacagagcaagactcttgtctcaaacaaaaaaacaaaaacaaaaacaaaaacaaaaaacatagttctggagtgaggactcaaactatcctggttcttgatctactttagccatgaggcaccttagataagctatttaacttctttgggtttctgtttccttacctatgaaatgagaagattagactgccttaaaattctctgatttctgggataagtaaaattttgaatgttgaacgagttaatttctcattaaagtcaataccaaacctaacaaaagaagagcctgccatctgctatcataatcattttttaaagaaggtgtatttaaaagtagaaatggaagtgaaggcaggaaatggtctcagatggtctcagaaattgtgtgtgtgtgtgtgtgtgtgtgtctgtctgtctgtgtgtgtgtgtctgagataatttacattaaaactaaccacactgcttttattgttttttttttattttgatatggattgctaaaaacctcatcatagagtctacctaatcagcatttgggaaccatagattagctgatatttaaggacccttccctttgtgacattcagagaactcataataactagagtaaattcttcattatactctgtctcttgtctttgagcaagctagttaacactccaatgccttatctaccccttacaggtacagcatattactgggtctgatgtcagaacaattatttcaggggatacagataggtatgccagaaaaaaaagtcatgctggaagccaggagagttgtcatctaatccacattttgtcattcctaactagataagcttgttcatgttatgaaactttttaaaataattgaaagtatgagattaccatactgccttacctatctcattgggttattgtaaggtaaataataacatattttcatttttaaaaataaactctaaaactaaattattaataaaaaatatgtgaaatccccccaataaacataaatttactaattcagagcaggttgtagaactataattttaatcattgaaatgactctccaagaactaaactacaagaattagaatcctgaggatggtattccttttttctgaatctctagaaataagatgtatataaattaccttaagtagttcctagtgttataaaattttaggatgacaacataagtgaaagtgtcagccatccagacacatcattctttccctacacatttgaaattttatctgcagtttcgcattgacaaaatgttgagagtcactagaatttaagttcgccaatgaataaaagcaagcgtaagtggaaattaggactgtgatgaaggtgcccaagaaggaatgataaaatgtagtaactacgttccaaatgaaaagaagtttgtcttttctgggttggagaacaccaattaacaaagatttggcagaaatctaccattcctaattgcatgaaattagcaaattgacatttccgaaaatggcagtgattacaactgtacagtgtcattaagcaacctcctacaaggtagctgttctggtgttttaccgttcatcactgaaaacacttaactcttgttatttctatgggaactgtgtctataagagttacacatttatgtaacatatttatgtaagttcagaattacttgtattttgatacttaaacttataaagataggtggtcactgaattaagaacaagattccacctgcaaccccaactatcaatggagcagtgatattataaataaaaaaatatttggaaaagactcagaaataggtagcttcaggtacgttttctgtaactttcatggaagaaatgaagacagtcaaagtatggctaccatggtggtttacaagtatgtttacataaaactcaaaattgaaaagtgattttctcgacatagcggttattataccctgttgtaattttattttaattgaaaacagtaaactgaattatatttttatgaagtcacgggcaatatctgccttggtcctgctatattcccaggatctaataaattcatggtgcccaagaggtattcaataaaggcttgttgaatttatgaaaaaataatcttcagtacttcaagtttcagatatgatggagagattgcttctaccaaaggctaaaaaatatttctgatttgtgttatgcagtcttaaaatacagaaatgatcacattaatttgagttaatagaatatcaaatttttacttgatgtcctacttcaatatgaaacaatgaaaaaaagaaaggcaaaaggccttatttaataattttctctattatgattcatgatgatttattcaaaaataactgccttttgtataattctggttcatccttatatgactagctgaatgactactaaaatattttttaataccaggaccatttggtaattcaatgaatttacatttacaaactaaaaacaataatacactcagttagaccaaaatctaaagtccaaaagtaatgcttcataaaattaatttcagatatgtcatactacccaatttatttcattctaactagccatatatctattggtcataaaatatcaactgaaatggatattgttttggcattccaatgaaaactaaaagaaccgttatcccaaaatgttggataaattttcaagatcctgccacaagttgattatatgtttatatgattttaactgtagatctgtgacagggttaggtgtatcaaaaagatctttattactgatgatttggctagagtaattattgacacggtatttatgtaaaaatgtataaatttgccaatcactcgtgctgactacttatcaaaataactacttttcaatacaacaacaaagaggtaaaacatatagatttgagccacaccctaatgcaacacaaatgttcccctaatgcagaggaataattccatgaggaaaatatcatgttgagtttattattaaatacaaaaagtcatttgacttggttgcaaaagataaagcaaaaattttaccctacaatgaatgtaattcttagaagaagaaaaatatgttgttactgttaagatgatcatcataacattaatttcttggtaaatatatgctgtgtgattctgtagccacatgtcctttctactcacagcacactcctattactcttatgctaggtctggacaaagtgccaaaggatcttccccctgacacaactctgctagacctgcaaaacaacaaaataaccgaaatcaaagatggagactttaagaacctgaagaaccttcacgtaagaactatttttttttaactcacaataagataagactcaaggtatttttcaaaacactacctagataaggccaagagtactatgtaccaacaaagaagcacattagtgtttattaacttcaccttttttttttttttttactttttttttattaattctgccccaaacactgtttttctttttctttttttttttttttttgaattatgcttcttttttttttaattttttttttattatactctaagttttagggtacatgtgcacattgtgcaggttagttacatatgtatacatgtgccatgctggtgcgctgcaccactaacgtgtcatctagcattaggtatatctcccaatgctatcccttccccttcccccgaccccaccacagtccccagagtgtgatattccccttcctgtgtccatgtgatctcattgttcaattcccacgtatgagtgagaatatgcggtgtttggttttttgttcttgcgatagtttacctttttagcagtggtagggaagcaaagcatcatatttattaaccactaacaatttacctgacttttttaatacatataccccatatatcttaggtattttcttcataaaaatactttagatcttaattctctctcacgttttcaggaataaaaattgtctttcaaattaaattgtattttaatagtggaacaaaacacaaaatggattgatcctagtattattttatttctttgtttcttttgtttgttttcatgcattttctaagagaggtgtgaatgatgttctaaagtctcaaagattggaatcaagtgaaaaaaagataattattcatatttcatttagcgaaatataattctatcttcatatatatgtttcttgctttatctttaggattatgcatgctgtgtccttatctgtatgtttattttgattttctcttatctctctactctatcataatgttcagtctatcagtcaggatttcatcagaaaagagatgccactcacaaaggggtttcatggaggagactttattgaaacctctatttgcaaaggggcatgggaaccaacaaggcactgtgaagcacccagtcccacaaaggtctagaagaatttgagggtctcagagccatgggagagctgggtagttccacctcttaatttcctgcctgtgtcttgtgtggttgcatctacttcagaccaaaagacaagggcatttgattaatgcattccccagaggtcagcttcccaggacttgaagaagggccaaaaaagggcaaagaatgaatattgtggtagttgggagagaatatgctatacaagggaaatgaccaacccaataaaatagaggtaagccttgctaagagaaccttctgtaacagtaaatgcattgtttgttcacacagaacaccagaatcactataaaatgcattttctcacccagttctctatctgtagaatgagtgtgatgtggtcttccatcaaaatatgagtgcacattaaatataaataaggcagacttcaatgtccaaaatatatactctggaaatctcactgtgtctacttccattctggtagaccactctgaagcattgagtctggttcttggcattttaagaaaggcattcaagaacatctagagaaggatgaccatggagataaagaatctggaaattaggtctcataggcaccgtggatggagaggtggatgtctaaactcagtgttgagggtcactagtggcacatttgaagggccatgttgaagaaaaagaatggtatttacttgtttcaactacaagatgacagaatcctcctagtgagtagaagttttacagaagcagatttttattcaatattaaaaataaaaattaaagaatcagaattttcagacaatacagagacttacctagtgatttgttacctgcctgtggagattagagttcacagcttcgtataatgaatgtcataggaatacattcttaatgttgggagcataaacataccaaactctaatttcatatctacttatttattctagtcattatagaaaataattgaggaagatatgtcatgagaataggcactacttactaaagtataaatataaatcatctgatatacattagaataaaaatatagatacaaaggaaataatataaaatagaataaactggtcataattattacagagttactataatgaagataccatttagttataaactttacaatagccaagatgggaaaagcagtaaacatttagccattagaagaaaatataccagatttttttaaaggaagaaaaatttttttctaaaattttaagactctacaaggaaccattttaaaaaatgcagaaaggccgggtgcagtggctcatgcctgtaatcccaggactttgggaggtcaaggcgggtggatcacaaggttaagagatcaagaccatcctggccaacatggtgaaaccctgtctctactgaaaataaaaaaattagctgggcatggtggcgcgctcctgtagtcccagctactcgggagtctgaggcaggagaatcgcttgaacccaggatggggaggttgcagtgagtcgagatcacgccactgcactgcagccctggtgacagagtgagactccatctcaaaaaaaaaaaaaaattggtagataaaacagtgccatgatcaatttattgacgtgtccaacaatataagcacaatatgatatgagtagtgagtgttatggacttaaagtaaaagaaaaaattaggcatcattatttatccaattaccagacacagttttgagagaatatgcgaggaaggagttttagacgatcagcagaagtttgaaggactttctgtacaagaagaaagcaaaggcagaagaaaataagaaacagacaaataaaaatacgagttggctagagtgaaagaaacagctgaagcaatggaggataaggacaagctggaggttccgacctttgggtctctttccgctgatgagaaccttattcaccaactccccctcacttcaccttaaggtttcaccgggaatgagctgatggggaaaccagcaaggttttcagtgactatttaagctactgttggcataagtttaaaaaggagaccataaaaaatgaatattattaaatttagattactaaaatatttttaaaacttttatttggataagtttgccttatagctactgttttaaaggatgaaacattcttactgtcatctcaacttcctgtacatttaagtatacttggaatattttttaaaaaaaccctttatatccttaagtaagtgacatctagtgtccatgacattctcattaaatctggcatttgtaataatgtgttgtttcttttcctaagactccttctgtttttaggcagccatcatcttgacaatctctttctttctacttcaaagtatacatcagatgaataaagagagttcattagagccttcaaccattcagaggatgttaagcagctatttttctcttactgtttcattcatgatcctttctatccttgttattttgcaaataaacatcataatttcacctagcaaagccacacttaaggaaggagagaaatgaaaatttagcaaggattaaaatagaaagaatttaacagaatcatgttccctgtatgtgcttcattatgagtggtgtgtgttacataagagtaattttatacctatatatagtgggaaaaactatataattgttctataaaataatggaaaattaagtgtggtaatgacaacatttaatatattttctttgaattgaagcttaataagttgagtaaggaaaatttttttaattaaaaatcagcaaaaattgtcaaagactgaacaaaagcaaacacttgtttagcaattactatatatactaggcactattcttagtaccttatatacattaacttatttaattcttataactattcttatgaggtagtcacacttgatatctcctttaaatgggcacagaaaggttaagttacatgctcatagtcacaggccaaataagacccagagcttgagattctaaactcagaattctggcttgagtatgtgcactaataattgcctataaatgtaacagtcaccaaaaaagcctttagaacaatatttggtacagtgtaagacctacataaatggctttggagaaaaaaatcatattaaaagtcaggttttaaaaacatttaacataatacagatttttcagatcatgtttaatacatctaattatatcacactttcaaaatggtcttctatggataggaattgaatatctcctttgcgattttcattaggcatccacaattttggatgtcttgtaatgatatatgtcacctcactccactcagctggctctggcttttccctgattttttgtttgttaatgtcaatttttttatgaccttaactcccacaagtttttgaacttttgattattaatcgcagtgtgttagaattgtgtatcaatcaaccaatgcatctttcaggattagttaaatgattatgttacttaataagaagttttaattcatcgagtaatgtgaactatatgaggatatacatatattaattaatcagctattacctttagaaaacattcttgcatttctgagactaaaaatactcgctttcctattataggtccccttttgcccctccacattttcatatatgcgaaacatatactataattgaaaatgcaaaattagaccttaataagttattttaagttccttataattagttaataaagtggcttgaaataataaaaccatgtggttttgttagacatacagataattgaaaaagaataaaatagtccaaaaataggcctagcaattgttataagcataataataatgaattagaggtaatttcttatataaggagaactcagaaataaaaatcaaataattacccaaaatattaacgtatttgtcatataaaacctttacacataaaaaaaggcaaaaaaaaatcaggagaaaaatatgttaaggctctctgtgtcatattgaccatatctttattttctaaatcaattattaacctatattaaaatttaataaacatgagaagtattggtgatcaagcaatctcctctctccaaaaaatacaataaatggtaggaaaataaaaaaaaaatagtttaacctttttaaatgacaaggaaatacaaagaaaagcaatgagctacaacatgatattattttggccatactcttaagaaacataatatcaaatattgcaaggctacgggaaaattttagttccttgcattgctggtgatagcataaattggtatcatccttttgtagcggaatccatgttcatgatcaatgaagatggacttttaagttaaaaagctgactgcgggatggatgtctgtggcattgattattttcaggtatctagggtcatttcaattgttagcagtatttattatttaaaaattacatagatatatacacgtacatatacatacatacatgtctgtgtgtgtagagtgcatgtatgtttatgtatatattatatatcttattacatttcccttctcttcattcctgattttcaggtcctcatattataactttttttttttttgagacaatctttcccagtcaccaaggctggagtgcagtcgtgtgatctcagctcactgcaacctctgcctcccaggttcaagtgatcctcctgtctcagcctcccaagtagccgggactaccggcacccaccaccacgcccagctaatttttgtatttttgatacagacgggatttcgccatgctggccaggcttgtctcgaactcctggcctcaagtgatcctcccacctcagcctcccaaagtgctgggattacaggcatgagccaccgcacctggcctatacacttcttaagtaaagaaataatacttacttaatttttttctgatttcttgcaattttttagatttctctgctatccctatgaatggaatgaacaaacatgcccttgttttacatgtatgtggaaggttttggatttaaagagatgtttttcttcactatctacaggcattgattcttgtcaacaataaaattagcaaagttagtcctggagcatttacacctttggtgaagttggaacgactttatctgtccaagaatcagctgaaggaattgccagaaaaaatgcccaaaactcttcaggagctgcgtgcccatgagaatgagatcaccaaagtgcgaaaagttactttcaatggactgaaccagatgattgtcataggtacagacatttttataactttaagaccaaaactcaagtttttatcttaagagatttcaactgggttttaagtgcaggaaggtaaattagctacaagctacatgcctggagcctatgtgatttataagaacagggccaagagaaattgggattttgaatctggaccttacagtgatgtttttatgtatgtccttgagtatctgagaatatggagaaaaccctagggctgaagttaccctaccacacacacaatatgcaaagatgagtttaaatagtgcttaactacagatattttgagatacctttccgttttggggacctgttgtattctaaacactcataaatcatttgctttaaaaatatgttatggctgggcgcggtggctcatgcctgtaatcccagcactttgggaggccgaagcaggcggatcacgaggtcaggagatcgagaccatcctggctaacatggtgaaaccccatctctactaaaaatacaaaaaattagccgggcgtggtggtgggggcctgtagtaccagctactcgggaggctgaggcaggagaatggcgtgaacccgggaggcggagcttgcagtgagccgagatggccccactgcactccagcctgggtgacagagtgagactacgtctcaaaaaaaaaaaaatttctctaaacatatagtaaaaattgtaattttattattggcttataaaatgctagattgaaattctttaacaaaattttaaaataccttaggaaaataataaataacgtaagatgggaattgtaaacttgctttagttgatttctgggcaaacctgtgtatgcatcttaaataattttattggtattgctttcactaatagtctttttcataagtcattattattcataagtcattgtctgtttggcttttgttttaataagggaaatttttatcctattttgctattctcctgaggagcatgctctttaacttcacttttgttttttagtcaagttgatattaatccctatttctttataggttgcttgctgaaacagatactacagtgactagtaatatcctaaaatttcctctaaaagccttgcacttattacatttgtagaactgggcaccaatccgctgaagagctcaggaattgaaaatggggctttccagggaatgaagaagctctcctacatccgcattgctgataccaatatcaccagcattcctcaaggtgatagaagattctccaaaacattttgaaaaatttaaattcaaaggctttaattaaaaaaaaaaaatcttgtggaaactggaattgtcacctaagaggccaaccttatttccagcaaattctctattactgctagtgtttcatccagtgtttatatttccagcaaattctctattactgctagtgttatatccagtgattcagtctggatgaccacggggccatccaggctcactgtagagatgggtagactcctgttaatgtctagtttaagacacaacttaatgcacagtgattttataatattgtaaaatcacaaagaaaaagtacatttatttaaaaaatagcatgccttggtgtttgtaaaaaaaaaaaaaaagatatatgggagtacctctgaaattgatccaatttttaccttgagtctgcaatagcttagggaatttttttttcctttttaagacactccagttattaatatctgaatgatagtggtagttgtgtgttgtgaagagtgtagattttggagtcagtttgcttgagcccaaattaccataaagtggttcaaagactttgaaaaagttattcatttgtcctctatctctttatctgtcaagtggaaataatactgctatccacttcattgagttgttttaaagttaaataaataattagagaaatatttagcatatagataagtagggaattaatataactctctattatgcattaaaaatgttctgaacaatcagtatgtgtaggcgatgtaccaaacacttaagacagggcagggaacaggatatgctacatgcctttaggagcttactctctaaaaccaagccagacaaatacacagcaatgaccacatagccacaagggtaagttcattgttccaagggattcccaggagaggcacaaaagccagtctttgtgaattacaaaaggcatcaaaccaccaataataaattcctctaacttgcacatcgtccctactctgggtttttcagtctcacagaagccctctatattatctagttttcccctcagtctgtccctttctcaacttagatgccttgttcttgagtgcgtacaaaatgtagacatttggccacagaaaacaccagttgtcctttattgttcttttacagaaatttcaactcctgagagtacatattccataggatgctttcttaccaccccttgccctcctcctagtcttttgaatacagagcatgcttttgacttccttagtagcaactactggcatagatagatacatagatgataaagactgatttataattcataaagcactttcatgttgagtctccaattttttgcatgtaacaagtaatcttttgctatccccagtgcaggaatgaaatatttatatctcagatagatataaattggggattgatatagatagatagatagatagatagatagatagatagatagatcttattaaaattcttgctgaaatttatttcatgcagccagatgacttacatttagcacaatctcagactttgctgtccctcttaatgcatgctccaaaatatccttcactgataccttttatcatttcatgatctcttttcctttactttgctatgtcttctatctatcccaggtattctttcctcatcatttatagcttgcttttatttactaccgcttaatagaaaagttaagtaactacaatttattaagcatgtatttagttccgggtatcatgccaaatgcttgtcatggagtcttctatatgattcttacaacgtccctatatagtagggttataattcctgtttcataaaagtggaaaatgaggcttaaacaggtaaagaaaattgtaattaagttcttagagctaggaagcggcagagatggaattgtgtggtgctgatgtcagaactcgtgtgtttaactatttcactctgttggcatattaagtcctcctttctattcatcgttatgcttatctaatacatgattccaccttgcttaggctgggatacctatgcctgaatatcagcaacctcctggtgatattttctcccatcactcatggaaatggaaaggcagtagaaagtagtgtagagactataaaaatcatacacttagatcaacctgggtgagagacctaactcagtcatttagttgtactgtgactttaggataattattctgcatttctataacctcaggtttgttagatgttacatggagctattaataaccctgtctactaggattattgtgaggattactctatagaagtaaggcttgtattgtacacgcaagtacttggcccaatgtaaacctcaatatattttatcttaaaaaaggaaaagaaaaaagaaaatttaaaataaatgaacaaacaaataaataaaataactggagtatgggttctttaactcaatgccacagttgcagaagctaatgatgcactttacaaatttgtctatctcaaacctattgcaaggttttctcccatagtcaaacttcttcttagctataactttacatttgggaaactgacatcccaaaaagggagacactttgaaactaagtaaggccgatggttgtgatagcaattggtgtactggaggcactgcattaaaaaatatactttttttgcattactttgtaattactttgtaactttgagtcttatttatttaactgtgaaaagggattagtgaccaataatttatgttttgagaggcttaaaggatttgaagtaggaaaagtgccaaggtcaatgttcggtgcgtaacagacatacaataaatagatgttccttttcctagcagctctaacacaaaatatgctaccataggaaactaagaatcattttcaagtcaaatatggactaaactattttattaaatggacaatattgacagaattcagtgtgatgtgataaaaattttagacaaaatgaaacctgtggtttttcaattctgtgtctttatagacaaatagccaagactttctgccaatcagatgttctttctacacttaaccaatttgctattttctctgtatctattgctattaagtggaacaatatgttattttaaaagctgtataaaatataatacagcctcagatgctaggaggaaatgaaaataaaatatttaaacttttatatttataatactcgatctttggaaatcacagccatgcaagtactatctagaggtttagtgggtactttggatgtaaaattattaccccaggtgctccacatatggcagatcacttgattatagacctctccactccttctgcataaacattctggatttaataggcataagtaaatgttagctgtttctacacagacattttgcagaggtatttgatgcttttatggaaaagtcaattaaggctaagaccagcacagtatatcagtgttaatttttaatgatgctcattaatgaaatagacaattaagtttgtacatgggtttaatttatacgtaatctcttcattatggttcgaatagtgactttcccactttataattactatcttttatcaacgtcagttttagcccattaacaaaggtggaagagaataatgagactcagcgttgacttcagttcttctattccaagaacaaaaattgactacatgatagaaatcatccaggtttttgttaaagtcaacctaagagaaaaatagcaagggcttccactacttccaaaagcacacattattataaaagggatgaaaaaaaaagataaaagtaaagctgattctttgaaactgtgtgtcttttagaaaattgatggcatatgtcttctttaagtttgtccacattctgtacttataatgtttatctgctaatttaacatctttaattccacattccaggtcttcctccttcccttacggaattacatcttgatggcaacaaaatcagcagagttgatgcagctagcctgaaaggactgaataatttggctaagtaataatattctttcatgacattctatcagaacaatggctaggtatattagtgcttatatgataagaattataaacatgatgattgatttttgagtgtactacatttcactgctgttgttgtttctataatctcaaacttcagcatatccaattatttcttgagaagaagccaatgaaatagtgcccttactaaaaccaccaagatcagcttcatattttattaatactatactgtttatagattagttatattttatacacaaagtgtgtgattaaatcaatatgtgcatttaatatgttctaacttatttgcatcaaacagaaagttaagtaaattataacacagttgctagaatttgaaaatccattaaaatgaaatctaccaagacagagaaatattgagcatcacacaaattactattttaataattatgagattctctaaccccctcttctctgaaaagtttaaaataaaatatctctgggcatttaatgtagatcaacaaaagaaaagcttttgttgttgttgtttttgctggcccttcttaatgattttttttaaaataagtgatactagtacttgtcctggtttcaaacataacttcaatctggcaaacgttttcacttgtcttcaaggaacactatgttctttttgatctgtacatattgctgactgtccctacagagaagcacactatcatgccagatttactcattcctgttgttatatataaatttcatggtggataaataaatataaaatatatctttgaatgtgtatatatatatatgtcttatatatatatatatatgcatgtgtgtgtgtataatcaactcctttactaggtaaaatattctttgatgggaaaagtggtttttgatccatgagacctctgtccctcacaatgcctagcataatatcatgcacataagttttcaagaatatttgtttattaaatatacaaataaatgtttgaataagtgaacagtttttaaaaataaactattaggaatattatgttccaatattatggttgaccataatttgatgttggaacttaggatattataaggaataggagactatgtccaatcacgttctgtcagatgaatctcaaagacagtaactttgagccgagaccttaacaataaatggactttgtccaggctcagagaggttggagaaagcactccaagaactgggaagagtaagtgcaaaaacaaaaaatgtcctttcctatagacttgattaactacacaatgcttgtaagaaaggcatccatgtgtggtgtttgctttcatttctgctttctgttgcaggttgggattgagtttcaacagcatctctgctgttgacaatggctctctggccaacacgcctcatctgagggagcttcacttggacaacaacaagcttaccagagtacctggtgggctggcagagcataagtacatccaggtaatgcaaagccactgcttatgtgaggaatatccaaaaagcaagacccccaccctgcttatgggatgctgggaagcaggaagctcttcttagaagttttttttccagagtgtcttagttagaatttctatgacaaaataccataaaaaaaattaaatcatgaagcacaatttacattagctagatttcaataaagtttttgatttagaagtatggagatgaaacttaaagtcttctgtaatgctgatatttttttcagtaggggtggtgatgttggtgccatagtgagtagggggagtttgaagccacaagtaaaataaaaattctttttttttactgtcactaattttaattttcaaattattcaagaattgactggaaagagcttctttggtctagctcctgattctttttgacatggcctcatcatttttctttatttcctctaaaaaaaaaatgagatacgtttgcagaatgtgcaggtttgttatataggtatacgtgtgccatggtggtttgctggccctactgacccatcctctaagttcgcccgctcaccccctaccccctgttgtgtgttttgttaccctctctgtgtccgtgtgttctcagcattcaacttccatttatgcgtgagaacatgcagtatttggttttctgttcctgtgttagtttgctgaggatgatggcttctagtttcatccatgtccttgtaaaggacatgatcccattcctttttatggctgcatagtattccacggtgtatatgtaccacatttcctttatccagtctatcattgatgtgcatttggattggttccatgtttttgctattgtaaaatagtgctgcaataaacattatgtgtgcatatgtctttatagtagaatgatttatatttctttgggtatatacccagtaatgggattgctgggtcaaatggtatttctggttctacatccttgaggaattgctacactgtctttcacaatggttgaactaatttatgctctcaccaacaatgtaaaagcactcctatttctccacagcctcatcagcatctactgtttcctgactttttaataatcaccatactgactggcatgagataatatctcatctccagccacagggaatcattaatctattttatcatttttgtttgtttcatagaccatagttttgtgtagattccaggaatactttaacatctagaaattttataattttaactcctgtatttggttttataatctaattttgagataatcctagtatatgatatgagtctaattcattttctgtatgtgatagcaattgtcccaatgtcatttgttggaaataatattctttctccaatgaattgtcttgtcactgttgaaaatcactcgatcataaatgtaagggtttatttctggactttcaattctattacatttatctatatgtctagtcatatgacagtattatacccttcaattactgtagcttttgattacgttttgaaattagaaaatgtaggttctccaactttgttcttttttttcaaagttattttggctattctggttcctttgcattccatatcaattttaggatctactttttcatttctggaaaaatattcttgtaaggctttgaaaggtattgttttgaatctacagatcattgggaagaattactatcttaataatattgagccttccaagtcacaaacaagggttatttatatcttcttttctttttctcaacagtttttgtcatttttagcatacatgccttgcaattcttttactacattcattgtttttcattctttttgatgctgttttgaattgttaatttttttatttgtttgctgctaatgtataaacatacaattgatgtttatatattgagctatcctggtactatgccaaatttgtttttagttgcagtaatttttgtgagttcctttggatattctatattcaggatatattatttaaaaatagacagctttagttattttatttggattcttttaggtctccccctcccccacaacccaccctttgcattggctggaatcgccagtgcaatgttgaacaaaggtgatgaaattagacatctttgccttatttgctagtttaggaggagggagcattcattttaccattagttacgatgttagccacaggtcttctatagatgctctttatcaagttgaggaagttcccttctatttctgatttactgaaaacatttattatgaatttttttcttacatgtttttcctgcttctattgagataatcatgcgagttttggcctttatatttttgatatagtgtattacattgatattactttgattgattttcataagttaaaccaattttacaaccctgagataaatcatgtttggtcctatagcatgaaatcattttatatgttgtgaaatgtagcttcctaacattttgtgaaagattttttgtccatattcataagaggtatttgattacatttttttttcttatgatgaattttgtctggctttggtcttagaaaatattgaccccatagaatgagtttggaatctacttttattttgttctacacagactaatacttacgtcttgatattttgttctctcactttcaatattaaccataaattgctcaccaaacaccccttcctttacttgctaatcactactggaatatagaggatggtaaatgacaacaagaaacttccaaaatatgagaaccataaaccatacatataagtgttgctttcactttaatattccttgtttctgtttttatatgacatctactaattcgcttttcagcccttacaaaaacaaagccgttttcaccagcacatgaatgtgaatgtcctagtgggtagaacaatatttcaaattttttttttttttttttttttttttttgagtcggagcgtctcgctctgtcacctaggctggactgcatacaatggcacaatctcggctcactgcaacctccgcctctcgggttcaagaaattctcctgcctcagcctcccgagtagctgggattacaggcacgtgccgccatgccatgctaatttttgtatttttagtagaaacggggtttcatcatgttggtgaggctggtcttgaacacctgacctcatgatccatccgcctcggcctcccaaagtgctgagattacagacataagccaccacgcccaggctttcaagttatgttttaagggagtacttcataggttttatagctcacttaagatcttgttggtggcaggacgcagtggctcatgccagtaatcccagcactttgggaggctgaggtgggcggatcacgatgtcaggagatcgagaccatcctggctaacatggtgaaaccccctctctactaaaaatacaaaaaattagccgggcgtggtggtgggcgcctgtagtcccagctactcgggaggctgaggcaggagaatggcgtgaacccgggaggcggagcttgcagtgagccgagattgcgacaccgcacttcagcctggataacagcgcgagactccgtctcagaaaaaaaaaaaaaaaagaccttgttgtcttagtgttatattctaaccttgcttgtatgatttcagagaagttgcttcttgacctacagaactcatatcctcaaagtgaactgtaaactcatttctaacattctttgtataattccggtttttagggaccctaagaaaatctatggccaaattaccattatcttaaacatgattgtaaaacataattcagaaaaaaaactctgattaattatattgcactgtattcaagtaaaacgtattacgtaaaatatgtatttgttaaaacttcctaggtctattctaaatgctgtgatgtttaaatatttaagaatttcttggagtttgtgattctttatttcaattccagtactttatgctctctttttctttttcactacacagcactttctcattctatatcattttgttaaaaggtgtatatattttttgtcctgaaaacataatatttcatgtagacccaatatagtcatgtagacctgatatatgaaataacatttattcattcaacacatatttattgaacacctggtctgttctagtactggagatacagccataaacaagcagaaccattcttgtctcatggagcttttactctagaggagagaaacaaacaatatcaaataagcataatatgctacatattgataatgctatgaagaaaaacatgtaacgtaattctgccccagagaatggcagaatgggatggtcagggaaggtctctctggtaagaaaaaacgacttacatgaggcaacaagccttgaagacaccttagagattattccaggttgagtaaacggtgttgataacttaagaagagatcatgctttgtgcattagaagagcagcaagtagaccagatgactggcttttacagtaagagaaaaggaggtcagagtagaaggatgtcagatcatgtaggatttgtaggcccctttgagaactttagattttattattctgcatgagattggaaaccactggagttctgaggcaaagaacatataatttggtttactttctaaagcaattgctctgagagcttaaaaaaagaataaaatttaggaaggcaaaaggggaagcaggaataataatcagggcaacttcaatcatttggaaggaaacaatggtgacttggacaaggttgtcggagtagaggtggagagaactagattaagtgtacattttgaaggctgagctagcaagatttgttgttgattatgtagagagcataagagaattggagctcaaggataatgacaatgtatatagcctgagcatctgaaatgattggcatgcaatttactgagatggggaagacaagactaaagaagggaaaagcaaattttcaaaaggaagggagaaatcaaaagtttaatctgagaagtagtcagttattcaaagtggggcctgtcgtggtggcttacgcctgtaatccaagcacttcaggaggctgaggtggccggatcacttgaggtcagaagttctagaccagcctggccaacatggtgaaaacccaactctactaaaaacaaaaattagccgggcatggtgtgtgtgcctgtagtcccggctactcagtaggctgaggcaggagaatagcttcaacctgtgaggcagaggctgcaatgcactgaggtcatgccactgcactccagcctgggtgacaaagcaagattccatctcaaaaaaaaaaaaaaaaaaaaaaagtgaaggattaaaaaataataaaaaaaataaaatgtttacctgaagggcctcaacatatttagagaataataattattttctatcgtttcatgttgtaggttgtctaccttcataacaacaatatctctgtagttggatcaagtgacttctgcccacctggacacaacaccaaaaaggcttcttattcgggtgtgagtcttttcagcaacccggtccagtactgggagatacagccatccaccttcagatgtgtctacgtgcgctctgccattcaactcggaaactataagtaattctcaagaaagccctcatttttataacctggcaaaatcttgttaatgtcattgctaaaaaataaataaaagctagatactggaaacctaactgcaatgtggatgttttacccacatgacttattatgcataaagccaaatttccagtttaagtaattgcctacaataaaaagaaattttgcctgccattttcagaatcatcttttgaagctttctgttgatgttaactgagctactagagatattcttatttcactaaatgtaaaatttggagtaaatatatatgtcaatatttagtaaagcttttcttttttaatttccaggaaaaaataaaaagagtatgagtcttctgtaattcattgagcagttagctcatttgagataaagtcaaatgccaaacactagctctgtattaatccccatcattactggtaaagcctcatttgaatgtgtgaattcaatacaggctatgtaaaatttttactaatgtcattattttgaaaaaataaatttaaaaatacattcaaaattactattgtatacaagcttaattgttaatattccctaaacacaattttatgaagggagaagacattggtttgttgacaataacagtacatcttttcaagttctcagctatttcttctacctctccctatcttacatttgagtatggtaacttatgtcatctatgttgaatgtaagcttataaagcacaaagcatacatttcctgactggtctagagaactgatgtttcaatttacccctctgctaaataaatattaaaactatcatgtgacttcatgtaatcaggctgaacatttctacaattactagatgtattagacgtaagtattttctttagttaaaccacccatgttagaaatgttttctgtagaatttataaacaactatcaatgcagacaatttaataagcctggggatgatttacttacagtaaacatttatcaaattgtacatttgtgctatcaacaattaataagcaaatatgtgaaaatagtttctgtcttctatgaagttagatatttgatggttaaaacccctataaatcatagtttcatatgggaaaaaataattgaaatacagtgtaaatttaaataatttattaagtatagcaaataattgaaatatggtggactaaattttgtcatagaaatatgtgcaagttatagtagtggctcacatgagaggtaa

SEQ ID NO: 23810 - DNA, 6251 bp, Homo Sapiens
gaattccgtattttatgggggaatctacttctatatatatacatgtatactgtttttcgtttttactttgtatatatttgcgcggagagaaatacctggaagattccatctagtgatttttttttttgttatttgtattttttcagctactgccttcttttctttttaggcattcagaatgtaaattacgccacttttcttctggatcttttttgacctttaaaaggctttgatgcttctcaataatttttttgtgtggtatatttttaaattttaaatctatataaagagttttgttttgtttttgcccgtttctcattttagttcaatgtggactatatggcaaagtgcgcaattcggttgaatttttctttggaacaaacattcgtaccattattgtaaaaaaaaaaaaaacatcctgttctctgcaaactaaatcagttgctcaggaaggtccttttatcagagggaatcacagaggtttgagttctatcatcgtcaaaagcattgtggaagggtagtattatagctttgaacaagatttatctattgagttattgatttatataatgaccaaagtggaaaaaaaaaaaagatgtgtattcaatattgttttcaattatgctttattttatgattacatatataacgacttatcatgaaatatatttctaaaaaagttgttctttctttgacatatcacagctgagcattggattttttctacctgaaagtgtcattttttgagcaaaattgagcaaattgcagaaattctcacgcaatttgaatagaataaaggaagtttgatttccaatgaaaattgtttttatacttcgagaaatttattcaagccttgtaaattaaatatccatttctttactttttgatttaaattgcgtgaagaacagaaacgtttctggtcagaatggagaggatgctctttccctttataatgcactctttttgtttgtgtagcaaccttacatgtttacggacttttcagcatgctcatctctctaaatcggaaatttcttcaattgattgtgtacagaagcaagctagtcgataggagtttgcagctttgagctttgatggcttgttggtggtcgttgactttttttttgtgtgtgatgctcaccctcacggcggtttgatctttgtccatttcgtgttttttcttcttcttttttcacataacaaacaaaccagggagaaaaacttttttaggttttttgtttatatcgcgtttttttttgtttctaaggatgtctgacgaagaacagtccgctattgtctgtgacaacggctctggcatggtgaaggccggcttctccggcgatgatgcgccgcgccatgtgtttccatccattgttggccgaccaaagaacgagcaagcgatgatgggaagcgccagcaagaagctttttgttggcgacgaggctcaagcaaagcgtggcgtgctttcgctcaagtatcctatcgaacacggtatcgtcaccaactgggatgacatggagaagatctggcatcacaccttctacaatgagctgcgcgtcaacccggagtcacacagcgtcctactaacagaagcccctatgaaccccaagcaaaatcgtgagaagatgacacagatcatgtttgagacctttggtgtccccgccatgtacgttggcattcaggcagtgctctcactctactcgtccggacgaaccaccggtatcgttcttgatgctggtgatggcgtgacccacaccgtccctatttacgagggatactctctcccacatgccattcgccgtatggacatggctggccgggacctcacggaatatctgatgaagcttctgatggagagtgggatgacgttcactacgtctgccgagaaggagattgttcggaatgtgaaggaacaactgtgctatgttgctttggactttgatgaagaggtgacgaacagtgccaaaactgttaacgaggagccgtttgagctcccagatggcacaatcatgcaggtgggtaaccagcgcttccgctgccccgaggcgcttttcaagcccatgttgattggcctcgatgaagcccccgggttccatgagatgaccttccagtccatcaacaaatgcgatattgacgtgcgtcgcgacctgtacgggaatattgtgctctctggcggcaccacaatgttcaagaatcttccagagcgtcttggaaaggagatcagtaaccttgcaccttcttcaattaagccgaaggttgttgcgccaccggagcggaagtacagtgtatggattggaggctccatcctttcatcccttacgacattccagacaatgtggatcaagaagagtgagtatgacgaggcaggcccaagcattgtgcacaacaaatgcttttagtaatctctgcataaaggtgaatagttttcctatcaccggaattatttttcttccgtgggcttaccgttttctgtccttgtaaggtttctgagatcgcgttcccatatatatatatctttttttcaagtgttgatttactgaaggagcttttaataataatttcaagccagtcataatcggaatctgaacattcaagagattttttttttcaaaccttcctccatgtttgcgtgagcgagctagtcgataggagtttgcagctttgagctttgatggcttgttggtggtcgttgactttttttttgtgtgtgatgctcaccctcacggcggtttgatctttgtccatttcttgttttttcttcttcttttttcacataacaaacaaaccagggagaaaaacttttttaggttttttgtttatatcgcgtttttttttgtttctaaggatgtctgacgaagaacagtccgctattgtctgtgacaacggctctggcatggtgaaggccggcttctccggcgatgatgcgccgcgccatgtgtttccatccattgttggccgaccaaagaacgagcaagcgatgatgggaagcgccagcaagaagctttttgttggcgacgaggctcaagcaaagcgtggcgtgctttcgctcaagtatcctatcgaacacggtatcgtcaccaactgggatgacatggagaagatctggcatcacaccttctacaatgagctgcgcgtcaacccggagtcacacagcgtcctactaacagaagcccctatgaaccccaagcaaaatcgtgagaagatgacacagatcatgtttgagacctttggtgtccccgccatgtacgttggcattcaggcagtgctctcactctactcgtccggacgaaccaccggtatcgttcttgatgctggtgatggcgtgacccacaccgtccctatttacgagggatactctctcccacatgccattcgccgtatggacatggctggccgggacctcacggaatatctgatgaagcttctgatggagagtgggatgacgttcactacgtctgccgagaaggagattgttcggaatgtgaaggaacaactgtgctatgttgctttggactttgatgaagaggtgacgaacagtgccaaaactgttaacgaggagccgtttgagctcccagatggcacaatcatgcaggtgggtaaccagcgcttccgctgccccgaggcgcttttcaagcccatgttgattggcctcgatgaagcccccgggttccatgagatgaccttccagtccatcaacaaatgcgatattgacgtgcgtcgcgacctgtacgggaatattgtgctctctggcggcaccacaatgttcaagaatcttccagagcgtcttggaaaggagatcagtaaccttgcaccttcttcaattaagccgaaggttgttgcgccaccggagcggaagtacagtgtatggattggaggctccatcctttcatcccttacgacattccagacaatgtggatcaagaagagtgagtatgacgaggcaggcccaagcattgtgcacaacaaatgcttttaatattgtggtctgtatggatgaaagtaatgcatgctaatcgcgtatttgtatcgtttttttttttttttgtgcgttccctattataggttaatttcttgttatgttagagtttagaggaatgctagcgtatattatatatatatatatatataataccactgatattactagtatgatgcagcatttttcttaattttcttggggtactaatttttctttttgttaggaaggtaattgagaaaattggcgtcatgcttcttatagttgttctttttcccctttattttgcgtgtgttgcctcatcagtttgacatgtttccacttgttttactcgtctgcgtgttttttttttcctctcaatctctctttttctgtttatggttttttgctttgtcgaagattggtctgaaggaagatgaatgcacaaaagggttgtgagcgcagcactgaaaggtcctttgagacgcagtccataacggaggaaaattgtgggcaacagtcgcagtatttgaatacaaaggaaagctcacctttgtcagcattccaactccttgggaagctgaaggccgttattaatgaggtggcgttggctttagagaaccctgcaaaagcgctttcggtggacgactgcatcagtatcacggaagagggattgcgggcttttaaaaccattaaagttggccgaaggattgatggccgtcggcaactgaacttgaactccagtcgcctgagtggggcttcgccgacgaatcgtgaggtgggcgacggtgatcatgctgagagtgacgccgcgttgtcgtcgaggcggcagcatctgtgctcaccaaacagcaaaaaagtttctccgaaaagaatggagagtgagtaccagcgacgcgacgggattgaggcggctcggcaggcttcggctctccgcagcgaggagcggcaacgcaaggctgaggagcggcggctggaaaagttacaagagatgaagtcgaaacttgtggctgcgggggaaagaagttttcaggcgaagcaacgccgcacgcaggctgaggaacggctgaggaatgacacgcttgagcgacacgaaaacggggctcgccgtgtcgaggaggcacgagagcagacgaaggagcgcgccagaaggggccattcacgggtggaagaggtgcgactgaactacgagctgcgaaatcaaacaaaagctcttctgcttgatcgcaagatgtcggaggttgaacacaaccaagaacagaagcgggaagagcttcagcggcatgcgcaggagcggaatgaggccatgctggccgtcgcagagcgacgacgtaatctcagccaagagcgcattgagcggcaacagcagcgtgagcagcaacgacgagagaatctcagacgccatgaggagcagaaaaaacttgaaaaggatttgaaggagcagcgggctgaagaatgggaaaagaaggtgcaacaacggcaacgagatgcgtgcgccgaggcagaggcacgcggtcggaaggttgaggaacgtattcaacaaagtgtacatctacgtgaagagaagagagagatgttgcgccagaagcttgagaaacaagagcagaaaataaaagaggctcgtcagcgcaaggagcgtgaggcggataccaagcccaccatcaaggagcttatgccattcatctcatcgcaagaagaggagcaattggcacagaaattggcgaaagttgtggctgttactgcgcgccaagggaagagttatatggaaatttaccagaaggaaagcacaatgagcgcaaaggatttgaatcggagcaaattgcggtctattatcagtcgtcttggctcaaacacatcatccgcttcattggttcaatgtcgtcaatcgcttcatgacctgctgggcatgacggagttcgcggatgtagatcatgaatatgtacgatattttaacagttatgagagttttgcccgcgttctgatggattctcgccggacgagtgatatggtgactttccgtttggcccataatgcgctaatacgttttcttactgatgctaatgaggggaaaaaacatgtactgatgtttattcgatcaggcaatcttgcaccgcttttactctgcatccgtgatgagataaaaggcctaaagcgtcacagtcactctattccacttgcagcctcacttgaaatattacaactttgttttgaacgtattgccatagatgctcagacgaatgtcaaacttattacggtgagggaccagttgttggccgatctggatgcggcaggaatcgat

SEQ ID NO: 23811 - DNA, 750 bp, Homo Sapiens
ttcgagcgggccgccgggcaggtcccaggcaaaatgaaaatacttgtggcatttctggtggtgctgaccatctttgggatacaatctcatggatacgaggtttttaacatcatcagcccaggcaacaatggtggcaatgttcaggagacagtgacaattgataatgaaaaaaataccgccatcattaacatccatgcaggatcatgctcttctaccacaatttttgactataaacatggctacattgcatccagggtgctctcccgaagagcctgctttatcctgaagatggaccatcagaacatccctcctctgaacaatctccaatggtacatctatgagaaacaggctctggacaacatgttctccagcaaatacacctgggtcaagtacaaccctctggagtctctgatcaaagacgtggattggttcctgcttgggtcacccattgagaaactctgcaaacatatccctttgtataagggggaagtggttgaaaacacacatagtgtcggtgctggaggctgtgcaaaggctgggctcctgggcatcttgggaatttcaatctgtgcagacattcatgtttaggatgattagccctcttgttttatcttttcaaagaaatacatccttggtttacactcaaaagtcaaattaaattctttcccaatgccccaactaattttgagattcagtcagaaaatataaatgctgtatttatagaaaaaaaaaaaaaaaaaaaaaaaaaaa

SEQ ID NO: 23812 - DNA, 3675 bp, Homo Sapiens
cttggccgggcgtagacgcggtggcagagcccgcgcggcgctggaagcgagtggcggagcggcgggacctcggcggactcgccatggaggaggagggtgtgaaggaagccggtgagaagcctcggggagcacagatggtggacaaggctggctggatcaagaagagcagtgggggcctcctgggtttctggaaagaccgatatctgctcctctgccaggcccagctgctggtctatgagaatgaggatgatcagaagtgtgtggagactgtggagctgggcagctatgagaagtgccaggaccttcgtgccctcctcaagcgaaaacaccgctttatcctgctgcgatccccagggaacaaggtcagcgacatcaaattccaggcacccaccggggaggagaaggaatcctggatcaaagccctcaatgaagggattaaccgaggcaaaaacaaggctttcgatgaggtaaaggtggacaagagctgcgccctggagcatgtgacacgggaccgggtgcgagggggccagcgacgccggccaccaacgagagtccacctgaaggaggtggccagtgcagcttctgacggtcttctgcgcctggatcttgatgttccggacagtgggccaccagtgtttgcccccagcaatcatgtcagtgaagcccaacctcgggagacaccccggcccctcatgcctcctaccaagcctttcctagcacctgagaccaccagccctggtgacagggtggagacccctgtgggggagagagccccaacccctgtctcagcaagctctgaggtctcccctgagagccaagaggactcagagaccccagcagaggaggacagtggctctgagcagcctcccaacagcgtcctgcctgacaaactgaaggtgagctgggagaaccccagcccccaggaggcccctgctgcagagagtgcagaaccgtcccaggcaccctgttctgagacttctgaggctgcccccagggagggtgggaagccccctacacccccacccaagatcttatcagagaaactgaaagcctccatgggtgagatgcaggcttctgggccacctgctccaggcacagtgcaggtctcagtgaatggcatggatgacagtcctgagcctgccaagccctctcaggctgagggcaccccaggaactcctccaaaggatgcaacaacatccacagcactgcccccctgggacctgccacctcagttccatccccgctgctcctcccttggggacttgcttggggaaggcccgcggcatcccttgcagcccagggaacggctatatcgggcccagctggaggtgaaggtggcctcggaacagacggagaaactgttgaacaaggtgctgggcagtgagccggcccctgttagtgccgaaacattgctcagccaggctgtggagcagctgaggcaggccacccaggtcctgcaggaaatgagagatttgggagagctgagccaggaagcacctgggctaagggagaagcggaaggagctggtgaccctctacaggagaagtgcaccctagggccttctgggccagaggcaccatcccttctggccatccatcaagtccatcaaggcccagccctgctgagaaatgtgcttctgcttctacagcaatggctgcaggagggccattgggcatgtcagggtttggccatgacccgaagagactcctggcgtccttcctactctgctctggccagtggtgccaggtgccacccagggctactgcctggctatctggcctggcctctgggctggggctggggctgggagcacacacgctgggacctatgtgtttgtgtggtcgttccaaactgccccagggctttgggggcggcacttggggtttctgggaatgacatcatctctgttccccatccccagtagtttacattcctgacttctgaatacagcacagctgagccccctgcagctcccatctccagctattcctaggcaaagagcctcatggctaaggcagcctcaaagccagcccctcctcccacctattctgagtagctgcagaggccttgggtccaggctctaggttcatccctcagttggggggaacgtaggacccagctggagcctcttgagggagatgagaggcctctttgtgaggaggacattagctgtgtggcctctctctctttggccctgtttccttttttgcaaaacaaggacattttctgcagccccttcctctcagtgagctatgattggagggcttaggtctggaggattcaagagtggaagaggaatttaaggggtcccctagtctagtctctgcccctggatagtgtccagccttgtatatttctgaagaggtggatcccagagtggctctgatgtccacattagaaaagcttacttgtaatgatcatgtcagccttcagaagagaatccccaccaacttctgtgcctcctcagatggggatttatctggatctctgtggttccttctcagccgaaacaggtccagtatcccagtcatttcttcaaatgctgataggggtatgttggaatccgaagccacttccccgccttcaagccccagatgggctgctctcctgtaactttctaggagaagagacattttcttctttccctttcctggtccatccctgcaccctggtcctctcccagcctctcccccacattgtccctgactctaggggcacatccagtctccatcgtgctgcagcagctggactgagggcagagcctgtaggtgcagaggccctggctcccgaggtccagccactctccctggggcctctggggtgagagcagcttccgataggacctgcccagatttctgcatgtgcacttttgtttactgaaagagagaaaggggggggtcacagcaacatgccctggcctttctgccctgttccccaaccccactgaggcctgctgcacaggtcaatgccttcgttatcgttattgtactgtcactttgttcttgaggtagtagtcaaggatcaggaggggcagatgtcttctctgggctgcgtggggccggagcagaggtgagcagcaatgcactggttcgggagcccccatcagcctccttgtgcaaactgggcccccatgccacagtctggctttccctccatctgccccaggacaagagcaagaaggacatcagttgcccagtcatgtgatcccctgccatcttgccttaggaacagccttcccccaccagcagccatggctggctggggcgttagccaagccacctactgccaggaattggagcctcagttccctcctgtgtcaagtagctaactgcagcagctggactgagggcagagtctgtgggtgcagagaccctgcatgtaggtcacaggttgaggcccagccactctccctggggcctggtgggtaggcaagtagctctggggccacctcaagtgaccaaatgctattaatttccatcctttagcaggctgggccctaggcaggaagctggcttctgggagaggagtgagaacgtgcagggcctgcctagcttgcgtgcttgaggaaggtggcattccgtgcttgcctccttgaggagggtggcattctgtgtcttctgcttatgaagcgcctttcttaaagtttggcaataaaatccatttttatggaaaaaa

SEQ ID NO: 23813 - DNA, 2881 bp, Homo Sapiens
cggctcgcggccggctccgcgccgcatcgctcgggtgcagcgcagctcagcgcagcgctgcggcctttcggcagccgaacggccgcggcagttcaggacaaagaggtgtgggcaggccactgggccagctggtaacatcatggcagagaaagtgaacaacttcccaccattgcccaaattcatcccgctgaagccatgtttctaccaagacttcgaggcagatattcctccccagcatgtcagcatgaccaagcgcctctactacctctggatgttgaacagcgtcacgctggccgtgaacctggtgggctgtctcgcgtggctgatcggaggcgggggagccaccaactttggcctcgcctttctctggctcatcctcttcacaccctgctcctacgtctgctggtttcggcccatttacaaggccttcaagactgacagctccttcagtttcatggcattcttctttaccttcatggctcagttggtcatcagcatcatccaggccgtgggcatcccaggctggggcgtctgcggctggattgctaccatctccttcttcggaacgaacattggctcggcggtggtgatgctaattcccactgtcatgttcacagtgatggccgtcttttccttcatcgccctcagcatggttcataaattttaccggggaagtggggggagtttcagcaaagctcaggaggagtggaccacaggggcctggaagaatccacatgtgcagcaggcagcccagaacgcagccatgggggcagcccagggtgccatgaatcagcctcagactcagtattccgccacccccaattacacgtactccaatgagatgtgaaccagccacgcctaccaggtggcagagctggggccattgggacagggggctcaagccacatcgtcatttgtggttaccaagcagggttcccccttcccttttctccttccctactttgtacaaaggaccagagttatatatatatatatatgtatatgtctgtaccccagcccccacctttcagattctgctcttggcactcagctgtgggctgcacgtggagctgtcccgtgcggtagtagctgtgtctgtgtcccctcgtgaaatagtgtgcagtggaggtctcttgtggtgctagatgtgtgtttagagctaaaccagcccccacccccaccctccacctgcccctcttgcctctggcccctctgaccctggcccagggacccctcacggggccaggggaggcatagcagaaagactggccccttcctagggttatgagctggaactgtttctactttcagtcttcctgggaagtaacagtacttagcactcttggtggtgggtgggagggtgggtacaggccagggatattcccttgctcttttgatccctccaggcctcgcctccttcagcctcctcctccctcatctgttccctgatgtcacattccctgtgcaatcttcccttgcccatggtctgtctatctctttcctatgtggcttttctttgtcttccccaaggctgagtgtcccagttttatctgctcctgagactgagcccagatccccaaatctaatctgatttacagttcaaggaagctgatggggagctgggccttacccctgatgtaggaggggcacacagctgggggtgcagagcccacctgggtacctgacccccaggggatgaaaatgcaaggatgagtctgcttgggcctgagagtttgatctgcaggggcaggctcatcttttctctcccctgccttctcctccttctctccccagagcccccttgagcccctctgcctatgtccctctgcctcctccccatgcccccagttgctgtggcttgattctgctaccctgaccccaccatgtgccaggtggcatctgccttactgccttccctgaggagctgggacatgctgggcagttgtcagatgtaaaggcacagctggagcagagggcatgtcagtaatgattggtccctggggaaggtctggctggctccagcacagtgaggcatttaggtatctctcggtgaccgttggattcctggaagcagtagctgttctgtttggatctggtaggacagggctcagagggctaggcacggagggaaggtcagaggagaaggcaggcagggcccagtgagaggggagcatgccttcccccaccctggcttgctcttggtcacagggcggttctgggcacttgaactcagggcccaagcagaagcacaggcccagtcctggctgcaagcacaatagcctgaatgggatttcaggttaggcagggtgggaggggaggctctctggctttagttttgttttgttttccaaatcaaggtaacttgctcccttctgcctacaggccttggtcttggcttgtcctcacccagtcggaactccctaccactttcaggagagtggttttaggcccgtggggctgttctgttccaagcagtgtgagaacatggctggtagaggctctagctgtgtgcggggcctgaaggggagtgggttctcgcccaaagagcatctgcccatttcccaccttcccttctcccaccagaagcttgcctgagctgtttggacaaaaatccaaaccccacttggctactctggcctggcttcagcttggaacccaatacctaggcttacaggccatcctgagccaggggcctctggaaattctcttcctgatggtcctttaggtttgggcacaaaatataattgcctctcccctctcccattttctctcttgggagcaatggtcacagtccctggtacctgaaaaggtacctaggtctaggcccttcttccctttcccttcctctcccctaccccagaactttggctccctttccctt

SEQ ID NO: 23814 - DNA, 2844 bp, Homo Sapiens
cagccaccttcatgtgcctttttcctttgtctttccccaaaattccaggaccagagatctggccctggcctattttctcttgctgtgtacacacacgcacacatgctgggtggcaggatctcgcccgctggagggtggtggagcccagtagaattggggtgactgggcataaacctgctgagactgcttccttccctggttgtgagtgatgtgaatgcctgccttccccggtcagcacttagaagcccttgataggcagcatttggcgacttgtggggcaggtgtttgggataaatcctaccttcatcctaggacttatttctgcatcagccttttaactcaggcacttcaggtaacgtgatctatgtgtgttttgactgaatctcatctcctgtgtttccctgtgcagtctagggaagcatgtctccagtctttgtccctgtcttgtcccaaccattaattctcatgtcacagcttctcactgcatgtgacaagagccaggcctatctgctagggccctgcggctgaggtctgacctggaccctcatgcccgagtcggaagacccctctccagaagccattctgcatccttgtctgctctgcgtcacccgagaacacaggcttcgcagcctcgctttctgaaatggtgtgtgccgagtcagattgccgctcagagaaaatacaagcccgttttccctagctgtgccatttggtgctctgccaggctgccgtgcaagggaataccgacgagacgagctgcactgtctctgatttggagccctcaccggagcttgtctttaaaaatgagcaggaagctcatgtatgtttgcatttcagtgagccgggtcctgacctgccgccacccatcacggtcagcgtggtgcatcttaccgaggaggcgcaggcctggattcttttgagtggtgctactgcctaggaagtaacacgtggagaatttccatcttgggaccatgcacacagtgccttggggagtagattttgccctaatagcgatgaagaattttatcagtcagtggagttcctttttcagatcagggatgggaaagagccaaactgggtacctcccacgtgtgccccgtgaacagccctttgcagctgggctgtggggcttggctgctgccctgtcccatctggcagttaacgccttctccctgctctgccccccactccccaaaaccagttgcagcctcaacccacatggggatgtagaaagccgtaaagtccacgctactgttgaaaatgtttacatctccgctctcaacctgccttgggttcgtgttaaatggtgttaaattctgcaaatggaggggaaaaaaatcaaattctaaatttcaaagtagaatttaaagcaaatttgtaaaaaaattatcctaccaccccttttggtccacttaagatatgccacgctgaagcaaggtatttcctactggattttgctttcactggtgtttagaaaataaacttgatttctctaggagcactcctttggttagagggatgcaagaaggagaggtgaaggtggcgtgtggtggctcatgcctgtaatcccagcactttggggaggccgaggcaggcggatcacttgaggccagcagtttgagaccagcctggccaacatgatgaaaccccatctctactaaaaatacaaaaaattagctgggcatggtggcaggcacctgtaatcccagttacttgggaggctgaggcaggagaattgcttgaacccaggaggtggaggttgcagtgagctgagattgtgccactgcacttcagcctgggcgacagagtgactctgtcaaaaaggaaaggcaaaaaccggaccctggagctctgtgggccctgattgcaggcccctccctgtgtgatgaagggatgagtcagcttggggagccacttggccagcctgcatgcctggtcatcaggaggttgagaaaagccttgaaagttgtgaagcactgagcagatacaagtgtttgttaattttgtagaaattaactttcccatctggcctttatctccaaagttggtattgttgctccacgcagactgcagtccggtttcttattgtgactttgacaatgcaaagtgcaaaataggaagaggcctccccaccccactatcccaccctggtgaccaattcagtgtaaccattgcacgtactcagtcattggtgtctttggagtgacatctgcagccagttagtgccacctgagtacagcactcgtacttttacatgatgtgtgtgtgagtagctcttctgtccaaaccatgatttgaggttcaactacctgtagatcaaagctttattttagaacgataaactgattttttccaaatgggtgaaatcttctccccatgactatgttttcttaactttgcattgaatctatttactgggttacattctatgtgtagtttgctttcttcatttttttttcttttaaaatgctcatgtcttattccaagcaccttcctccaaagtccccataaagctgcatctccaacacattgttatgccaataaggttttatttaactttatttaaggatgattgtgtctttgaatgacaaatgtactgctgcttcctacctgcaagacgcacaatgtatgtttcaagggtgagcaagtgttatttcttaaatttctcaaatgcctgtagtaactattgtttctgcctctcaattgttgccagctctttgaagaaggggagaattgtgtgtttttgtgtgggatgtttctgatatgctgctacagttgcaaaacactggagctagagaaaataaagtactgatcttcgaaaaaaaaaaaaaaaaaaaaaaaaaa

SEQ ID NO: 23815 - DNA, 3266 bp, Homo Sapiens
gagatcatggcccgcctcttcagcccccggccgccccccagcgaagacctcttctacgagacctactacagcctgagccagcagtacccgctgctgctgctgctgctggggatcgtgctctgtgcgctcgcggcgctgctcgcagtggcctgggccagcggcagggagctgacctcagacccgagcttcctgaccactgtgctgtgcgcgctgggcggcttctcgctgctgctgggcctcgcttcccgggagcagcgactgcagcgctggacgcgtcccctgtccggcttggtatgggtcgcgctgctagcgctaggccacgccttcctgttcaccgggggcgtggtgagcgcctgggaccaggtgtcctattttctcttcgtcatcttcacggcgtatgccatgctgcccttgggcatgcgggacgccgccgtcgcgggcctcgcctcctcactctcgcatctgctggtcctcgggctgtatcttgggccacagccggactcacggcctgcactgctgccgcagttggcagcaaacgcagtgctgttcctgtgcgggaacgtggcaggagtgtaccacaaggcgctgatggagcgcgccctgcgggccacgttccgggaggcactcagctccctgcactcacgccggcggctggacaccgagaagaagcaccaggaacaccttctcttgtccatccttcctgcctacctggcccgagagatgaaggcagagatcatggcacggctgcaggcaggacaggggtcacggccagagagcactaacaatttccacagcctctatgtcaagaggcaccagggagtcagcgtgctgtatgctgacatcgtgggcttcacgcggctggccagcgagtgttcccctaaggagctggtgctcatgctcaatgagctctttggcaagttcgaccagattgccaaggagcatgaatgcatgcggatcaagatcctgggggactgttactactgtgtctctgggctgccactctcactgccagaccatgccatcaactgcgtgcgcatgggcctggacatgtgccgggccatcaggaaactgcgggcagccactggcgtggacatcaacatgcgtgtgggcgtgcactcaggcagcgtactgtgtggagtcatcgggctgcagaagtggcagtacgacgtttggtcacatgatgtcacactggctaaccacatggaggcaggcggtgtaccagggcgagtgcacatcacaggggctaccctggccctgctggcaggggcttatgctgtggaggacgcaggcatggagcatcgggacccctaccttcgggagctaggggagcctacctatctggtcatcgatccacgggcagaggaggaggatgagaagggcactgcaggaggcttgctgtcctcgcttgagggcctcaagatgcgtccatcactgctgatgacccgttacctggagtcctggggcgcagccaagccttttgcccacctgagccacggagacagccctgtgtccacctccacccctctcccggagaagaccctggcttccttcagcacccagtggagcctggatcggagccgtaccccccggggactagatgatgaactggacaccggggatgccaagttcttccaggtcattgagcagctcaactcgcagaaacagtggaagcagtcgaaggacttcaacccactgacactgtacttcagagagaaggagatggagaaagagtaccgactctctgcaatccccgccttcaaatactatgaagcctgcaccttcctggtttttctctccaacttcatcatccagatgctagtgacaaacaggcccccagctctggccatcacgtatagcatcaccttcctcctcttcctcctcatcctttttgtctgcttctcagaggacctgatgaggtgtgtcctgaaaggccccaagatgctgcactggctgcctgcactgtctggcctggtggccacacgaccaggactgagaatagccttgggcaccgccaccatcctccttgtctttgccatggccattaccagcctgttcttcttcccaacatcatcagactgccctttccaagctcccaatgtgtcctccatgatttccaacctctcctgggagctccctgggtctctgcctctcatcagtgtcccatactccatgcactgctgcacgctgggcttcctctcctgctccctctttctgcacatgagcttcgagctgaagctgctgctgctcctgctgtggctggcggcatcctgctccctcttcctgcactcccatgcctggctgtcggaatgcctcatcgtccgcctctatctgggccccttggactccaggcccggagtgctgaaggagcccaaactgatgggtgctatctccttcttcatcttcttcttcaccctccttgtcctggctcgccagaatgagtactactgccgcctggacttcctgtggaagaagaagctgaggcaggagagggaggagacagagacgatggagaacctgactcggctgctcttggagaacgtgctccctgcacacgtggccccccagttcattggccagaaccggcgcaacgaggatctctaccaccagtcctatgaatgcgtttgtgtcctcttcgcctcagtcccagacttcaaggagttctactctgaatccaacatcaatcatgagggcctagagtgtctgaggctgctcaatgagataattgctgattttgatgagctgctctccaagcccaagttcagtggggtggagaagatcaagaccatcggcagcacctacatggcagccacaggcttaaatgccacctctggacaggatgcacaacaggatgctgaacggagctgcagccaccttggcactatggtggaatttgccgtggccctggggtctaagctggacgtcatcaacaagcattcattcaacaacttccgcctgcgagtggggttgaaccatggacccgtagtagctggagttattggggcccagaagccgcaatatgacatttggggcaacacagtgaacgtggccagccgcatggagagtacaggagtccttggcaaaatccaagtgactgaggagacagcatgggccctacagtccctgggctacacctgctacagccggggtgtcatcaaggtgaaaggcaaagggcagctctgcacctacttcctgaacacagacttgacacgaactggacctccttcagctaccctaggctgagattgcactcgccttctaagaacctc

SEQ ID NO: 23816 - DNA, 4061 bp, Homo Sapiens
ggtctggaagcagagccggcggagggagcgccggggccctgggctgcaggaggttgcggcggccgcggcagcatggtggtgccggagaaggagcagagctggatccccaagatcttcaagaagaagacctgcacgacgttcatagttgactccacagatccgggagggaccttgtgccagtgtgggcgcccccggaccgcccaccccgcagtggccatggaggatgccttcggggcagccgtggtgaccgtgtgggacagcgatgcacacaccacggagaagcccaccgatgcctacggagagctggacttcacgggggccggccgcaagcacagcaatttcctccggctctctgaccgaacggatccagctgcagtttatagtctggtcacacgcacatggggcttccgtgccccgaacctggtggtgtcagtgctggggggatcggggggccccgtcctccagacctggctgcaggacctgctgcgtcgtgggctggtgcgggctgcccagagcacaggagcctggattgtcactgggggtctgcacacgggcatcggccggcatgttggtgtggctgtacgggaccatcagatggccagcactgggggcaccaaggtggtggccatgggtgtggccccctggggtgtggtccggaatagagacaccctcatcaaccccaagggctcgttccctgcgaggtaccggtggcgcggtgacccggaggacggggtccagtttcccctggactacaactactcggccttcttcctggtggacgacggcacacacggctgcctggggggcgagaaccgcttccgcttgcgcctggagtcctacatctcacagcagaagacgggcgtgggagggactggaattgacatccctgtcctgctcctcctgattgatggtgatgagaagatgttgacgcgaatagagaacgccacccaggctcagctcccatgtctcctcgtggctggctcagggggagctgcggactgcctggcggagaccctggaagacactctggccccagggagtgggggagccaggcaaggcgaagcccgagatcgaatcaggcgtttctttcccaaaggggaccttgaggtcctgcaggcccaggtggagaggattatgacccggaaggagctcctgacagtctattcttctgaggatgggtctgaggaattcgagaccatagttttgaaggcccttgtgaaggcctgtgggagctcggaggcctcagcctacctggatgagctgcgtttggctgtggcttggaaccgcgtggacattgcccagagtgaactctttcggggggacatccaatggcggtccttccatctcgaagcttccctcatggacgccctgctgaatgaccggcctgagttcgtgcgcttgctcatttcccacggcctcagcctgggccacttcctgaccccgatgcgcctggcccaactctacagcgcggcgccctccaactcgctcatccgcaaccttttggaccaggcgtcccacagcgcaggcaccaaagccccagccctaaaagggggagctgcggagctccggccccctgacgtggggcatgtgctgaggatgctgctggggaagatgtgcgcgccgaggtacccctccgggggcgcctgggaccctcacccaggccagggcttcggggagagcatgtatctgctctcggacaaggccacctcgccgctctcgctggatgctggcctcgggcaggccccctggagcgacctgcttctttgggcactgttgctgaacagggcacagatggccatgtacttctgggagatgggttccaatgcagtttcctcagctcttggggcctgtttgctgctccgggtgatggcacgcctggagcctgacgctgaggaggcagcacggaggaaagacctggcgttcaagtttgaggggatgggcgttgacctctttggcgagtgctatcgcagcagtgaggtgagggctgcccgcctcctcctccgtcgctgcccgctctggggggatgccacttgcctccagctggccatgcaagctgacgcccgtgccttctttgcccaggatggggtacagtctctgctgacacagaagtggtggggagatatggccagcactacacccatctgggccctggttctcgccttcttttgccctccactcatctacacccgcctcatcaccttcaggaaatcagaagaggagcccacacgggaggagctagagtttgacatggatagtgtcattaatggggaagggcctgtcgggacggcggacccagccgagaagacgccgctgggggtcccgcgccagtcgggccgtccgggttgctgcgggggccgctgcggggggcgccggtgcctacgccgctggttccacttctggggcgcgccggtgaccatcttcatgggcaacgtggtcagctacctgctgttcctgctgcttttctcgcgggtgctgctcgtggatttccagccggcgccgcccggctccctggagctgctgctctatttctgggctttcacgctgctgtgcgaggaactgcgccagggcctgagcggaggcgggggcagcctcgccagcgggggccccgggcctggccatgcctcactgagccagcgcctgcgcctctacctcgccgacagctggaaccagtgcgacctagtggctctcacctgcttcctcctgggcgtgggctgccggctgaccccgggtttgtaccacctgggccgcactgtcctctgcatcgacttcatggttttcacggtgcggctgcttcacatcttcacggtcaacaaacagctggggcccaagatcgtcatcgtgagcaagatgatgaaggacgtgttcttcttcctcttcttcctcggcgtgtggctggtagcctatggcgtggccacggaggggctcctgaggccacgggacagtgacttcccaagtatcctgcgccgcgtcttctaccgtccctacctgcagatcttcgggcagattccccaggaggacatggacgtggccctcatggagcacagcaactgctcgtcggagcccggcttctgggcacaccctcctggggcccaggcgggcacctgcgtctcccagtatgccaactggctggtggtgctgctcctcgtcatcttcctgctcgtggccaacatcctgctggtcaacttgctcattgccatgttcagttacacattcggcaaagtacagggcaacagcgatctctactggaaggcgcagcgttaccgcctcatccgggaattccactctcggcccgcgctggccccgccctttatcgtcatctcccacttgcgcctcctgctcaggcaattgtgcaggcgaccccggagcccccagccgtcctccccggccctcgagcatttccgggtttacctttctaaggaagccgagcggaagctgctaacgtgggaatcggtgcataaggagaactttctgctggcacgcgctagggacaagcgggagagcgactccgagcgtctgaagcgcacgtcccagaaggtggacttggcactgaaacagctgggacacatccgcgagtacgaacagcgcctgaaagtgctggagcgggaggtccagcagtgtagccgcgtcctggggtgggtggccgaggccctgagccgctctgccttgctgcccccaggtgggccgccaccccctgacctgcctgggtccaaagactgagccctgctggcggacttcaaggagaagcccccacaggggattttgctcctagagtaaggctcatctgggcctcggcccccgcacctggtggccttgtccttgaggtgagccccatgtccatctgggccactgtcaggaccacctttgggagtgtcatccttacaaaccacagcatgcccggctcctcccagaaccagtcccagcctgggaggatcaaggcctggatcccgggccgttatccatctggaggctgcagggtccttggggtaacagggaccacagacccctcaccactcacagattcctcacactggggaaataaagccatttcagaggaaaaaaaa

SEQ ID NO: 23817 - DNA, 10907 bp, Homo Sapiens
tgagcagcctgagatgtcagtaattgtagctgctccaagcctgggttctgttttttagtgggatttctgttcagatgaacaatccatcctctgcaattttttaaaagcaaaactgcaaatgtttcaggcacagaaaggaggcaaaggtgaagtccaggggaggtcaggggtgtgaggtagatgggagcggatagacacatcactcatttctgtgtctgtcagaagaaccagtagacacttccagaattgtcctttatttatgtcatctccataaaccatctgcaaatgagggttatttggcatttttgtcattttggagccacagaaataaaggatgacaagcagagagccccgggcaggaggcaaaagtcctgtgttccaactatagtcatttctttgctgcatgatctgagttaggtcaccagacttctctgagccccagtttccccagcagtgtatacgggctatgtggggagtattcaggagacagacaactcactcgtcaaatcctccccttcctggccaacaaagctgctgcaaccacagggatttcttctgttcaggtgagtgtagggtgtagggagattggttcaatgtccaattcttctgtttccctggagatcaggttgcccttttttggtagtctctccaattccctccttcccggaagcatgtgacaatcaacaactttgtatacttaagttcagtggacctcaatttcctcatctgtgaaataaacgggactgaaaaatcattctggcctcaagatgctttgttggggtgtctaggtgctccaggtgcttctgggagaggtgacctagtgagggatcagtgggaatagaggtgatattgtggggcttttctggaaattgcagagaggtgcatcgtttttataatttatgaatttttatgtattaatgtcatcctcctgatcttttcagctgcattgggtaaatccttgcctgccagagtgggtcagcggtgagccagaaagggggctcattctaacagtgctgtgtcctcctggagagtgccaactcattctccaagtaaaaaaagccagatttgtggctcacttcgtggggaaatgtgtccagcgcaccaacgcaggcgagggactgggggaggagggaagtgccctcctgcagcacgcgaggttccgggaccggctggcctgctggaactcggccaggctcagctggctcggcgctgggcagccaggagcctgggccccggggagggcggtcccgggcggcgcggtgggccgagcgcgggtcccgcctccttgaggcgggcccgggcggggcggttgtatatcagggccgcgctgagctgcgccagctgaggtgtgagcagctgccgaagtcagttccttgtggagccggagctgggcgcggattcgccgaggcaccgaggcactcagaggaggtgagagagcggcggcagacaacaggggaccccgggccggcggcccagagccgagccaagcgtgcccgcgtgtgtccctgcgtgtccgcgaggatgcgtgttcgcgggtgtgtgctgcgttcacaggtgtttctgcggcaggtgaatgacgggcgtgggtcggtgcgcgctcggcttgcgcacacggtgtctctataagtgcgcgggtgacgagagtcgggatgtgccggagaccccggggcggagagcgggattacaagtacaggaatccctggtcacgctccccgcccctggaaacccagctggggcgagggagggcgtggacgggaccgttctgggagctcgcctttggctgcggttggctccaggccccaggcgcagtttgctcgcggcgtggggatgaagtccgtgtccctggaggggcccaggaagggcgaggaaagcggagtggagtaagttcgtctaggatcggtcccgggtggctctgggatccaatctgcgccgccctggcccaggtcccaggttcaggtcctttacgccactgtgtccaccacctggctgagcgctgaggtcagcgcgggctgtttcctggcccttgggaatgtgccaggacccgtcccctaaggactagcgaggaggtgactcactgtgacaaggagaccccagggaacggactgtatgaggtcagaaccccgcccgggatggggtacagcgggactccagaagccctctcccctgccccttcgcggtctccgtcctcccatcggcacagtgacctatttggctggaacagtttgttcccaaggaagccgggcactggaggtccgggacaccgcgtcgggtccccgctccgcggcgcgctgtaggggtcggggagtcacggccctgcgctgggcgggctctaaccagcctgtcagtcggggaagggcaagggtctcctctacctctttcccaccgcggccgggagaatcgcggcccagcctgtcctcgggtcggggcgctggactccggggcgggagcggagcccacgcctggatgggaggcggggagggttcatgtctttgaggggtggggggtctggggggcacgacgctgctcagggcctctatcagctgcctcgggggctcagggcttcccgacctagcccagattccctctccgaaagctacagggctgagcggagcaggggggcgagtcgccccctggggcgccgccgcctggcgcggaccacagcgcgtcctctccgtcccaaacccctgggggacacttgcgccctcttcgtgaggaaaagcatcttggagctgggttaggaacttggggcgcccaggcagcttcccctctccttgcctccctccacgtcgcgtttctgggaggacttgcgagcggttttgttttcgttgctcccgtctatttttattttccagggatctgactcatcccgtgctttgggcgtggagataaggtggaggggccggctcccggcgcgcgcgcgcgtgcgtgtctgcgcgggcgtgtgtgtgtgtgtgtgtgtgtgtgtgtgtgtgtgtgtctgtgtcagagacggcacaagagcgcgcggtttcccaacagcggcgggagtttcggaagcctggccggctcagcgtgacgtgttcgcggccccccggtcccctcccattctccccctccccaccccagggtgacgcgcagccggagtggaagcagagttttggcgggcgagcagcgccttgcaggaaactgactcatcactactccctccagcggtccgaggctctgcccacgcacctcccactccgcgcgtgatttcctggaggccggcgccccctcccggccctggcgggaatagcacacaggctttcccgcggagtggggctggccggcgcgaaccgccgcggctactcctgggctcatccgagatcaacccctatgccattaccaccccttcaaaggagcactccttaggttcaacagtattcactgagctcttactggaaattaaaatatggctgaagtctaaggcaggaaggccaataaaggaggctatttttaattgtttctaaaacaagggtttgcgtttctgagttttctttgggctgaaagttattatgagcatgagagcagattttgatgggggaggagaggcctatgagagccataagagaaggaggggtggtagaagaggagagggtgcctgcctagatcctagtcctgtcttgaactcccgagagccagggaatatccagctccttgatgaagccctaggcgggcgcctcctccttgtgcctatgatgtattgagacccagaatgtccatttcaaacataccagtgtgtctccgcttggctggcaccccaagagtgcccatctgaggaattgtgccaaacacttgcttgaatcttcaatttggattaagttggtctcgggaggcagggcctcagcaatctatattttgaaaaaactccctaggtgcttttctttctttctttctttctttctttctttctttctttctttctttctttctttctttctttctttctttttctttctttctttctttttctttcttttctttctttctttctttctttctttctttctttctttctttcttcctttctctttctctctttctttctctttctctctttctttcttttctttcgacagagttgcactctgtcacccaggctggagtgcaatggcaccatcctggactcaagtagtcctcctgtttcagcctcccaagtaaccgggaccacaggcgtgatccccccgcccccatgcccagatttttttttttttttttttttttttgagatgcggtctcgctctgtcacccaggctggagtgcagtggcgtgatctcggctcactgcaagctccgcctcccgggttcacgccattctcctgcctcagcctcccgagtagctgggactacaggtgctgccatcatgcccggctaatttttttttgtatttttagtagagacgggggtttcaccgtgttagccaggatggtctcaatctcctgacctcgtgctccgccctcctcggcctcccaaagtgctgggattacaggtgtgagacactgcacccaaccacccagctaatttttatttatttttatttttagtagagacagggtctcagctagttgcccaggctagtcttggacccttgggctcaaatgattctcccacctctgcctcccagagtattaggattacaggcataagccactgcccctggcctccccaagtgattgtgatgggcctctctggttaagaaacctcaaaattagagagggagtggggttcaatactacagcacaggactcagggcaaacaggcctgggttcagatcctggctgtgccacttatgaactgtgtgatgttaggcaagttacttaacttatctgagccttggttgcctcttctgtaaaaagggagctaatagatatccactttttaggaggattgatatttttaaactgcttagaacagcccccaaacataaaaatatataaataaatcccaactcatgcctagcagagggtggatagaggttatttgagggctctgtccactgtactgggtgacccctttatggggcagtggcctttggcctttttagctgtatgactcaggggcaagtctcatatctcttccatctcctgccctttaaacttggtgtgaagttaccaagagcctcctctcccaaccagctgggacgtgaaactgtgggctccactgatcacaagcagtggggtgaggtggggtggagcagatgtggcatgtgtcccgggcttcctgcctcatgaggactcagcagagctttcacccccagaaactgcaagttgggacttgtccctaggaaaatccagttgctgccaaggtcgtgcagtcactcagccctggagtcaagccagagcaggcaggtaggtgccagggctccctcatgggcaaactcactctccgttttccctctcctgaagggggaggagaggagccaggtagaccagccacctttaattttctttttgcctgcaaaacggtttccttggacacaggcaacacgaggcaggggctgccaggtgtctagacttcagatcacctgatgtgcctggcaggatgtggctcagcctgggagaaatcatcccttgcgctgccccgcccggcccctccttacccctaggccacccgcctgacgacatccttgggaaaggccctcagcctacagcacctgtcagctgctgtctgaaggaggtagttggcagggggaagtgataggggggaggctcagtaaaactgaaggcagagaggaataatcatacttctgttttcaatgcacttctctatacgaagtgctgctggcacgttacctacattaactcagttaattctcatgtctatcctctgagacagtcactattactatccccattttatagatgaggaaactagagctcagacaagttaagttgcttgcccagggtcacctagtaaaacctggactccagcccaggtgatctggctccagagccctcctgcttaaccaccaggatacagcctttcattcagctctgttctgtctgccttgctgcatggactctgtgatcaatttcttgagtatgtgtctgtagccatgctctttaaacttgtacatggccccatttatggatgaggaaactgagacctagagacattaagtggctttttaaagcttacgtagtaactggcagagctaggaccacaacccgggtgctttttgccccaaagtcccgggtacttttacttggcagagcagggttaccctacttggggatctgggtcgggggacttaggaggctggaggaactgtcagactgtttcttcttttgggaattgaccttctggccagggctgcgattaggaaactgctggactctggcaattcacacatatttggggggcattcacacccatgagggacacctctggggggaaaacaaattgattttagctgataatacctggtggcaaacaggaccctggtccttgctcttgcaatagacttgcctttgttgacattagcttgcccttcagttgcctgctctcccagtgaccttggtgtgccaggctggctgagctctgctggtgggggtcaggcctcctgtgggaaggaagcaggaagaccagctggaaggagtgagagagaccctctggtaggaagacgtcacctgaggtgacacagcaaagcccggccaggtaacatagtgtctaatctccgccgtgaccagggccttccttgtatctctgctgcaggcgccatgtcagaaccggctggggatgtccgtcagaacccatgcggcagcaaggcctgccgccgcctcttcggcccagtggacagcgagcagctgagccgcgactgtgatgcgctaatggcgggctgcatccaggaggcccgtgagcgatggaacttcgactttgtcaccgagacaccactggagggtgacttcgcctgggagcgtgtgcggggccttggcctgcccaagctctaccttcccacggggccccggcgaggccgggatgagttgggaggaggcaggcggcctggcacctcacctgctctgctgcaggggacagcagaggaagaccatgtggacctgtcactgtcttgtacccttgtgcctcgctcaggggagcaggctgaagggtccccaggtggacctggagactctcagggtcgaaaacggcggcagaccagcatgacaggtgcggacatgtgcacggaaggactttgtaagggaccaggattctcagaatccatggtccaagggctgacctgtctggtcctggtccagcatgctccaggtagaaggaaacaggcccagagaggggaagcaacctccctgaggtcacacagcaagtaggcagcaaagaccaactagctaacatttattgggaatgttcattatgccaggccctttgccaagcttctaaggtagatttatttagtccttatagcaatgttataacataagacattcttgtcaccctgcccgcctttctttttgagacaggtgtcttaactctgttggccagactggagtgcagtgatacgatcatggctcactgcagcttcaaactcctgggctcaagcgatcttcctacctcagcctcctgggtagctgggaagctgggactatagttgtacaccactacgcccggttaattttttgagtttttgtagagacaaggtctcaccatgttgcccgggctggtcttgaactcctgagctcaagcagtcctcctgcctcagcctcccaaagtgttgtgattacaggcgtgagccaccatgcccagccccttgccatccttttagggcaaggaaaccaggctcagagaggtagagtgatttatctaaggtctcaaagtgaatttgccgttgggtcaagactaattataataacaacaactactgacgtttatatgggcccggcattgtgctgaacactttcatggattttgtaacagaatccctagatcagcactgtccagtaactctgcagggatgggagtgtccggtacaggggccacgagccacatacggctgttgtgcatttgacacacagctcatgtgactgaggaactgaattgttcattttatttgattgtagtctgtttaaacaagcacacagagctagtagtggttcctctgctgggcagcttgacttagagcagacccatgggtgcgggtgcggtgatggataaaatcacatctgtgaagcatggtgggacactccataatacccctcaagagacagagtggacgttccccgagttcttcctgttctcagcagtcggccccattggccccagggaagggtgtcctggccccccactgtcttcctcagttgggcagctccgccgcgtcctcttcttcttggcctggctgacttctgctgtctctcctcagatttctaccactccaaacgccggctgatcttctccaagaggaagccctaatccgcccacaggaagcctgcagtcctggaagcgcgagggcctcaaaggcccgctctacatcttctgccttagtctcagtttgtgtgtcttaattattatttgtgttttaatttaaacacctcctcatgtacataccctggccgccccctgccccccagcctctggcattagaattatttaaacaaaaactaggcggttgaatgagaggttcctaagagtgctgggcatttttattttatgaaatactatttaaagcctcctcatcccgtgttctccttttcctctctcccggaggttgggtgggccggcttcatgccagctacttcctcctccccacttgtccgctgggtggtaccctctggaggggtgtggctccttcccatcgctgtcacaggcggttatgaaattcaccccctttcctggacactcagacctgaattctttttcatttgagaagtaaacagatggcactttgaaggggcctcaccgagtgggggcatcatcaaaaactttggagtcccctcacctcctctaaggttgggcagggtgaccctgaagtgagcacagcctagggctgagctggggacctggtaccctcctggctcttgatacccccctctgtcttgtgaaggcagggggaaggtggggtcctggagcagaccaccccgcctgccctcatggcccctctgacctgcactggggagcccgtctcagtgttgagccttttccctctttggctcccctgtaccttttgaggagccccagctacccttcttctccagctgggctctgcaattcccctctgctgctgtccctcccccttgtcctttcccttcagtaccctctcagctccaggtggctctgaggtgcctgtcccacccccacccccagctcaatggactggaaggggaagggacacacaagaagaagggcaccctagttctacctcaggcagctcaagcagcgaccgccccctcctctagctgtgggggtgagggtcccatgtggtggcacaggcccccttgagtggggttatctctgtgttaggggtatatgatgggggagtagatctttctaggagggagacactggcccctcaaatcgtccagcgaccttcctcatccaccccatccctccccagttcattgcactttgattagcagcggaacaaggagtcagacattttaagatggtggcagtagaggctatggacagggcatgccacgtgggctcatatggggctgggagtagttgtctttcctggcactaacgttgagcccctggaggcactgaagtgcttagtgtacttggagtattggggtctgaccccaaacaccttccagctcctgtaacatactggcctggactgttttctctcggctccccatgtgtcctggttcccgtttctccacctagactgtaaacctctcgagggcagggaccacaccctgtactgttctgtgtctttcacagctcctcccacaatgctgaatatacagcaggtgctcaataaatgattcttagtgactttacttgtaatattactattgtggttattataccttataagaacaaataaatgggcttttgggaaggatttcataattaaataattttaaaaattaagcatttaaatttagagaatgcagaaaacttagcaaacagaaagactgctgcaaaaaacaacagcaaaacaaaaactactgtcacacctctgcaaagatcaccaatgtcaatattttggtttgttgtgtaatctttttgtaaagaatatattatagcttaacatcattattcatcagataaatgcaaattaagataccacaataagataccaccatacacttaccagaatgattaaaaaagactgacagtgccaagcattggcaaggttatggagcaactggatctcttatttaaaaaaactgtttgggccgggcgcagtggctcacacctagaatcccagtgcttcgggaggctgaggcaggagatcacttgaggccaagggttcaagaccagcctggccaacatggtgaaatctctactaaaaatacaaaaattagctgggcatggtggtgcacgcttgtaatcccagctacttggaaggctgaggtgggaggatcacttgaacccaggaggcagaggttgcagtcagctgagatcataccactgtactccagcctcttccagggtgacagtgagattcatctcaaataaatacataaataaaaaactgtttggtaatatcttctaaagatgcctaccttcatggctacctcatgacccagtaattctattcctggacatgttctcgagagaaatgagttcatatttccactgaaaaaggcataagaatgttctacacagtggctcacacctataatcccagcactttgggaggctaaggcaggaggacggcttgagcccaagagtgtgagaccagtttgggcaacatagcgagactcttatctc

SEQ ID NO: 23818 - DNA, 1773 bp, Homo Sapiens
atgaccttgcacaataacagtacaacctcgcctttgtttccaaacatcagctcctcctggatacacagcccctccgatgcagggctgcccccgggaaccgtcactcatttcggcagctacaatgtttctcgagcagctggcaatttctcctctccagacggtaccaccgatgaccctctgggaggtcataccgtctggcaagtggtcttcatcgctttcttaacgggcatcctggccttggtgaccatcatcggcaacatcctggtaattgtgtcatttaaggtcaacaagcagctgaagacggtcaacaactacttcctcttaagcctggcctgtgccgatctgattatcggggtcatttcaatgaatctgtttacgacctacatcatcatgaatcgatgggccttagggaacttggcctgtgacctctggcttgccattgactacgtagccagcaatgcctctgttatgaatcttctggtcatcagctttgacagatacttttccatcacgaggccgctcacgtaccgagccaaacgaacaacaaagagagccggtgtgatgatcggtctggcttgggtcatctcctttgtcctttgggctcctgccatcttgttctggcaatactttgttggaaagagaactgtgcctccgggagagtgcttcattcagttcctcagtgagcccaccattacttttggcacagccatcgctgctttttatatgcctgtcaccattatgactattttatactggaggatctataaggaaactgaaaagcgtaccaaagagcttgctggcctgcaagcctctgggacagaggcagagacagaaaactttgtccaccccacgggcagttctcgaagctgcagcagttacgaacttcaacagcaaagcatgaaacgctccaacaggaggaagtatggccgctgccacttctggttcacaaccaagagctggaaacccagctccgagcagatggaccaagaccacagcagcagtgacagttggaacaacaatgatgctgctgcctccctggagaactccgcctcctccgacgaggaggacattggctccgagacgagagccatctactccatcgtgctcaagcttccgggtcacagcaccatcctcaactccaccaagttaccctcatcggacaacctgcaggtgcctgaggaggagctggggatggtggacttggagaggaaagccgacaagctgcaggcccagaagagcgtggacgatggaggcagttttccaaaaagcttctccaagcttcccatccagctagagtcagccgtggacacagctaagacttctgacgtcaactcctcagtgggtaagagcacggccactctacctctgtccttcaaggaagccactctggccaagaggtttgctctgaagaccagaagtcagatcactaagcggaaaaggatgtccctggtcaaggagaagaaagcggcccagaccctcagtgcgatcttgcttgccttcatcatcacttggaccccatacaacatcatggttctggtgaacaccttttgtgacagctgcatacccaaaaccttttggaatctgggctactggctgtgctacatcaacagcaccgtgaaccccgtgtgctatgctctgtgcaacaaaacattcagaaccactttcaagatgctgctgctgtgccagtgtgacaaaaaaaagaggcgcaagcagcagtaccagcagagacagtcggtcatttttcacaagcgcgcacccgagcaggccttgtag

SEQ ID NO: 23819 - DNA, 3470 bp, Homo Sapiens
tgggattttcctggcttcgtcagccaagcaattggctgcctttgccggaggctttgagaaccaaggcttgaaggccggcaggagcatccagggggaagcttggcttcagggaggacctagcagacgttgggccggagcactagcctcacggagaaggatctgaaagaagccaaggcgcggagccagcagattgcagcccagctgaccacccctcccagctccaattcccgtggcgtccagctcttcaacaggcgccggcagagggtgaacgagttcaccttggagagccacggccagaggggacagaagcccagccaggagtccctcagagtgctcccttcaagcctcccaggccatgcaccggggctcagcctgagttccacctcgctgccggagccaggccctccacggcaccccagtccccagagccccgacagaggggtccctggccacagcatggaggggtactcagaggaggctagcttgctgcggcacctggagaaggtggccagtgaggaggaagaggtaccactggtggtttatctaaaggagaatgcagcactgctgacagccaatgggctgcacctgtcccaaaaccgagaggcccagcagtcctcaccggccccacctccagctgaggtccacagcccagctgcagatgtcaaccaaaaccttgcctcgcccagtgccacgctcaccacaccaacttctaacagcagccacaatccgccagccaccgatgtcaatcagaacccaccggcaactgttgtcccacagagcctgccactttctagcatccaacagaattcctcagaggcccaactcccatctaatggcacagggcctgcttccaaacccagcaccctgtgtgctgatgggcaaccccaggcaccggctgaggaggtgagatgcagcacactcctaattgacaaggtatcaactccagctaccaccaccagcaccttctccagagaagctacgctcatccccagctccaggcccccagcctcagatttcatgtccagctccctgctcattgacatccagcccaacaccctagtggtgtcagcagatcaagagatgtctgggcgagcagctgccaccacgcccaccaaggtctacagtgaggtccacttcacactggccaagcccccatcagtggtcaacaggacggccaggccttttgggatccaggcgccagggggcaccagccagatggagaggagccccatgctagagagacgacattttggggagaaggccccggctccccagccccccagtttgccagacaggagcccccggccacagagacacataatgtcccgcagccccatggtggaaaggaggatgatggggcagcgaagcccggcctcagagagacgccccttggggaacttcactgcaccccccacctacactgagaccttgtccacagcccctctggcttcctgggtgaggtctcctccctcatattctgtcctgtatcccagctccgaccccaagtcttctcatctgaagggccaggcggttcctgccagcaagacgggcattctggaggagtcgatggcccgccggggcagccgcaaatccatgtttactttcgtggagaagcccaaggtgaccccgaatccagacttgctggatctggtacagacagcggatgagaagcggcggcagagggaccagggggaggtaggcgtggaggaggagcccttcgcactgggggccgaggcctccaacttccagcaggagccagcacctcgtgacagggccagccccgcggcggcggaggaggtggtaccagagtgggcctcctgcctcaagtcaccccgcatccaggccaagccgaagcccaaacccaaccagaacctctccgaggcctctgggaagggagctgagctctacgcccgccgccagtcacggatggagaaatatgtcatcgagtcttcaagccacacgccagagctggcccgctgcccatcacctaccatgtccctgccttcctcctggaaataccccactaacgcccccggggccttccgagtggcatcccgaagcccagcccggaccccgcctgcctccctctaccatggctacctgcctgagaacggggtcctgcgcccagagcccaccaagcagccgccataccagctgcgcccctcgctctttgtcctctcacctatcaaggagcctgccaaggtctcaccaagagctgcctcgcccgccaagcccagctccttggacctggtgcccaacctgcccaagggggctctccctccatctcctgccctgcctcggccctcgcgctcctcaccgggcctctacacctcccccggccaggacagcctgcagcccactgccgtgagccctccttacggcggtgacatctcccccgtgtctccctccagggcgtggtctccccgagccaagcaggcccccaggccctccttctctacccggaacgccgggatcgaggctcaggaccgccgggagagcctgcccacctccccaccctggacgccgggcgcgtcccggccccccagcagcctagacggctgggtgagcccgggcccgtgggagccaggtcgcgggagcagcatgagcagccccccgccgctgccgccgccaccgcccatgtctccctcgtggagcgagcgctcggtgtccccgctgcgacctgagaccgaggcgcggccccccagccgccagctgcaggcgcttctggcgcgaaacatcatcaatgcggcccggcgcaagagcgcctccccgcggtcggcgggcgccgagaacccgcggcccttctccccgccgagggcgccaccgcccccgcccccgcccccgcccccgcccccgcgcatgcgctcgccacagcccgcccgccccggctcggctgctgtgccgggggcagccttcgcgcccatcccgcggagcccgttgcccgccggtccttcgtcctgcaccagtccccggagcccgctgcccgcgcctcccaggcccttcctctaccgccgctcgcccacggactccgacgtgtccctcgactccgaggactccggggctaagtctccaggcatcctgggctacaatatctgtccccgcgggtggaatggcagccttcggctcaagcgtggcagcctccccgccgaggcctcctgcaccacctagagccccacccccgaccccaccccgggagggcagagccagaagaaggctcattagacctgggggacccaaagggtctggcctctttgggcagccccagagtgaggggtcagcagaggagagctctggggttggggatgggttagggacgcaagcttgagttctagcccttgctctcattcagctgttgtgtgaccctgggtaagacccttccttgtttgaccctcagctttcccatctgtttaatggtggctttggccaaggcaatccacaaacgtcaaaattccccttcccatcagtacaca

SEQ ID NO: 23820 - DNA, 3722 bp, Homo Sapiens
aaatatggtctttcttgggcgcgcgcgacaatgtgaggagtggggtggagcgtgtgtggtgtgtggctgcggcctgggcaagagccgccgcggaccatgagctgagtaagttctggagggatcctgcctcttggagccttcgcagccaggcagctgtgaactgtgagctagagtgaagcagaaatctaggaagatgagctccaagatggtcataagtgaaccaggactgaattgggatatttcccccaaaaatggccttaagacatttttctctcgagaaaattataaagatcattccatggctccaagtttaaaagaactacgtgttttatccaacagacgtataggagaaaatttgaatgcctcagcaagttctgtagaaaatgagccggcagttagttcagcaactcaagcaaaggaaaaagttaaaaccacaattggaatggttcttcttccaaaaccaagagttccttatcctcgtttctctcgtttctcacagagagagcagaggagttatgtggacttgttggttaaatacgcaaagattcctgcaaattccaaagctgttggaataaataaaaatgactacttgcagtacttggatatgaaaaaacatgtgaacgaagaagttactgagttcctaaagtttttgcagaattctgcaaagaaatgtgcgcaggattataatatgctttctgatgatgcccgtctcttcacagagaaaattttaagagcttgcattgaacaagtgaaaaagtattcagaattctatactctccacgaggtcaccagcttaatgggattcttcccattcagagtagagatgggattaaagttagaaaaaactcttctcgcattgggcagtgtaaaatatgtgaaaacagtatttccctcaatgcctataaagttgcagctgtcaaaggacgatatagctaccattgaaacgtcagaacaaacagctgaagctatgcattatgatattagtaaagatccaaatgcagagaagcttgtttccagatatcaccctcagatagctctaactagtcagtcattatttaccttattaaataatcatggaccaacgtacaaggaacagtgggaaattccagtgtgtattcaagtaatacctgttgcaggttcaaaaccagttaaagtaatatatattaattcaccacttccccaaaagaaaatgactatgagagagagaaatcaaatctttcatgaagttccattaaaatttatgatgtccaaaaacacatctgttccagtctctgcagtctttatggacaaacctgaagagtttatatctgaaatggacatgtcctgtgaagtcaacgagtgccgaaaaattgagagtcttgaaaacttgtatttggattttgatgatgatgtcacagaacttgaaacttttggagtaaccaccaccaaagtatcaaaatcaccaagtccagcaagtacttccacagtacctaacatgacagatgctcctacagcccccaaagcaggaactacaactgtggcaccaagtgcaccagacatttctgctaattctagaagtttatctcagattctgatggaacaattgcaaaaggagaaacagctggtcactggtatggatggtggccctgaggaatgcaaaaataaagatgatcagggatttgaatcatgtgaaaaggtatcaaattctgacaagcctttgatacaagatagtgacttgaaaacatctgatgccttacagttagaaaattctcaggaaattgaaacttctaataaaaatgatatgactatagatatattacatgctgatggtgaaagacctaatgttctagaaaacctagacaactcaaaggaaaagactgttggatcagaagcagcaaaaactgaagatacagttctctgcagcagtgatacagatgaggagtgtttaatcattgatacagaatgtaaaaataatagtgatggaaagacagctgttgtgggttctaacttaagttccagaccagctagtccaaattcttcctcaggacaggcttctgtaggaaaccagactaatactgcttgtagtcctgaagagtcatgtgttttaaaaaaacctatcaaacgagtatataaaaaatttgatccagttggagagattttaaaaatgcaggatgagctcttaaagccaatttccagaaaagtaccagaattgcccttaatgaatttagaaaattctaaacagccttctgtttctgagcaattgtctggtccttcagactcctctagttggccgaaatctggatggccttctgcatttcagaagccaaaaggacgattgccatatgaacttcaggactatgttgaagatacatcggaatacctagctcctcaggaaggaaattttgtttataagttatttagcctgcaagacctgttgttactcgtacgctgcagtgtccagaggatagagacaagaccacgttctaaaaaacggaagaaaatcagaagacaatttccagtttatgtactaccaaaagtagagtatcaagcttgttacggagttgaagctctgactgaaagtgaactttgtcgcttatggactgaaagtttattgcattccaacagctcattttatgttgggcatatcgatgcatttacttcaaaactttttctactggaagaaattacctcagaagaattaaaagaaaagctttcagcactcaagatttccaatttatttaacatcctccaacacattctaaagaaactaagtagcttgcaggagggttcctacttgttatctcatgcagcagaagattcttcactcctgatttataaggcctctgatggaaaagttactaggacagcatacaatttgtataaaacacattgcggccttcctggtgtaccttccagtctctcagttccctgggtcccattagatcccagcctgttattaccatatcatatccatcatggaagaataccttgtacttttccaccgaaatcactggataccacaacacaacaaaagattggtggaacgagaatgcctacacgcagccacaggaatccagtttccatggaaaccaaaagcagttgcttgcctgctcagcaagttgaaactgaaggagtggctccacataaaagaaaaataacttgaggactgtaccatggaaaactaaatttaaaaaaccagttataacagtgtttaatttagataagtttgagggaaaataatcagtaggcaagaggaacatttttcctgtagtagctagagtgccttgaaaaaatgtgttggctatgtgaaggaatatttcaactaaaatggaatggtatgcttttcacccttaaagtttgaggaggatcttgatatgttttaacattatcatggcagggaaatatataaagaagaaaaatatttttacattaaaccttttctaaaaattgtaaatagaaaaataatttggttttttatcaagaacaacacttatcgttatgtattgtgttagttatattgccagtctgttgcgactgactcaaaaagttaaatgttgccactgctgaagatgattatgagcatcgcaaactttgtttctgacccattttgacagtttttatatactcctttaaaatgatgaatgttacaggttaataaagttaatacctttaaaaacttggtgaaattccattacagaagccaaaaataaaaactccctgcctctgaaaaaaaaaaaaaaaaa

SEQ ID NO: 23821 - DNA, 4070 bp, Homo Sapiens
caggtgattgactggccagctgcctgaaggagcgccaggtcctccttgctggcaggtggcgaagcccattggggcggcggtgcagaccgcggcggcggctgcggcggtctggctcgggaggcgttcctggggccaaggccatggccccgcggctgcagctggagaaggcggcctggcgctgggcggagacggtgcggcccgaggaggtgtcgcaggagcacatcgagaccgcttaccgcatctggctggagccctgcattcgcggcgtgtgcagacgaaactgcaaaggaaatccgaattgcttggttggtattggtgagcatatttggttaggagaaatagatgaaaatagttttcataacatcgatgatcccaactgtgagaggagaaaaaagaactcatttgtgggcctgactaaccttggagccacttgttatgtcaacacatttcttcaagtgtggtttctcaacttggagcttcggcaggcactctacttatgtccaagcacttgtagtgactacatgctgggagacggcatccaagaagaaaaagattatgagcctcaaacaatttgtgagcatctccagtacttgtttgccttgttgcaaaacagtaataggcgatacattgatccatcaggatttgttaaagccttgggcctggacactggacaacagcaggatgctcaagaattttcaaagctctttatgtctctattggaagatactttgtctaaacaaaagaatccagatgtgcgcaatattgttcaacagcagttctgtggagaatatgcctatgtaactgtttgcaaccagtgtggcagagagtctaagcttttgtcaaaattttatgagctggagttaaatatccaaggccacaaacagttaacagattgtatctcggaatttttgaaggaagaaaaattagaaggagacaatcgctatttttgcgagaactgtcaaagcaaacagaatgcaacaagaaagattcgacttcttagccttccttgcactctgaacttgcagctaatgcgttttgtctttgacaggcaaactggacataagaaaaagctgaatacctacattggcttctcagaaattttggatatggagccttatgtggaacataaaggtgggtcctacgtgtatgaactcagcgcagtcctcatacacagaggagtgagtgcttattctggccactacatcgcccacgtgaaagatccacagtctggtgaatggtataagtttaatgatgaagacatagaaaagatggaggggaagaaattacaactagggattgaggaagatctagcagaaccttctaagtctcagacacgtaaacccaagtgtggcaaaggaactcattgctctcgaaatgcatatatgttggtttatagactgcaaactcaagaaaagcccaacactactgttcaagttccagcctttcttcaagagctggtagatcgggataattccaaatttgaggagtggtgtattgaaatggctgagatgcgtaagcaaagtgtggataaaggaaaagcaaaacacgaagaggttaaggagctgtaccaaaggttacctgctggagctgagccctatgagtttgtctctctggaatggctgcaaaagtggttggatgaatcaacacctaccaaacctattgataatcacgcttgcctgtgttcccatgacaagcttcacccggataaaatatcaattatgaagaggatatctgaatatgcagctgacattttctatagtagatatggaggaggtccaagactaactgtgaaagccctgtgtaaggaatgtgtagtagaacgttgtcgcatattgcgtctgaagaaccaactaaatgaagattataaaactgttaataatctgctgaaagcagcagtaaagggcagcgatggattttgggtggggaagtcctccttgcggagttggcgccagctagctcttgaacagctggatgagcaagatggtgatgcagaacaaagcaacggaaagatgaacggtagcaccttaaataaagatgaatcaaaggaagaaagaaaagaagaggaggaattaaattttaatgaagatattctgtgtccacatggtgagttatgcatatctgaaaatgaaagaaggcttgtttctaaagaggcttggagcaaactgcagcagtactttccaaaggctcctgagtttccaagttacaaagagtgctgttcacagtgcaagattttagaaagagaaggggaagaaaatgaagccttacataagatgattgcaaacgagcaaaagacttctctcccaaatttgttccaggataaaaacagaccgtgtctcagtaactggccagaggatacggatgtcctctacatcgtgtctcagttctttgtagaagagtggcggaaatttgttagaaagcctacaagatgcagccctgtgtcatcagttgggaacagtgctcttttgtgtccccacgggggcctcatgtttacatttgcttccatgaccaaagaagattctaaacttatagctctcatatggcccagtgagtggcaaatgatacaaaagctctttgttgtggatcatgtaattaaaatcacgagaattgaagtgggagatgtaaacccttcagaaacacagtatatttctgagcccaaactctgtccagaatgcagagaaggcttattgtgtcagcagcagagggacctgcgtgaatacactcaagccaccatctatgtccataaagttgtggataataaaaaggtgatgaaggattcggctccggaactgaatgtgagtagttctgaaacagaggaggacaaggaagaagctaaaccagatggagaaaaagatccagattttaatcaaagcaatggtggaacaaagcggcaaaagatatcccatcaaaattatatagcctatcaaaagcaagttattcgccgaagtatgcgacatagaaaagttcgtggtgagaaagcacttctcgtttctgctaatcagacgttaaaagaattgaaaattcagatcatgcatgcattttcagttgctccttttgaccagaatttgtcaattgatggaaagattttaagtgatgactgtgccaccctaggcacccttggcgtcattcctgaatctgtcattttattgaaggctgatgaaccaattgcagattatgctgcaatggatgatgtcatgcaagtttgtatgccagaagaagggtttaaaggtactggtcttcttggacattaatctttgaatacttgctgactgctaagaaatgaccagaggggaagaggagtttgacatgttagggcattaaagcaaaggtggatttaagaattaaaccattacatgccccttccaaaaggcagaaatccattcaaacgtgactgtcccaaatgccttatgtcaaataaagcagattgcactgatggacatcagacttgaaggaaatgtttccaattttatatttaaggggggtggtgggtgggagggggcaagtaaagacggaacaagtttagtagcagtaatagtaaatcatgtttacatatgagatttatagtcgtgggaggggaataaagttctgttatatttccttgctcgagtttcataccagatgcgttggtccataaaggattgtatcaagtagatgggacaacattctgctctgaacgaaaagtaattttagagacataacctgcttaccaatgcctgtctttgattcatattctactttcaataaagcatgaaagtgaagaacttgtcctaagtgtggaaaagtgtcttcagatttagactcttctccatgtcagctgcagcgccacccgccttacacctgcccggccgtctgtctcttggtattgggtaaaggagggggcacctgcatgtctcctgcaatgagcaaggaattatgtctcatgttttgacttcagaggctttttgctttggtgcatttcagaaaggatggagaacatttattatgtgtgaaagcatcctcttccggttttgctgttattcaaaagtgggaaatgtacctggcacgtttgaaaataaaaaatctgactacctatc

SEQ ID NO: 23822 - DNA, 17400 bp, Homo Sapiens
cgcctttcctgcgggcgtagttgctggctgctcgggcactgggacctcggcggcttggggacgctggccgcgaagtagggagcgcaggtggccgctcggggtgagggccctgggtcatggagcacttcttgctggaggtggcagccgcgccgctgcggttaatcgcagccaagaacgagaagagccgcagtgagttgggcaggttcttggccaagcaggtgtggacacctcaagatcgccagtgtgtcctgagtaccttagcacagttgcttttggataaggactgtactgtgctggttggtcgccagcttcgccctctccttttggatttgctggaaaggaatgccgaagccattaaagctggaggccaaatcaaccatgatctgcatgaacggctatgtgtgtcgatgagcaaactcattggtaaccatcctgatgtcctcccgtttgccctgagatatttcaaggacacatccccagtctttcaaagacttttcctagagagttcagatgctaatccagtacgctatggacgtaggaggatgaagctccgggacctaatggaagcagccttcaagtttctgcagcaggagcagtctgtgttccgggagctctgggactggagtgtgtgtgtccctctcctcagaagccatgacaccttggttcgctggtatacagccaattgtcttgctttggttacctgtatgaatgaagagcacaagttatcatttcttaagaagatatttaatagtgatgaattgatccatttcaggttgaggttattagaagaggcccagttgcaggacttggagaaggccttggttttggccaatccagaagtctccctttggcgtaagcagaaggagctgcagtacttacagggacatcttgtttcgtctgacctctcccctagggtgacagctgtttgtggtgtggtgctgcctgggcagctgccagcccctggagagctgggtggtaataggagttcttcacgtgaacaggagctggcccttaggtcttatgtgctggttgagtctgtctgcaaaagtcttcagaccctggctatggcggttgcttctcagaatgctgtgttgttggaaggaccaataggatgtggcaaaacttccttagttgaatatttagctgcagtgacaggtagaacaaagcctcctcagcttctcaaagtccagcttggagatcagactgacagtaagatgcttttggggatgtatcgctgcacagatgttcctggagagtttgtgtggcagcctggcaccctgacacaggcagccacaatgggccactggatccttctggaggatattgactatgcccccttagacgtggtttctgtgctgatccctctcttggagaatggagagctcttgattcctggccgaggtgactgtctgaaagtggcacctggatttcagttttttgcaaccaggagactcttgagctgtggaggaaattggtatcgaccgctaaacagtcatgctactttgctagacaaatattggaccaaaattcacctggataacctggataagagagaactgaatgaggttcttcagagcagatatcctagcctattggcagtggttgatcacctgcttgacatttatatccaacttactggagagaaacatcactcttggagtgatagttctgttggatgtgaacaggcacctgaagaagtttcagaagccagaagagaaaacaaaagaccaacccttgagggaagagaattatctctaagggatctgctgaattggtgtaataggattgcccatagctttgacagttcatctttatcagcatcattaaatatttttcaagaggctctagactgtttcacagcaatgctttctgagcatacaagcaaactgaaaatggcagaagttattggaagcaaattgaacatttctagaaaaaaggctgaattcttttgtcaactttataaaccagaaattgtgatcaatgagctagatttgcaagtgggtcgagtgcggcttctacggaaacaaagtgaggctgttcacctacagagggagaagttcactttcgctgctacacggccgtcctctgttctcatcgagcagcttgcagtgtgtgtcagcaaaggggagcctgtgttgctggtgggagagaccgggactggcaaaacctctaccatccaatacttggctcacattacaggccaccgtttgagggttgtcaatatgaatcaacaaagtgatactgcagacttgcttggaggttataaaccggtggaccataagcttatttggctacccttacgggaggcatttgaggaactctttgctcagacattttccaagaaacaaaactttacgttcttggggcacattcagacctgttacagacagaaacggtggcatgatctcctgagactaatgcagcatgtacacaagtctgctgttaacaaggatggaaaagacagtgaaactgggttactcataaaagagaaatgggaagcatttggtcttagactcaaccatgcccaacaacagatgaaaatgactgaaaataccttattgttcgcatttgtagagggtacattagctcaggctgtaaagaaaggagagtggatcttgttggatgagattaacttggctgctccagaaatactagaatgtctgagtggtttgcttgaaggatcttctggatccctggtgttgctggatcgaggagacacagagccactggttcggcatcctgacttccgtttatttgcctgtatgaatccagcaactgatgtaggcaaaagaaatctcccaccaggaataagaaacaggttcacagaactttatgtagaagaattagaaagcaaagaagacttacaggttcttattgtagattatctgaaaggattgagtgtgaacaagaatacagtgcaaggaatcataaacttctacacagctttgcggaaagagtctgggaccaaactggtggatggcactggccatagacctcactacagccttcggactctgtgccgggccctgcgatttgcagcctccaatccatgtggcaacattcagcgctcactctatgagggtttttgtttgggtttcttaacacagcttgacagggcatcacacccaatagttcagaagctcatctgtcaacacattgtccctggcaatgtcaagagtctgctgaagcagcctattccagagccaaaaggaggtcggcttatccaggttgaaggctactggattgcggtgggagacaaggagcctacaatagatgagacgtacattctgacatcttctgtgaagctgaacctgagagatatagtccgagttgtctctgcaggaacctatccagtgctgattcagggagagacatcagttggtaaaacaagcctgatccagtggctggctgcagctactggcaaccactgtgtgcgtattaataatcacgaacacacggatattcaggagtacattggttgttacacgtctgactcctcagggaagcttgtctttaaggaaggtgttcttattgatgccatgagaaaaggctattggattattttagatgaattaaatttggcccctactgatgtgttagaggcgctgaataggctgttggatgataaccgtgaattgctagtaacagaaacacaggaagttgttaaagcacaccctcggtttatgctttttgccacccaaaatcccccaggactttatggaggcagaaaggtcctttctagagccttcaggaatcggtttgtggaattgcactttgatgagttacctagctccgagttggaaacaatcttgcacaagcggtgtagtttgccaccctcctattgcagcaagttggttaaagtcatgctggatcttcagtcctatcgcagaagttcttcagtgtttgctggaaagcagggcttcatcacccttcgtgatctgttccgatgggctgaaagatacagattggctgagccgaccgagaaggagtatgactggctacagcatttagccaatgatggttatatgcttctggcaggtcgagtcaggaagcaggaggaaattgatgtgattcaagaagtccttgagaaacatttcaagaaaaaattgtgtcctcaatctcttttctccaaagaaaatgttctaaaattgctgggtaaattgtctactcagatatccacattggagtgtaactttggccatatcgtgtggactgagggcatgcggagactcgcgatgctagtgggaagggcattggaatttggtgaacctgtgctgctggttggagacactgggtgtgggaaaactactatctgtcaggtatttgcagccttggcaaatcagaaattatactctgtcagctgccacttacacatggagacatcagacttcctgggtggcctgcggccagtgagacaaaagccaaacgacaaggaagaaattgacacatcaagactctttgagtggcatgatgggcctctggttcaggccatgaaggaggacggctttttcctcttggatgagatctcattggccgatgactctgtcttggaaagactcaacagtgtccttgaagtagaaaagtctctggtattagctgaaaaaggcagtccagaggacaaggatagtgaaatagagctgttgactgctgggaaaaaatttcgtattctagcaaccatgaaccctgggggtgactttggaaaaaaggagctgtctcctgccttaagaaaccggtttacagaaatatggtgccctcaaagcacaagccgtgaagatttaattcagatcatcagtcataatcttcgtccaggattgtgtctgggcagaatagatcctaaagggtctgacatacctgaagtgatgctggatttcattgactggctgacccaccaagagtttggcagaaagtgtgtggtcagtatcagagatatcctgtcctgggttaacttcatgaacaaaatgggggaggaagctgctttgaaaaggccagagatcatctccactgtgacatcttttgtccatgctgcatgcctggtgtacatagatggaataggttcaggggtaacttcctctgggtttggtacagcccttttggcacgaaaagaatgtctgaaatttctaatcaagaggcttgccaagatagtacgacttacagaatatcagaaaaatgagttgaagatttatgacagaatgaaggccaaagaattcactggaatagataacctttggggaattcatccattttttataccaaggggacctgtcctacacaggaataatattgcagactatgcactcagtgcagggaccactgctatgaatgcacagaggctcttaagagctaccaaactgaagaagcccattctcctggagggttcccctggtgttggcaagacaagtttggtgggagcattagcaaaggcttcaggaaatacccttgttagaatcaacttatcagagcaaacggacatcacagacctgtttggagcagatctacctgttgaaggtggcaagggaggagagtttgcctggcgtgatggccccttactggcagctttgaaggcaggccattgggtggtgttggatgagcttaacctggcttctcagtctgtattggaaggactcaatgcttgttttgaccaccgaggagaaatctatgtgcctgagttaggaatgagctttcaagtgcagcatgaaaagacgaagatttttgggtgtcagaatccctttagacaaggaggtgggaggaaaggcttgcccaggtctttccttaacagattcactcaggtcttcgttgatccccttacagtaattgacatggagttcattgccagtactttgtttccagccattgagaaaaatattgttaagaaaatggttgctttcaataaccaaattgatcatgaagtgactgttgagaagaaatgggggcaaaaaggaggaccctgggaattcaacctccgggaccttttccgctggtgtcagttgatgctggttgaccagtcccctgggtgttatgatcctggtcagcatgtgtttttggtctatggtgaaagaatgagaaccgaagaggacaaaaaaaaggtcattgctgtattcaaggatgtgtttggttcaaattccaacccatacatgggaaccagactatttcgtatcactccctatgatgttcagttgggctactcagtcctttcccgtgggagctgtgttcctcacccgtcccgccatcccctgttgctcctgcaccagtcattccaacccctggagtcaatcatgaagtgtgtgcagatgagctggatggtcatcctggtcgggccagcctctgtgggcaagaccagcctggtccagcttctggcacaccttactggccacacattaaagatcatggctatgaacagtgcaatggatactactgagctgctgggtggatttgagcaggttgatcttatacgaccttggaggaggctgctagagaaggtggagggaactgtaagggcactgttaagggatagcctccttatcagtgctgatgatgcagaagtagtgctgcgagcctggagtcattttcttctgacatataagcctaagtgtcttggagaaggtggtaaagctatcacgatggagattgtcaacaaactagaagcagtgttattgcttatgcagcgactcaacaataaaatcaactcatactgcaaggcagagtttgccaaacttgttgaagagttccgaagctttggtgtgaagcttacgcagttggccagtggccatagccatggcacatttgaatgggttgacagcatgttggttcaggccctgaagtctggagactggcttctgatggacaatgttaacttctgcaacccatcagtgttggatcgtttgaatgctttgcttgaacccggaggtgtcctcactattagtgagagaggaatgatagatggatccactcccacgataacaccaaatcccaatttcagacttttcctctcgatggatcctgttcatggagatatatcccgagctatgaggaatcgtggacttgaaatctacatttcaggggaaggggatgcaagcaccccagacaacctggatttgaaagttctgctgcacagccttggattggtggggaacagtgtatgtgacatcctcttggctttacacacagagacccggagcactgttgtaggttctccaacatcttctgtatcaactctaatccagacagccatactaattgtccagtacctgcagcgagggctgagtttagacagagccttttctgaagcatgctgggaagtatatgtctgttcccagcattcaccagcaaaccggaagcttgtacaggctttactggagaaacatgtttcttctttgcgagcacatgaaacctggggagactccattcttggcatgggactgtggccagattctgtgccctcagctctctttgctactgaagattcacacctgtctacagtccgaagagatggacagatcttagtatattgtctcaacaggatgagcatgaaaaccagcagctggacaaggagtcagccttttaccttgcaagacttagagaaaattatgcagtcccccagccctgagaacctgaaattcaatgcagtcgaagtgaatacttactggatcgatgaaccagatgttttggtcatggctgttaaattgctcatagaaagagcaaccaatcaggattggatgctcagagttaaatggctttatcatttagccaagaatataccgcaggggcttgagtccatacaaattcatttggaagccagtgctgcatctctcaggaatttttactcacattccctctcaggtgcagtcagtaatgttttcaaaatattacaaccaaatacaacagatgaatttgtgatccctctggatccccgatggaatatgcaggctctggacatgattagaaatttgatggactttgacccacaaacagaccagcctgaccagctctttgcccttttagaatcagctgcaaacaagacaatcatatatcttgaccgggaaaaacgggtttttactgaagcaaatttggtttctgttggtagcaaaaagctaagagagagtgttttgagaatgtcctttgaattccatcaagatccagaaagctatcacactctgccccatgaaattgtggtcaatcttgctgctttttttgaactttgtgatgcactagtcctgctctgggtacagtcctcccagggaatggtgtctgatgccagtgccaatgagatcttaggttctctgcggtggcgggaccggttctggactgtggccgacacagtaaaagtagatgccccaggtctggcccttcttgccctccattggcactgggttttaaaacatctggtccaccagatcccccgacttctgatgaattatgaagacaaatattacaaagaagttcagactgtctcagaacatattcagaattgtctggggagccagactggtggcttcgctggtataaagaagttgcagaagttcctgggacgaccgtttccttttaaggacaagctggtggtggagtgtttttcacaactgaaggtccttaacaaagtccttgccatcagggagcagatgtctgcccttggggagagtggatggcaggaagacattaaccgtctccaagtggttgcttctcagtggacattaaagaaaagtctcctgcaagcctggggactgatcctcagagcaaatattttggaagatgtcagcctagatgaattgaagaattttgtgcatgctcagtgtttagaactgaaagccaaaggactctcacttggttttctggagaaaaagcatgatgaagcttcctccctgtcccatccagacttgacctccgtaatccacctcaccaggagtgttcagttgtggcctgcaatggagtacctggctatgctttggcggtacaaagtgacagctgattttatggcacaagcttgtctcagaagatgcagcaaaaatcaacaaccccagataaatgaggagataagtcacctcatctcattttgtctttatcacacacctgttacacctcaagagcttcgagatctgtggtccttgctgcatcatcagaaggtgtctcctgaagaaattacatctttgtggtccgagttatttaattccatgtttatgtctttctggagcagtactgtgaccacaaatccagagtactggctaatgtggaaccctttgcctggtatgcagcagagggaggcacccaagtctgttttggactccacattgaagggccccggcaatctcaatagacccatattctctaagtgctgctttgaagtcttaaccagcagctggagagcaagtccctgggatgtgagtggcctccccattctttcctcctctcacgtgaccctaggagagtgggttgagagaactcagcagctccaggacatcagttcgatgctttggactaacatggctatctcttcagtagcagaattcagacgcacggattcccaactccaggggcaggtgctgttccggcacctggcaggcctagcagagctgctcccagagtcccggcggcaggagtacatgcagaactgtgagcagctgctgcttgggagcagccaggccttccagcatgtgggccagacacttggggacatggctggtcaggaggtgctgcccaaggaactgctctgccagttgctcacctccctgcaccactttgttggtgaaggggagagtaagaggagcctgcctgagccagcccagcgtgggagcctctgggtgagcctcggcttgctccagattcagacatggcttccccaggcacgctttgaccctgcggtgaagagggagtacaagctcaattacgtcaaggaagagttacaccaactgcagtgtgaatggaagacccggaacctgtcatcccagctgcagactggaagagacctggaagatgaagtcgttgtcagctactctcatcctcacgttaggctgcttcgccaaaggatggatcggctggataatttaacctgtcacctgttgaagaaacaggcctttagaccccagctgcctgcctacgagtccctggttcaggagatccaccactacgtcaccagcatcgccaaggcccctgctgttcaggatctgctcacacggcttctgcaggccctccacatagatgggccacggtctgcccaagtagcccagagccttctaaaggaggaggcctcttggcagcagtcacaccaccagttccggaagcggctgtcagaggagtacaccttctatccagatgccgtgagcccactgcaggcatccatattgcagttacaacatggcatgaggctggtggcctctgagctccacacctcactccacagcagtatggttggtgcagacaggctggggaccctggccacagccttgctggctttcccatcggtgggccccaccttcccgacttactatgctcatgcagacactttgtgctcggtgaagtctgaggaggttctacgaggccttgggaagctaatcctcaagcgctcaggaggaaaggagctggaaggcaagggccagaaagcctgtcccactcgggagcagctgctgatgaatgctctcctttacctgcgctcccacgtgttatgcaagggagagttggaccagagggccctgcagctcttcagacatgtgtgtcaggaaatcatcagtgagtgggatgagcaggaacgcatagcccaagagaaggctgagcaggaaagcggcctgtatagatacaggagcaggaactctaggacagccctgagtgaagaggaggaggaagaacgggagttcagaaaacagttccccctgcatgaaaaggactttgcagatattttggtgcagccaacgttggaggagaacaaaggaacttcagatgggcaagaagaggaagcaggcacaaacccagctctcctctcccagaattcaatgcaggcagtaatgctgatacaccagcaattgtgtctcaactttgctcgatccctctggtatcaacagactctgccgccacatgaagcaaagcattacctcagcctgtttctgtcttgctatcagactggggcatcgcttgtgacacacttctaccccctgatgggagttgaactgaatgaccgactcttgggcagccaacttttggcctgtaccctctcccataacactctttttggggaggcaccctcagacctgatggtgaaacctgatgggccctatgacttctaccagcatcccaatgttccagaagcacggcagtgtcaacctgtgcttcaaggtttctcagaggctgtcagtcacttgctacaggactggccagaacacccagcgcttgaacagctcctggttgtaatggacagaattcgtagtttcccactttccagtcccatctcaaagttcctgaatggcttagagatccttctggcaaaggcacaggattgggaggaaaatgcaagtcgagctttgtctttgcggaaacatcttgatttgatcagtcagatgatcattcggtggcgtaaactggagctgaactgctggtccatgagtttggataatactatgaagcgccacaccgagaaatccaccaagcactggttctccatctatcagatgcttgagaagcacatgcaggaacaaacagaagaacaggaagatgacaaacagatgaccttgatgttgctggtcagcacattacaagcatttattgaaggatcctcgctgggagagttccatgtgcgacttcagatgttactggttttccattgtcatgtcttgctgatgccacaggttgaaggaaaggattcactttgcagtgttctatggaatttgtaccattattacaagcaattctttgaccgggtccaggccaaaattgtggaacttcgttcccccctagaaaaagaacttaaagaatttgttaagatttccaagtggaatgatgtcagcttctggtccattaagcaatctgtagaaaagacacacaggacactctttaaattcatgaagaaatttgaagcagtcctgagtgaaccctgccggtcatccctggtggagagtgacaaggaagaacagcctgactttttgcccaggccaacagatggagctgcaagtgaactgtcttccattcagaatctgaacagggcactgagggagaccctgttagcccaaccagcagctgggcaggccacaattccagagtggtgtcagggcgctgctccttccggcttggaaggggagcttctgcgtcgcttgccaaagctcaggaaacgcatgaggaagatgtgcctgacgttcatgaaggagagccccctgcctcgccttgtggagggccttgatcagttcacaggtgaagtgatttcctctgtgagtgagctgcagagcttaaaggtggaaccctctgcagagaaggagaagcagcggtcagaagccaagcacattctcatgcaaaaacagcgagctttgtcagacctctttaaacaccttgcaaaaattggtttgtcgtatcgcaaaggtcttgcttgggcccgttcaaaaaaccctcaagagatgcttcatcttcacccattagatctccagagcgcattgtccatcgtcagcagcactcaggaggctgattctaggctgcttacagaaatctcgtcttcatgggatggatgccagaagtatttttatcgctctcttgcacggcatgccaggcttaacgcagcactagcaactcctgccaaggaaatgggcatgggcaacgtggagaggtgcagagggttctcagcacatttgatgaagatgctcgtccgacagcggcgctccctgaccacgctcagtgagcagtggatcatcctcaggaacctcctcagctgtgtgcaagagattcacagcaggctgatggggccccaggcctaccccgtggccttcccccctcaggatggcgtgcagcagtggacagagcgcctgcagcacctggccatgcagtgccagatcctgcttgagcagctctcctggctcctccagtgctgccccagtgtagggccagctccaggccatggcaatgtccaggtactggggcagcctcctggcccctgcctggaaggaccagaacttagcaagggacaactttgtggagtagtgctggacctaattccttccaatctgagctacccatctccaatacctggaagtcagctgccctctggttgccggatgcggaaacaggatcacctttggcaacagtcaactacgagattaacagagatgctaaaaaccattaaaacagtgaaagctgacgtcgacaaaattagacagcagtcttgtgagactctctttcattcttggaaagattttgaagtttgctcttctgcgctgagttgcttgtcccaggtgtcagttcatttgcagggcctagagtccttgttcattcttccagggatggaggttgagcaaagagactcacaaatggcactagttgaaagtctggaatatgtaagaggagaaattagtaaagccatggctgactttactacctggaagacccatctgcttacttcagatagccaaggaggaaatcaaatgttggacgaaggatttgtggaagatttttcagagcaaatggaaattgccatccgagccatcctctgtgccatccagaacttagaagaaagaaagaatgaaaaagcagaggagaacactgaccaagcaagcccacaagaagattatgcaggctttgagagactgcaatcaggacatctaacaaaactcttagaggatgacttctgggccgatgtgagcactttgcacgtgcagaaaataatttctgccatctccgagctgttggagaggctgaaatcgtacggtgaggatggcacagcagcaaagcacctgttcttcagccaatcctgttccttgctggtgcgcctggtgccggtcctctccagctactcagacctcgtcctcttcttcctgaccatgtctttagcaactcaccgtagtactgcaaagctgctctctgtgcttgcccaggtctttacagagcttgcccagaagggattttgcttgcccaaagaatttatggaagattcagctggagagggagcaactgagttccatgactatgagggaggtggaattggagaaggcgagggcatgaaggatgtgagtgaccagatcggaaatgaagaacaggtggaagatacatttcagaagggtcaagaaaaagacaaagaggatcctgattcaaaatctgatattaagggcgaggataatgccattgagatgtcggaagattttgatgggaaaatgcatgatggggagcttgaagaacaagaagaggatgatgagaaatcagatagtgagggcggagacctggataaacacatgggcgatctcaatggtgaggaagctgacaaactagatgagaggctttggggtgatgatgatgaggaggaagatgaggaggaagaagacaataaaactgaagaaacaggaccaggaatggatgaggaagattctgaacttgttgctaaagatgacaacttggatagtggcaattcaaacaaagataaaagccagcaagataagaaggaagaaaaggaagaagcagaagctgatgatggtggacaaggtgaagacaaaattaatgaacaaatagatgagagggactatgatgaaaatgaggtggacccttaccatggcaatcaggaaaaggtgccagaacccgaggctttggaccttccagatgacttgaacctcgacagtgaagacaagaatggtggtgaggacaccgacaatgaagaaggagaagaagagaatcctttggagataaaagaaaaaccagaagaagcaggtcatgaagctgaggaaagaggagagaccgagaccgaccagaacgaaagtcagagtccacaggagcctgaggaaggccccagtgaagatgacaaggcagaaggggaagaggaaatggacacaggagctgatgaccaagatggagatgctgctcagcatcctgaagaacactctgaggagcagcagcagtctgtggaggaaaaagacaaggaagccgatgaagaaggtggagagaatggccctgctgaccaaggtttccagccccaggaggaagaagaacgggaggactctgatacagaggagcaggtgccagaggctttggagaggaaggagcatgcctcctgtgggcagactggtgtggagaacatgcagaacacacaggccatggagctggctggggccgcacctgagaaggagcaggggaaagaggaacacggaagtggagctgcagatgcaaaccaggcagaaggccatgaatcgaatttcattgcccagttggcctcccagaagcacaccaggaaaaacacacagagttttaagaggaaacctgggcaggctgacaatgaacgttccatgggtgatcacaatgagcgtgtgcacaagaggctgaggactgtggatacggacagccatgccgagcaggggccagctcagcagccccaggcccaggtggaggatgcagatgcattcgagcacattaaacaaggcagtgacgcatacgatgcacagacctatgatgtggccagcaaagaacagcaacagtctgcaaaagactctggcaaagatcaggaagaggaggagatagaggacacccttatggacacagaggagcaggaggagttcaaagcagcagacgtggagcagctgaagccagaggaaatcaagtcgggcaccacagcacccttgggctttgatgagatggaagtggagatccaaactgttaaaacagaggaagaccaagaccccagaacagacaaagcccataaggagacagaaaatgagaaaccagaaagaagccgagagtctaccattcatacagctcatcaattcctcatggacacgatcttccagccctttttaaaagatgtcaatgagctaagacaggagctggagagacagctggaaatgtggcagccacgtgaatctggaaacccagaggaggagaaggttgcagctgagatgtggcagagttacctgatcttaacagcgcctctttcacaacggttatgtgaagagcttcgtctcatattagagcctacccaggcagccaagctgaaaggagactatcgaactgggaaacgactaaacatacggaaagtcattccatacattgctagtcaatttcggaaagacaagatttggcttcgaaggaccaagcccagtaaacgccagtatcagatttgtttggctatcgatgactcttctagtatggtagacaatcataccaagcagcttgcatttgaatctttggctgtgattggaaatgctctaaccctcctggaagtgggtcagattgcagtgtgtagttttggagaatctgtaaagctgttacacccatttcatgagcagttcagtgattactctgggtcccagattctacgtctctgcaaattccaacaaaagaaaaccaagattgctcagtttctagagtctgttgccaacatgtttgcagctgctcagcagctctcgcagaacatcagttcagaaactgcacaactcctcctggtagtctctgatgggcgaggccttttccttgagggcaaagaaagagtcctggcagcagttcaggctgcccggaatgcaaatatctttgtcatctttgttgtattggacaatcccagttcacgggattctatcttggacattaaagtaccgatatttaaaggacctggagagatgcctgaaatccgatcctacatggaagagttcccattcccatactatatcattcttcgagatgtaaacgcacttcctgagacactcagcgatgccctcagacagtggtttgagttggtgacagcctctgaccacccatagaacagaaagaagagtccaaagtgagacttaactgtggtcagaaggtcacattgcttacccaggtgctcccttttggacaactacaaaaaattttattgtaatatttttattttacaacgtgatcttacagcctacagaatgctctctggctcccggctttgcctgggctgaggtttttataccaaacctggaagcagcagcaggtgcctgaactcgtaactagagaagagttatccttcttccctgccttggaagccctggcctgggaggaggtcataccccaccgttggagcccagctgcctgttttcttttgcaggggatctgggcacctgtgccttgaggagatgctgccaggagcatgggactctgacagtcctttgtataaaggactaaagggagctgcccttttgaccctgttctaagctctgccttgccaagcccatagtgtgtgcccaaaagctgtcaagtggccaagacagctcgtttctggag

SEQ ID NO: 23823 - DNA, 2494 bp, Homo Sapiens
gggtctcgtctcctcccaagcggagcatttgtgcctgaagctgccgggtctgctacggcaccgcggggctgcagaaacccgggggccaagggcgggctgcttgccgctatggctggcagtcaggacatattcgatgccatcgtgatggcggatgagaggtttcatggggaagggtatcgggaaggctatgaagaaggcagtagtttgggtgtgatggagggaaggcagcatggcacgctgcatggagccaaaatcgggtctgagatcgggtgctaccaaggttttgcttttgcatggaaatgtctactgcacagttgcaccactgagaaggacagcagaaagatgaaggtcttagaatcattgattggaatgatccagaaattcccttatgatgaccctacttacgataaactccatgaagacttagacaagatcagaggaaaatttaaacagttttgttcgttactcaatgttcagccagactttaaaattagtgcagaaggttccggactttcattttgaggaggatggatgaacagagaccgaacgtcgaggaacagatgtgtgtgtgacgtgtttagaaatgcggtgaagggccagacggtgctgggaaggcagttgttcattgggagggtgagggttccggttcggccgtgggagggcttccttccctggggttttctgcctgtgtcaccttggtgcccgtcttggggcctcgccacacatgccctttgttgggctgaagccgtccctggcagagccctcgtgcattgacttgacagcctctccggcagcacaggcctagctggttctgggttggagttggctctggatagggtcagtcaccaggcctggactgaaggcagttatttttattattattattatttgcaatgagagagatggttggccccgaatgaggctcatgggaggtttggacgggtgctgtgccgcatgtcgaggccgattgtgtgccaggcggtgcgggacgtgcctcccgtgtgttatttaatcccttcaggagcccacaagatgggtgttattctcattttacagaggagggaggggagacgcgaagggattgcctggtctaagggcacccagcagcagagctaggacttccgccctaaggctgtgcctcactgccaccaggcacagccgcctccggaatgcacaggcgagtccctgccctccctcccaggccgcacaggtcctgccaagcctcacggagcacgggggagtctgtggtggccagtttacctgggcatctggctgagaggaagaaaggccaacctgatcctgaggggacccagacatatcctttgcactgtccctagaggggcgatgagctttgcagcattaaaaaatggtgaaggggggaaatattttgaaccaaagaccaaatgttaggccgccgttatatttgcagaagctttgagaaccatgcgtatagcctcctgcattctcccctctcctaggagctcttttgtctctgtccttacgaggcgtcatacagaggcagtggggtgggcacagatgagcagagtggatggttcggtgggtccccacgaggcgagtggtggtcatatgtgatggcacgtgttcacacaccctcctgtgtacccccccagggtcaccgaagtccccacacgctggctctccacacccctcctgttccagaaagcatgtccgaaagcagtccaggagattattaaggggtcgccatgaatccactttggttttaaaaccattcccgaatgtcctagtggattgtgttgtgctgcctaagctgccggctgcaggagccagagaagtgacccccgcgggagcagcggcaggtggatctccacggtggctcgctttgtttttgttttgttttttcttttaagacggagtctcactctgtcgccgagtttggagtgtattggcgcgatctcggctcactgtaacctccgcctcctgaattcaagtgattctcctgcctcagcctccctagtagctgggattataggcgccccccaccacgcccaagtaacttttgtatttttagtagagatggggttttgccttgttggccaggctggtcttgaactcccagcctgaaatgatccacccacgtccacctaccaaagtgctggaattgcaggcatgagccaccactcccggcctgctttttgtttttgaagacaggacttaggtctcctcctcccgaactctaaacctgcgtgtgtggctgtgcaccgctcgtttgtagcgtcacctcaggtctggggaagtctgtgctggcatctcctcattgtgccttcatcagagctggtgccttcgggccagaaagactctcgttctttctagatggtgggatcaggggcctttgctgtgtttcccttggtggatttttgtgttttgtaagttgtctattttgataatgtattatttttataactgtaaaaaaagtaaatagcatattttaaagtgaaaaaaaaaaaaaaaaaaa

SEQ ID NO: 23824 - DNA, 2697 bp, Homo Sapiens
  misc_feature (55)..(55): n is a, c, g, or t
  misc_feature (58)..(58): n is a, c, g, or t
  misc_feature (785)..(785): n is a, c, g, or t
  misc_feature (832)..(832): n is a, c, g, or t
  misc_feature (837)..(837): n is a, c, g, or t
accaggtctggtctacagtcgactaagtcggtcggcccgggcccctctggagcanaanggccttggtgaggcggacaggaagggacctcgcgagcagacgcgcgcccgcgacagcaatcccgccccggcctgtcgggagcggtggggcagaggctgcggagccccaggaggatctgcctccgctttcacagtcctccagatttttccaagagcagcagaaaatgaataaatccctggggccagtgtcattcaaggacgtggctgtggacttcacccaggaggaatggcagcagctggatcctgagcagaagataacttacagggatgtgatgctggagaactacagcaatctagtttctgtggggtatcacattatcaaaccggatgttatcagcaagttggagcaaggagaagagccatggatagtagaaggagaattcctacttcagagctatccagatgaagtctggcaaactgatgacctaatagagagaatccaggaagaggaaaataaaccttcaaggcaaactgtgttcattgagaccctgattgaagagagaggtaatgttcctggtaaaacttttgatgtagaaacgaaccctgttccttcaagaaaaatagcctataaaaatagcctctgtgactcatgtgaaaagtgtttaacgtctgtttcagaatatattagtagtgatggaagctatgcaagaatgaaagctgatgaatgtagtggattgtgggaaatcactcctccatattaagcttgagaaaactcatccaggagatcnagcttatgatttaatcaaaatggggaaccttataccctaaattgaanaagtnttatcaaaaattcgtattttggagaaaccttttgaatatattgaatgccagaaagccttccaaaaggacactgtttttgttaatcacatggaagaaaagccctataagtggaatggatctgaaatagcctttctccagatgtcggacctcactgtacatcagacatctcatatggaaatgaagccctatgaatgcagtgaatgtgggaaatccttctgtaaaaagtcaaaatttattatacatcagaggactcacacaggagagaaaccttacgaatgtaatcagtgtgggaaatccttctgccagaagggaacccttactgtgcatcagagaacacacacaggggagaagccctatgaatgtaatgaatgtgggaagaacttttaccagaagttacacctcattcagcatcagagaactcactcaggagagaagccctatgaatgtagttattgtggaaaatccttttgccagaagacacacctcacacaacatcagagaacacattcaggagagagaccttatgtttgtcatgactgtgggaaaaccttctcgcagaagtcagcacttaatgaccatcagaaaattcacacaggtgtgaaactctacaagtgtagtgaatgtgggaaatgcttctgccgcaagtctactctcacgacccacctgaggacccacacaggagagaaaccgtatgaatgtaatgagtgtggaaaattcttctctcggttgtcatatctcactgtacattatagaactcattcaggagagaaaccctatgaatgtaatgaatgtggaaaaaccttctacctgaattcagccctcatgagacatcagagagtgcacacaggagagaaaccttacgaatgtaatgaatgtggaaagttattctcccagttgtcatacctcactatccatcatagaactcattcaggagtaaaaccctatgaatgtagtgaatgtgggaaaaccttctaccagaactcagccctttgtagacatcggagaatacacaaaggagagaagccctatgaatgctatatatgtggaaaattcttctctcagatgtcatacctcactatacatcatagaattcattcaggagagaagccctatgaatgtagtgaatgtgggaaaaccttctgccagaattcagcccttaatcgacatcagagaacacacacaggagagaaagcctacgaatgttatgaatgtgggaagtgcttctctcagatgtcctatctcactatacatcatcgaattcattcaggagagaaaccctttgaatgtaatgagtgtggaaaagccttctctcggatgtcatacctcactgtacattatagaactcattcaggagagaaaccctatgagtgtactgaatgtggaaaaaaattctaccacaaatcagcattcaacagccatcagagaattcataggagaggcaatatgaatgtaatagatgtgggaaggcttctctgaagtcagacctcattttatatcagagaaccctttcagtatagtgaatcagaaactcctgcctgaagtcaaacaccttgtacatcagagagttcacacaggttagtgtggacatccccttgtgtgttggactcataatctgaagactcacagaatggaaaccatgattataacaagaccacatggtataacaatactagactatagacaagtaaaaatttataaatattaagaatgtatatacatgtcaccatggattggaactgttttgcatatcagggaaatcatagccaaggggaaatctatcagtataaggaatgtggaagacataatcctttggaaactgttaatactaaaagatatgtttctgatacaatagcaaacttg

SEQ ID NO: 23825 - DNA, 4171 bp, Homo Sapiens
ctggagccgctgagcccccgctgcggccgggagctgcatgggggagcgccggcagcgcttgggaagatgccccggccggagctgcccctgccggagggctgggaggaggcgcgcgacttcgacggcaaggtctactacatagaccacacgaaccgcaccaccagctggatcgacccgcgggacaggtacaccaaaccgctcacctttgctgactgcattagtgatgagttgccgctaggatgggaagaggcatatgacccacaggttggagattacttcatagaccacaacaccaaaaccactcagattgaggatcctcgagtacaatggcggcgggagcaggaacatatgctgaaggattacctggtggtggcccaggaggctctgagtgcacaaaaggagatctaccaggtgaagcagcagcgcctggagcttgcacagcaggagtaccagcaactgcatgccgtctgggagcataagctgggctcccaggtcagcttggtctctggttcatcatccagctccaagtatgaccctgagatcctgaaagctgaaattgccactgcaaaatcccgggtcaacaagctgaagagagagatggttcacctccagcacgagctgcagttcaaagagcgtggctttcagaccctgaagaaaatcgataagaaaatgtctgatgctcagggcagctacaaactggatgaagctcaggctgtcttgagagaaacaaaagccatcaaaaaggctattacctgtggggaaaaggaaaagcaagatctcattaagagccttgccatgttgaaggacggcttccgcactgacagggggtctcactcagacctgtggtccagcagcagctctctggagagttcgagtttcccgctaccgaaacagtacctggatgtgagctcccagacagacatctcgggaagcttcggcatcaacagcaacaatcagttggcagagaaggtcagattgcgccttcgatatgaagaggctaagagaaggatcgccaacctgaagatccagctggccaagcttgacagtgaggcctggcctggggtgctggactcagagagggaccggctgatccttatcaacgagaaggaggagctgctgaaggagatgcgcttcatcagcccccgcaagtggacccagggggaggtggagcagctggagatggcccggaagcggctggaaaaggacctgcaggcagcccgggacacccagagcaaggcgctgacggagaggttaaagttaaacagtaagaggaaccagcttgtgagagaactggaggaagccacccggcaggtggcaactctgcactcccagctgaaaagtctctcaagcagcatgcagtccctgtcctcaggcagcagccccggatccctcacgtccagccggggctccctggttgcatccagcctggactcctccacttcagccagcttcactgacctctactatgacccctttgagcagctggactcagagctgcagagcaaggtggagttcctgctcctggagggggccaccggcttccggccctcaggctgcatcaccaccatccacgaggatgaggtggccaagacccagaaggcagagggaggtggccgcctgcaggctctgcgttccctgtctggcaccccaaagtccatgacctccctatccccacgttcctctctctcctccccctccccaccctgttcccctctcatggctgaccccctcctggctggtgatgccttcctcaactccttggagtttgaagacccggagctgagtgccactctttgtgaactgagccttggtaacagcgcccaggaaagataccggctggaggaaccaggaacggagggcaagcagctgggccaagctgtgaatacggcccaggggtgtggcctgaaagtggcctgtgtctcagccgccgtatcggacgagtcagtggctggagacagtggtgtgtacgaggcttccgtgcagagactgggtgcttcagaagctgctgcatttgacagtgacgaatcggaagcagtgggtgcgacccgaattcagattgccctgaagtatgatgagaagaataagcaatttgcaatattaatcatccagctgagtaacctttctgctctgttgcagcaacaagaccagaaagtgaatatccgcgtggctgtccttccttgctctgaaagcacaacctgcctgttccggacccggcctctggacgcctcagacactctagtgttcaatgaggtgttctgggtatccatgtcctatccagcccttcaccagaagaccttaagagtcgatgtctgtaccaccgacaggagccatctggaagagtgcctgggaggcgcccagatcagcctggcggaggtctgccggtctggggagaggtcgactcgctggtacaaccttctcagctacaaatacttgaagaagcagagcagggagctcaagccagtgggagttatggcccctgcctcagggcctgccagcacggacgctgtgtctgctctgttggaacagacagcagtggagctggagaagaggcaggagggcaggagcagcacacagacactggaagacagctggaggtatgaggagaccagtgagaatgaggcagtagccgaggaagaggaggaggaggtggaggaggaggagggagaagaggatgttttcaccgagaaagcctcacctgatatggatgggtacccagcattaaaggtggacaaagagaccaacacggagaccccggccccatcccccacagtggtgcgacctaaggaccggagagtgggcaccccgtcccaggggccatttcttcgagggagcaccatcatccgctctaagaccttctccccaggaccccagagccagtacgtgtgccggctgaatcggagtgatagtgacagctccactctgtccaaaaagccaccttttgttcgaaactccctggagcgacgcagcgtccggatgaagcggccttcctcggtcaagtcgctgcgctccgagcgtctgatccgtacctcgctggacctggagttagacctgcaggcgacaagaacctggcacagccaactgacccaggagatctcggtgctgaaggagctcaaggagcagctggaacaagccaagagccacggggagaaggagctgccacagtggttgcgtgaggacgagcgtttccgcctgctgctgaggatgctggagaagcggcagatggaccgagcggagcacaagggtgagcttcagacagacaagatgatgagggcagctgccaaggatgtgcacaggctccgaggccagagctgtaaggaacccccagaagttcagtctttcagggagaagatggcatttttcacccggcctcggatgaatatcccagctctctctgcagatgacgtctaatcgccagaaaagtatttcctttgttccactgaccaggctgtgaacattgactgtggctaaagttatttatgtggtgttatatgaaggtactgagtcacaagtcctctagtgctcttgttggtttgaagatgaaccgactttttagtttgggtcctactgttgttattaaaaacagaacaaaaacaaaacacacacacacacaaaaacagaaacaaaaaaaaccagcattaaaataataagattgtatagtttgtatatttaggagtgtatttttgggaaagaaaatttaaatgaactaaagcagtattgagttgctgctcttcttaaaatcgtttagattttttttggtttgtacagctccaccttttagaggtcttactgcaataagaagtaatgcctgggggacggtaatcctaataggacgtcccgcacttgtcacagtacagctaatttttcctagttaacatattttgtacaatattaaaaaaatgcacagaaaccattgggggggattcagaggtgcatccacggatcttcttgagctgtgacgtgtttttatgtggctgcccaacgtggagcgggcagtgtgataggctgggtgggctaagcagcctagtctatgtgggtgacaggccacgctggtctcagatgcccagtgaagccactaacatgagtgaggggagggctgtggggaactccattcagttttatctccatcaataaagtggcctttcaaaaagaaaaaaaaaaaaaaaaaaaaaaa

SEQ ID NO: 23826 - DNA, 6679 bp, Homo Sapiens
cagagccgcaagcgcagggaaggcctccccgcacggtgggggaaagcggccggtgcagcgcggggacaggcactcgggctggcactggctgctagggatgtcgtcctggataaggtggcatggacccgccatggcgcggctctggggcttctgctggctggttgtgggcttctggagggccgctttcgcctgtcccacgtcctgcaaatgcagtgcctctcggatctggtgcagcgacccttctcctggcatcgtggcatttccgagattggagcctaacagtgtagatcctgagaacatcaccgaaattttcatcgcaaaccagaaaaggttagaaatcatcaacgaagatgatgttgaagcttatgtgggactgagaaatctgacaattgtggattctggattaaaatttgtggctcataaagcatttctgaaaaacagcaacctgcagcacatcaattttacccgaaacaaactgacgagtttgtctaggaaacatttccgtcaccttgacttgtctgaactgatcctggtgggcaatccatttacatgctcctgtgacattatgtggatcaagactctccaagaggctaaatccagtccagacactcaggatttgtactgcctgaatgaaagcagcaagaatattcccctggcaaacctgcagatacccaattgtggtttgccatctgcaaatctggccgcacctaacctcactgtggaggaaggaaagtctatcacattatcctgtagtgtggcaggtgatccggttcctaatatgtattgggatgttggtaacctggtttccaaacatatgaatgaaacaagccacacacagggctccttaaggataactaacatttcatccgatgacagtgggaagcagatctcttgtgtggcggaaaatcttgtaggagaagatcaagattctgtcaacctcactgtgcattttgcaccaactatcacatttctcgaatctccaacctcagaccaccactggtgcattccattcactgtgaaaggcaaccccaaaccagcgcttcagtggttctataacggggcaatattgaatgagtccaaatacatctgtactaaaatacatgttaccaatcacacggagtaccacggctgcctccagctggataatcccactcacatgaacaatggggactacactctaatagccaagaatgagtatgggaaggatgagaaacagatttctgctcacttcatgggctggcctggaattgacgatggtgcaaacccaaattatcctgatgtaatttatgaagattatggaactgcagcgaatgacatcggggacaccacgaacagaagtaatgaaatcccttccacagacgtcactgataaaaccggtcgggaacatctctcggtctatgctgtggtggtgattgcgtctgtggtgggattttgccttttggtaatgctgtttctgcttaagttggcaagacactccaagtttggcatgaaaggttttgttttgtttcataagatcccactggatgggtagctgaaataaaggaaaagacagagaaaggggctgtggtgcttgttggttgatgctgccatgtaagctggactcctgggactgctgttggcttatcccgggaagtgctgcttatctggggttttctggtagatgtgggcggtgtttggaggctgtactatatgaagcctgcatatactgtgagctgtgattggggaacaccaatgcagaggtaactctcaggcagctaagcagcacctcaagaaaacatgttaaattaatgcttctcttcttacagtagttcaaatacaaaactgaaatgaaatcccattggattgtacttctcttctgaaaagtgtgctttttgaccctactggacatttattgacttaattgcttctgtttattaaaattgacctgcaaagttaaaaaaaaattaaagttgagaacaggtataagtgcacactgaatagtctaatctacatgtaacacatattttagtatgattttctatactctaatcagcactgaattcagagggtttgactttttcatctataacacagtgactaaaagagttaagggtatatataccatcactttgggacttggtagtattattaaaaggttatttccttcactgtcaataaaagtccaaatgtttagcttaggtctgagagtcaaacaatgttaaggattgtcttaaagttccttagccagcaaaacaaaacaaaacaaaacaaacaaatgaaaaacgtttaaaaagaagaagaagaaaaaaaacaagaacaagcagcaacagctgttttgttggggctatagatttaagttaggcatagtcaatttcagaataactaagagtggaatatatgcatatggtgaaattataaccttgcccttttttatttgccctctgcgatccacctggctttttagaagtctgccgagtgagaaggccacagtatctcatgctgtttgcattacagaactgcagcttttctactctgaaaaggcctgggagcagaatggctggcctgctgtgagcaggagaggagattctaagaaggatagtcccccctacaacatactgtcatactgctgggttttcatgggtaggaaagcttgtcctgaccccagcagcaaagaggtggcaggtcgctaatgaatatatgctttataatgtccttcttcattgctgagagggcagccttagagctgtggatttctgcatcccccctgagtctgacccatggacacctgtttcattcactttagcatcacagtgacctttgtatgctctgttcagtctgtgtcaggcagtatgcttgtcctgaagagaggtttggctatcccccaccccacccacccaccctgttccttttttatcaggaggacttcagagccaggcctgcagcattttgtttgaaaacacaatcagctctgacagttagacatgcacacagacgccatagctggattggaaacattgatgttttaaaaatttattttttttggaaatagttgcacaaatgctgcaatttagctttaaggttctatagatttttaactagtccaacacagtcagaaacattgttttgaatcctctgtaaaccaaggcattaatcttaataaaccaggatccatttaggtaccacttgatataaaaaggatatccataatgaatattttatactgcatcctttacattagccactaaatacgttattgcttgatgaagacctttcacagaatcctatggattgcagcatttcacttggctacttcatacccatgccttaaagaggggcagtttctcaaaagcagaaacatgccgccagttctcaagttttcctcctaactccatttgaatgtaagggcagctggcccccaatgtggggaggtccgaacattttctgaattcccattttcttgttcgcggctaaatgacagtttctgtcattacttagattccgatctttcccaaaggtgttgatttacaaagaggccagctaatagcagaaatcatgaccctgaaagagagatgaaattcaagctgtgagccaggcaggagctcagtatggcaaaggttcttgagaatcagccatttggtacaaaaaagatttttaaagcttttatgttataccatggagccatagaaaggctatggattgtttaagaactattttaaagtgttccagacccaaaaaggaaaaataaaaaaaaaggaatatttgtacccaacagctagaaggattgcaaggtagatttttgttttaaaatggagagaagtggacagataaggccatttaatatatcaaagatcagttgacatctctagggaatgatgaaacagcaggctattagaaaattatttcatatagttctcgtgttcttttcttttttttaatccctgaagggagatcagtaacatagcttctcttttctgtactctagaccaccccttttcatcattttgctttttatgtctcccataagaaatgtgctttttagagcttcctaatgcatgtgttgcattattgcagcattagaaaaggagaggtagcatttttgctgaaatcgggcctgtcactctccaataaaggttctggcacttcaatgccaggcaggtctcctaaatgaacagaatgatctgtgtgagccgatgcctgcccttccagaggggccactgtccccagccgcagccaactgtgtcccacaggaatgggagcctaggtttccaaatcttgtgattctttaggagaaacatgaaacctggatttcgtgtgaaatgtcccgattgttaaaaagttggctcaattatttttaaaacattttgtaagccaacaaaagtctgtgggctgccagtttattacttttgtcttaaaacatgatcattgttctctcacggtatccttctgtcttcccgttgcaaattcacttttctttcttcctgacattgccattgagggctttgttaccacaagctaagaaactgagtttaacagcccagttatctgcaacatgtcaattacctttgctcctctcctgtgattcccaccatgctgtgaccctcagctgtctccctttgctgggaattctgcaccaatgtcttcccctcaacccattccctggttggtcctactcccgtgtggccagagacatcctagcaaatccttcctcctattatatctgacactaatttcttttcaacagcgctcatgtctcttggcccagtcaggtgctgccaggtttagataggaaagtacatgtcccattttcatgggtgcccttaatgtggtccacgtcctatatcttattatatttactcatggctcaatgggggcctccagagaccctctcaggctgctgagctagactaaggaatgcatccactgtcatcacatgagacactgactctgtgacgacaaaagtacaaacagtctgaggctaagaaaggttcatctcacaacaggaaaaacaaatctcaacacacattagagataattgattcaggggttttctctcccagtctcccagcagggactgatttcatttctgacccactaggttttctttccagaaataggtagcaaggacaagaactaaacaatcccagccccacccagcaacacagaacacaggagtttgcttttggcttctcactctccaagtaaccctgaattaggcccagaatggctgaggcttggagcatctcctcagacagagcagaggcgacacctcttcaggggtgtgtggagtaaatagctcgaagagctgaagacagaaaaccagtttcacgccaggtgcgagagagagcataatggagggaagcccgctttctctctcctcttcttttctctttatttctttagagcacttgacttttttttctctctctctctagtattctaaactgaccccatgaccaactgagaatttatttttgtttcattggttgtttcacagaattagaacacacacgactttttattcctccattgcaaaatggaatcaagatactacacaagacctgtgctttcttcctttgcatgatttacacctccgcctgttttggtgctagctgtctagaacttctctcttggtttgaatctgattccttcacactacactagaagtttatttcatcttgttttgtctagactccagatacagagggacagctggactgaggacaagcaattccatctagcatagggtctctcagggttggtgcatccagccacatgggcagggccagtcacatctagtctatgtccccagagcccttggagttgcgcagcttagctgacttgactccaaggaaattagtacagaagtaaccactctattaagtgtgttctgctatgttcacatgcctgtagtacctgcaaaccatgccaggttcatctaaagacataggggaagattaaggactcttttggacagaccatgaattgaatttgctgccaggtgctgccagactgaatttggctgacagaactcccagcccaggaaagttccatgacaatgactgtcgcagaaggaaatttcccactaaagtcagtccattttcaagttttggtcttcagagacaaaagaacgtcccagccacctgattttgatggtgaggtaactctaagttgaattcaggctagtgttgcagtatagctttggcatgttcatgagtgagcacccagaatgtgttgaaccaacccccacccctaactactgactatgactgcagtgggtttttatggggaaaaaaagtgtgaaaagcaaaaagaaaggaacagagattttttatcacctttattgtaagacagtccatttatgaattgagtataaacacatacaaagtaacaagagattcctaagaaacgcaaatccttgagtttcacgcacttcatgttcaaccatttgctgtaatccagaggcagcctgtgaatcattctcatgccctgttttttttttttttttcctataatgttctgggtttaaaagccatcttttccacattttctgtaaataatggataatcattttaaaaagttttatttttagtgctgttttaacaatgtagatagatcataaatgtacttgctgaattcaatcatttttaacaagccaataaagtttgataattcaaaaaaaaaaaaaaaaaaaaaaaaaaaa

SEQ ID NO: 23827 - DNA, 2579 bp, Homo Sapiens
atggaggccgcggcggtgacggtcacccggtcggctacacggcggcggcggcggcagctgcaggggctggcggccccggaggcggggacgcaggaggagcaggaggatcaggagccgcggccgcggcggcggcggccgggaaggagcatcaaagatgaagaagaagagacagtctttcgagaggtggtcagtttttccccggaccccctgccagttagatattatgacaaggacaccaccaaaccaatcagcttttacttgtcttcgctggaggagctcttggcgtggaagccccgcttggaggatggctttaatgtggccctggagcccctggcgtgtcgccagccccctctgagcagccagaggccccggactttgttgtgtcatgacatgatgggcgggtacctggatgacaggttcattcagggctcggtggtgcagactccctatgctttctaccactggcagtgcatcgacgtctttgtgtacttcagccaccacaccgtcaccattcccccagtgggctggaccaacactgcccacaggcatggggtctgcgtgctggggactttcatcacggagtggaatgaagggggaaggctctgtgaagccttcctggccggggatgagcgctcgtaccaggcagtggctgaccggctggtccagatcactcagttttttcgttttgatggctggctgatcaacatcgagaactcgctgagtctggccgctgtggggaacatgcctcctttcctgcggtacctcaccacacagctgcaccggcaggtcccagggggcctggtgctctggtatgacagcgtggtgcaaagtgggcagctcaaatggcaagacgaactcaaccagcacaacagggtcttctttgattcctgcgacggcttcttcactaactataactggcgggaggagcacttggagcggatgctggggcaggctggggagcgccgggctgatgtgtacgtgggcgtggatgtgtttgctcgagggaacgtggtcggaggccgattcgacacagacaagtcgttggagctgatccgaaagcatggcttctccgtggctttgtttgcccccggctgggtgtatgagtgtctggagaagaaggatttcttccagaaccaggacaagttctggggccgactggagcgttatctgcccacacatagcatctgctccttgcctttcgtcacgtccttctgcctgggcatgggtgcacggagggtctgctatggccaggaagaggcggtagggccctggtaccacctgagcgcccaggagatccagcccttgtttggagaacacaggctgggaggggatggccggggctgggtgaggacgcactgctgcctggaggatgcctggcacggaggcagctccctgctcgtccggggtgtgatcccaccggaggttggaaatgtggctgtgaggttattttccctgcaggccccagtgccacccaagatttacctgtccatggtgtataagcttgaggggcccacggacgtcacagttgctttggagctgaccacaggggatgccggcagctgccacatcggtggcatctcagtgttgaacgcagaaacaagctcaagacacagcctccgacccctccgggtgccccccaccaagctggccagatgggtgggccgctgcggccggcagctgagtgggggctgggtccagcactgctacgaggtgagcctgcgtgggtgcctgctgctagacctcctcgtttgcttctcacggccgccgggtagtcgggaggaggagagcttcacctgtcggcttggagagatccaggtggtggacgctgccagcctgctggcccctctgccccaggtgcaggccgtcaccatctctcacatccgctggcagccatccgcctctgagcgggaggggccccctgctctgctccagctcagctgcaccctgcactggtccttcctcctctcacaagtccgttgcttccgaatccactgctggggagggatgagtgatgactctccgggcagggagctgccgaggccagagatgcccatgttcctggggttggcttttgccacccagtaccggatagtggacctgctggtggaagccgccgggcccggccaggatcgtcgcatggaatttctggtggagcctgtccccaaggaagggttccgggtacctcaggccgagtggggcagggcagttctgctttattcagcccctgcatgagcggatgctaaggccgggtggtctcctggcctcgggctgaggcctcttcccggctgtctgcccctggcctgcgctggacctgctaagtgcccacagtggcagcgaggtcccggtcccggggctggggtgggagaccccgggctgagtgctgtggctttctggtggggggcgatggaaacaggaaaccaagcagtgggatcgcagcgttggtcactgcgaggcgagtggcgggctttctgtttctgccttgtccctccccacggtacctggttcccaggtgaaaatgaaaggaggggagaagttgagaacagaacattccataaaggatatttcctaataggctgcaa

SEQ ID NO: 23828 - DNA, 13250 bp, Homo Sapiens
ctaaccagcacttccatggtggtggcacttccactgcctttaaaagaaagagctttttttaattctacagggatttgggggatgaggagtcagagctaaggtatcctaaaaaaaacatgtgaagactctcattttgcaatacacaagcaattgccctcctgttaagactttgtcttcctcagcactccgaaccaaaatgattctgtaaacaaaaattgttcacttttaggagaggtccacttatgcagttcctcaccaaagtttttaggcaacaaatccataacttgcggttctcttcctatccaatgtagcatccgctgaaatgttttaaatattttaagtaataaatgttgattcaaactcacctaggaagattaggaaggggaaaaaaagcacttggcatttaaatcttcagaagagaatttaatgacaggttcagcctgtttaatgacaagcccagcaccacacccctctcttatgatgtttcattattactgcataaatttcctttattactcatgataaataaaaataagatacctgacaaagtgggtttaaataggtaagagtgcaaacaaagatttactgtacaaatatgatgaaactgggatctcagattcttaaagtataatttttttttgtcttatgtgtgccaggttgccactctcaatctcgaactagtttttttctcttttaagggttgtatccataatgcaaaaatggaaagaattaaaaagcacacgcaaaacatgattctcgggatttttctctatttttatggttgactaattcaaacagaaagacacatccaagagaaaattgctaagtttgatacaagttatgaaacttgtgaagcccaagtactgcctggggatgaatttaacttgtatgacaggtgcagagctgtcgctttcagacatcttaagaaagacggagttattttgaatgactttctctcggtcacaagggagccaccaacgtctccacagtgaaaccaactggcttggctgaaggaacagaaatcctctgctccgcctactggggattaggagctgagggcagtggtgaacattcccaaaatattagccttggctttactggacatccagcgagcagtgcagccagcattcctggcggctccctggcccagtctctggcgcatgcgtcctagcatctttgggcaggcttccccgccctcgtgacgcgtcggcccgggcctggcctcccggcgatcacagcggacagggggcggagcctaagggggtggggagacgccggccccttggcccagctgaaaacggaattctttgccggctggctccccactctgccagagcgaggcggggcagtgaggactccgcgacgcgtccgcaccctgcggccagagcggctttgagctcggctgcgtccgcgctaggcgctttttcccagaagcaatccaggcgcgcccgctggttcttgagcgccaggaaaagcccggagctaacgaccggccgctcggccactgcacggggccccaagccgcagaaggacgacgggagggtaatgaagctgagcccaggtctcctaggaaggagagagtgcgccggagcagcgtgggaaagaagggaagagtgtcgttaagtttacggccaacggtggattatccgggccgctgcgcgtctgggggctgcggaatgcgcgaggagaacaagggcatgcccagtgggggcggcagcgatgagggtctggccagcgccgcggcgcggggactagtggagaaggtgcgacagctcctggaagccggcgcggatcccaacggagtcaaccgtttcgggaggcgcgcgatccaggtagctggggccccagggcctcgccggcagggggcgcgcgaacgcggggcgcggcctcggcggatcggggctggaacctagatcgccgatgtagatttgtacaggagtctccgttggccggaggtgtgcattccacgcgtaaaacaggcttttacccagcaaaaatcctaaagagagacattgaaaaacccactgtttaagctttttttagtggtttttgttctgccatctcatgatcagagatgcaaggaatagactgaattggggagaaaaggagaaaaggaaagcttatttagggaagaagattatcttgtctgtctgctttcaacgataaagataagtaaagtataagttacgcattctagattggatttaaggaattctacaaaatcatagtacatggaaaaaatcaatgtaaacttctaagctactatatgaaatctgttgtattgttttctcatagaggttaattgagaatgagacgggattcctcaaccacagtacttagttccttttatgttagcagtgtcttatgagtgatgcataagagaaaaaatatatagttctataggtttctcattctttaattatcatactcagtgcccagattacaaaaatattcctgcagcaactgttaggtcctttttgaatggcaaaggatcttcataaataatgcatctttatcttcattgttaaaatacacttattcaatgtttaagtacgaatcctgctttaattagtactgatattttttatttcttttacaatctaggacaactcttttgtactttaccgttggctagtggtcatattcagtactcacctcactatcaccctctaaaactaagctaatattaagggatcttgttaatagtatagattttaaagaagtgttcatttcttttgaattcttagaataatggtataacaaatgagggatttttaaaggagcaaaaatattgtaaagtgcatcttaaaaacttaaaattttattaataattataaaaacaagttatatatgtaattcaccattttctgaaatactaacagcagctattttcccctttttttctatgtaaaatatccttacatcactagtagatataacttatcacggtttttaagagatgaaatgaacatttctaatattaatgaaacaagccaacaaaacatgagaagtatactgcctttcaattaaatggtatattttaaagtgcataaacccataacaaataactcgattttagacatttagttaccaaaaattgtcttataattgactttaaatatgacagcaaatgttttcataatgttcatgtacacaaatggctgctacaggattactcctgcaaaacatcattttttctaagttatgcatcatcctgattgactgctaacatccaagctctatttatttatttatttattttattttttttgagatgaggcctcactctgtcggacaggctggagtgcagtggcacaatctcagctcactgcaacctcttccaggatgcaagcgattctcctgcctcagcctcctgagttgctgggactacaggcacgccccaccatgcccagctaattttttattttttgtagtagagacgggatttcaccatgttggccaggctggtctcgaactcctgacctcaggtgatctgcctgctatggcctcccaaagtgctgggattacaggcataagccactgggcctggcccaagctctttttatatagcaaaatatttactgtttaacatttttaaatcttagctattataaaatcctgtagtatacaaatatagttagttttatattacattaaaaatattatagtctaaatttaaaatgatgaactgttaaggaaaaatcatttattataattttataagattttgcatgatttaatttacttttcccttctaatctccaactttggctcaaattatcacactacaagccagttatgagctcagacacatgacaaacaaaagccttccgcacgggatttgctatgagaactaaataaattaaaaaaaaaagaaagaaaaaaacttagttgtttattttctcccctaaaccattactcccaacttctaacaaacagtagttgactacctaataaatatttgtagacctggattatggaggaggggtcagcaaggcaaataatttaaaactttaaaagccgaataaatttaactctgcccctaaatcatttaacaaaatagattcccatgttccaatggaaatcaagatttgtttttccataatgatgatcatcactttaccatcaactttcttgtctctgcacgtttagagaataaaatggcatttaatttgtactgagtataacctgaaggtggggtgggaaagtggattgcatcagcaaatgaagaaacaccagacatcagagacctgaacacctctgcactgggtgaaaactttgcaattaggtgtttctttaaatggctccacctgccttgccccggccggcatctcccatacctgcccccaccctggctctgaccactctgctctctctggcaggtcatgatgatgggcagcgcccgcgtggcggagctgctgctgctccacggcgcggagcccaactgcgcagaccctgccactctcacccgaccggtgcatgatgctgcccgggagggcttcctggacacgctggtggtgctgcaccgggccggggcgcggctggacgtgcgcgatgcctggggtcgtctgcccgtggacttggccgaggagcggggccaccgcgacgttgcagggtacctgcgcacagccacgggggactgacgccaggttccccagccgcccacaacgactttattttcttacccaatttcccacccccacccacctaattcgatgaaggctgccaacggggagcggcggaaagcctgtaagcctgcaagcctgtctgagactcacaggaaggaggagccgaccgggaataaccttccatacatttttttctttgtcttatctggccctcgacactcaccatgaagcgaaacacagagaagcggatttccagggatatttaggagtgtgtgacattccaggggtcgtttgcttttcagggttttctgagggaaagtgcatatgaaatccttgactggacctggtggctacgaatcttccgatggatgaatctcccactccagcgctgagtgggagaaggcagtgattagcacttgggtgacggcagtcgatgcgttcactccaatgtctgctgaggagttatggtgaacccacaacttaggccctagcggcagaaaggaaaacctgaagactgaggacaaagtggaggagggccgaggtgggcttcagtaagtccccggcggcgctttagtttgagcgcatggcaagtcacatgcgtaaacgacactctctggaagccctggagaccctcgcccaactccaccagatagcagaggggtaagagaggatgtgcaagcgacgacagatgctaaaatccctggatcacgacgctgcagagcacctttgcacaggatgctggcctttgctcttactacactgaggagagattcccgcgggttccgcaggcagactacacaggatgaggtggtggagtggagtgagagcaattgtaacggttaactgtaacgttttctttcacacacacacacacacacacacacacacatgctaggatgcggaaatccccttatgacttgctactttttgattttgtgatattttgtactttttagttgttcagcaactgtcttatttaatggggagattttaagtaacataactagtggctctcagttaaaatgtgaggaagaactacagctcttaaatgtagcaatggcactgttgcaaactcagtgcaaacgcctagattgctttcttcttaacctatttatttctttgttaaatttttctgattgtttcctttatagagtgtctcagggtgcagaggtcagactaagaaatattccaaatgtcttttagaagatagatgcacttatgcagtaaattatcttgggatagttcccaaaagattgctgaaaaagtagattgagtataaaaacttgaaaatatatgatggctcgtgggatgtcctactatcactgaacaaactaaaggtgcactgctttgggatttaatttccagggttgcttgatcattatatcattggaacaactgatacttcactactttaataaagaattaacagagattgaactccaagaggtgggtaatttggtttaaaaatacatgttcatgggtttaccactaactcctgagaaatgttaaaggttcacaggggttcccttctctcaatgtttgtaataattgctcataagcaataccagcaattcataaaaactgcttacttatgccatagaaaattaaacacaaagtgtatacatgtattatgcttctaaatgctcattctaccagatacacatttaaaagagaaaaaaggaacagaaacaagtcatttgagagtggagacttataagaaggagtacatttgagttgaatacacaaatctttacttctctaccaattcctattcccaaaatgaacatattactggggaaagttagttgagaatcagagcatatgttattggggaaaggatatgtttattgacacataatctgtaccaggtatgcattaaaatatatttgttaatttaatatttaaacctgagagataggtattgtttcccagatgaggacaatgaggcaaagaaatatcaagtaacttgccaaaggttacaagatattcattccatggatgcacaaagaagtgcatctagttccacagctgattatggttgtcttgcttttcttcccattgcaccagcttgtcctccaaaatcatgaatgatacacatgaagataactttttttaaaaaaaagcagaaatacacaatgatctcccttgtaagctcctaaggtggcttttctttctctaacttctagtaaatataaacggtttgtttgaaaactattttaaaatgtcaacaatatggagaataaccccccccaacacacctataaaaacccaaatttttggaacaaagataatggaacctccattttcaaactgaagcacagggacagaaaatatatttctagttatcacttaagcactcaatcattagaggctacaagaataatatttttaaagttacagtattttacaattattagaaaacattctatataaaagaagtcagttgatactttaaaatctcccatttggtttataaaatcccttaatttgacctctatatcttaaattccaagatgtttaaatttgctagttgcattatactgggtcatgaaaaattatcccttgaaatagatatgaaacatgttacttcatttctggtttaaataacttgtggaatctttcctaatgacaacttgatattaagggaaactaaagaaaatgttattgtggatcccacagtactatattacactgtttttttttgtttgttttgttagttttttttatttaaagcaaacctcaaacattattgggtatcaattaccacctggttgtattgaaatagtaacttatcaatgccatgtaaaaattaattccattttcgaagccacctggcagacaggtttagctgtttcatcagcagcctaatatatactgttaaatttgttaaggatttcactttgaaggatacatgcaaaacatatagttactattttcatgagtcctgcttctagctccattgtggaatacagaaaattaaatatacctgttaagttcgtatctaaacctaagacattaccaaggtttgtacaaattctactacctgacatttattccaagaagatctggaaagttaaataaatttataaatttaataacattcatttggcttcatttttatcttttatttttcacctaagtggatgaattttttaaagggtgttttgctgttaaagcaaaatctatgtaaaatttcctatgccttaaatggttaaaattagtaatttcataactaaggaatgaaacagtttcaagaggagagctcgagactgataaaaccccaaacgcctctgggaaaatgtatacttaggaatactttcatgatattttatttccctaatatggcaagcacaatattgtgaccagcaccaaataatttatcatatgaagctaggtaactgatcttcagcaaatatatacaaaaactaatttcatttacacttacactgagattgccctcccttttttgaaaatattaacacactgtgtgcattgatatgtaatagtcagtagggtttttttttctttttgctgattctataattacccctcaattattttaaacagtaaaacatatactcattttatgctttaccagagatggattttttaaatcatagagcataatttttacaatgttcaatacattgccactctatcaaaagtggagcaagtagaactaatgatatgcaaaacttagagacattatctgaagaagcactcatgtgaactacctactggggcaaatgtgaaagccagtatcttctaaagtacagtgaggtctgccctcatgttttatgtcagcaactaatcataaccaaattctgacacgtttactagattttcagtattaacagaaactgtctagttatttgatgaaaacttggagaataatgcttaggttggtgtagttcacagtgttcaattactaagctacaaagagatacctagatacacaatcacacatatatgaaaataagacaattttaattttagaaattacttaaaggggcaacaacagttgagcctcaatactttcaatattttcctattctacttataacgacaggaaagaaagagggaatgaagaaaagtgaaacaaggacttgactggaagatagaagacctagattcccacattggttccttaactaattcaatatatgagtgctaactcatgtaacatctctactactatccttcatacctgaaaagtttctataaaacgtttctcaatttcagctatccaaatgaaattactcctttcttgcctcttaaattccctactcagaagattttaatgtcattccttgcgtaaggaaaaagaatacttcattttacagaaacacagtaactttcacatataggccctattaattacataataaaagaaaatatgaactaatactagtgccactaattaataatatgtaattggcatggattgtatattaagcacagtaatgaaaattaatgtatgggtcaaaaagcaccaagcctgacttactaatttgtggtgtgaactaaatgtaaaacaaaagagtttgctggaaaaagaactaagaacaatgtattaagatgacacactgactacctcacagctattcacattacactagaagtttacaaaggaccccaaacacctattaatccacttcacactcagaagcccctggcattagacttccagtagatatatggagtcagctctggcacagaaaatattttacaacagagttccactcaaaactttaagaccaattacagtaagtaaaccatgtcttatttctcatatttggcctcctccccaaatgcataatctatctatcctctcattatcaatgttctctattatgatgttgttggggctacttcctctgaaccctgtcttatgtgacctctgggtctccattccattttaaacgaattcccatctgccgtctatctatgcacaaattcttccatccccttggctaaaaccttttagtcttggctaaaaactgggtctccctgataattccattccacttctttctgcgccagatactaggtactgagctatggataacagagtaggagtcaggaccaagaatgagtgtctggtatttaggtagctctcaatgtaatcccaaaccaaatatgtaaggataatccattgttcttcgggtttctctcttctcttagtataaataagatacttgcattttttctttaattaagctgcaagtactgttattgtttgttattatatattttagaatatatttataagcaataatacacaaacataaaagaagaaacagtttattctgttcaaaaacccacagacaagtcagcagattattgtcaacacagagttttcttctagagggtgactgttgtaaagatgtatatggcatggctcctcattccatctgagttctgagtttctaagctctatcacctttcctagggcacagaggcaccctctcaccattctcagaatctcctgccaaagtgccacctataatattttctgaaaaacatttgatcatcctctattatttgctaatctctggactgcctttgatagttagacttatcacagtaagactattccaaaattagtagtttttaatatgtttaaataccaccataaacagaaagatttaaggtcgtcccctttctagggaagcataccactttattatacatttgctcccaagtatgtcttatgtctataagaatggtgtttgcctcagtagtcatttgaggacaacaagtttaaaaccccttccatttcagaaaattgtttctcaatcctggctccatgtcagaatcacccgtgaggatgttttaacatttagacttgttgatcagctccaggtctacaaaattagaatctctaggtttgagccccaatattcctgtggttgttatttaataattcttgctcatggtaaactttcaaacagtccagaaagcaaaaagtagtaagcaaaaatctgaaatttttcccaccctcattcttactacccaaaggtaaccactattacaaatatttaattatccttccagaaatataagtacatataattgcaaacatctctcccccagcatgcatatttggaaaacatgaatgggatcatactattctgtcacttgctttctttaattagcaatagatctttgacaacttccattgtcagtgcatatagatgtgcttcattattgtttatggatgcacagttttattattttatgaatgagccctaacaacaacaacaacaaaaaaagtctcctcacaagcatgtcaatcatttttctctttcttgcactttgtttgctaatacacactgctataaagaaacatttctgcatacttatacaagttatctgtagcaatttatataggagtgaattgctttagctgaagttacatatctaaatgtgtctgtaggtgtaaaatctatccatatatacatatgtatccatacataaaatacatatatacatatgtatgtatatatatgtgtacatgtgtatacatcttcccatacttacagatatgtgtgtacatatgtgtatataaagatatgtattatatatgttacatacatgagttataggaatagaattgctgagtcaaagggtgtatataagtatatagatatatacacaaacatataacatacatatgaactatatatactatatagtatatatgtgtatatatatttccatacattatttgtgtgtgtctttacatacttaaaatagtggaatagctgagtcaaagggtacctatattctcatacagttttgactagatattgtaatgctgcctttcaaaacaattacaccaagttgtaatagtaagagtgattgtttcctgacaactttgtcaaagtagtcttttttctttttgccacacttgtggttatatgccattgtttctgtttacatttattaatgagtaagattatctttttattttttactatttgcacatattctactataaactattatatcctttgccttttttattggattgttgttttactggattatgtatttatttatatagtctagtaattaatcttttgacatatatgatcaaataattgttttttattcttgcttatgttatcttttttcttatgactttggggttttgagtttgagcatgtgcaatgttaggaaagtttctcatgaaatttggataatcaagagttacctaagggataaagctagtgtcataggacattaagtttggggaggaggagaacaagacaagggatattcagtaagatttttctcccctatccctgcctatggaatgaatttgctgatctaaaatagaaaattatttacccctgttaaaaaaaactcaattaactcaggtttttaggccagtggaagagaaccccaaaaacttccaatattcagtgattctgtctgcataagtgacccacagataactcactccctattgaccctggcctttgggacaacagaaaaggcacaaggcttgtaacccaaaggcctgcctgatgattccagccctggctcttgctggccatgaagtgttcaagatttgagcctttctaggcctcattctttccacctgtaaaacaggagtaataatcccaattttgaaaggccactgtgaggataaaataagtaatataagtgaaattacatgctcagttcttcattattaattttttgaagagcacatagccaatagtcactccgcattccaaaagtatttggaataccacatacccattgttatgctagaaagagtcatcttcaccattgtattttgctgagactaatattaaacttagaattcccctgcatactgcaactgaaagagaacaggtattgggcagcggcagtgggggaaaccaagatggaatttagatgttcaaactttaatatttacattttttgaacagagagcttactatataattattcttttattcagatggcattcctctgaaataagcaattacccttatccctaggtctagttcctgtggagagaaaatgattatactttgagctatatggctccaataaacaaagatagatccctcaatttaaatttgatcctcagaaaactgagggtcagagaacccctcaggcatgacgggataatgtgacagttaatttggtatgtcaacttggctaggctgtggtacccagtgtttgagtcaaacaccagtctaaatattgctgtggaggtattttttagatatgattaacatttaagtcagtagacttgaaaaagcagattatcctcaataatatgggtggtcctcatccaagcagttgaagagcttaagagaaatgactgaggtccctcaaggaagaagaaattctgcttccagattgcctttggattcaagtcttgcaacaacaactcttccctgggtctccaatttgtcaacccccaccattttctgagacaattccttaaaataagtattttctctctttctctttctctctctctctctctctctctccctccctctctttctctcccccacatatgtgtgtgtagacatataatgtacgtatatataaaattgtatacacacacagagtcatgtgctggataacgat

SEQ ID NO: 23829 - DNA, 6978 bp, Homo Sapiens
atgaagaaaggttctcaacaaaaaatattctccaaagcaaagataccatcatcatctcactctcctatcccatcatctatgtccaatatgagatctaggtcactttcacctttgattggatcagagactctaccttttcattctggaggacagtggtgtgagcaaattgagattgcagatgaaaacaatatgcttttggactatcaagaccataaaggagctgattcacatgcaggagttagatatattacagaggccctcattaaaaaacttactaaacaggataatttggctttgataaaatctctgaacctttcactttctaaagacggtggcaagaaatttaagtatattgagaatttggaaaaatgtgttaaacttgaagtactgaatctcagctataatctaatagggaagattgaaaagttggacaagctgttaaaattacgtgaactcaacttatcatataacaaaatcagcaaaattgaaggcatagaaaatatgtgtaatctgcaaaagcttaaccttgcaggaaatgaaattgagcatattccagtatggttagggaagaagttaaaatctttgcgagtcctcaatttgaaaggcaacaagatatcatcgctccaagatataagcaagttgaaaccgcttcaagatttgatttctctgatcctagttgaaaatccagttgtgacccttcctcattacctccagtttaccattttccacctccgttcattggaaagtttggaaggtcagccagtaaccactcaggatagacaggaggcttttgagagattcagtttagaagaggtagaaagactggaaagagacctagaaaaaaagatgatagaaactgaagagcttaagagcaaacaaacaaggttccttgaggaaattaaaaatcaagataaattgaataaatcattaaaagaggaggccatgttacagaaacagagctgtgaggaactcaagagtgacttaaacacaaaaaatgaattgctaaaacagaagaccatagaattaacacgagcatgtcagaagcaatatgagctggaacaggaattggccttttataaaattgatgctaaatttgagccactaaattattatccatcagagtatgctgaaattgataaagccccagatgaaagcccttacattggcaaatccagatacaagagaaatatgtttgccacagagagttatattattgacagtgctcaggcagtacagatcaagaagatggagccagatgaacaacttagaaatgatcacatgaacttgagaggccacacaccactggacacgcaactggaagacaaagaaaaaaaaataagtgcagcacaaactcgactatcagaactgcatgatgaaatagaaaaggcagaacaacaaattttgagagctactgaagaatttaaacaactggaagaagctatacaactaaaaaagatttcagaagcagggaaagaccttctttacaagcagttgagtggtagactacaacttgtaaataaattacgccaggaagctctggatctagaactgcagatggaaaagcaaaagcaggaaattgccggaaagcagaaggagattaaggacctgcaaatagccatagatagcctggattccaaagacccaaaacattcccatatgaaggctcaaaagagcggtaaagaacaacagcttgacattatgaacaagcagtaccaacaacttgaaagtcgtttggatgagatactttctagaattgctaaggaaacggaagagattaaggaccttgaagaacagcttactgaaggccagatagcagcaaatgaagccctgaagaaggatttagaaggtgttatcagtgggttgcaagaatacctggggaccattaaaggccaggcaactcaggcccagaatgagtgcaggaagctgcgggatgagaaagagacattgttgcagagattgacagaagtcgagcaggagagagaccagctggaaatagttgccatggatgcagaaaatatgaggaaggagcttgcagagctagaaagtgccctccaagagcagcatgaggtgaatgcatctttgcagcagacccagggagatctcagtgcctatgaagctgagctagaggctcggctaaacctaagggatgctgaagccaaccagctcaaggaagagttggaaaaagtaacaagacttacccagttagaacaatcagcccttcaagcagaacttgagaaggaaaggcaagccctcaagaatgcccttggaaaagcccagttctcagaagaaaaggagcaagagaacagtgagctccatgcaaaacttaaacacttgcaggatgacaataatctgttaaaacagcaacttaaagatttccagaatcaccttaaccatgtggttgatggtttggttcgtccagaagaagtggcagctcgtgtggatgagctaagaagaaaactgaaattaggaactggggaaatgaacatccatagtccttcagatgtcttagggaaaagtcttgctgatttacagaaacaattcagtgaaattcttgcacgctccaagtgggaaagagatgaagcacaagttagagagagaaaactccaagaagaaatggctctgcagcaagagaaactggcaactggacaagaagagttcaggcaggcctgtgagagagccctggaagcaagaatgaattttgataagaggcaacatgaagcaagaatccagcaaatggagaatgaaattcactatttgcaagaaaatctaaaaagtatggaggaaatccaaggccttacagatctccaacttcaggaagctgatgaagagaaggagagaattctggcccaactccgagagttagagaaaaagaagaaacttgaagatgccaaatctcaggagcaagtttttggtttagataaagaactgaagaaactaaagaaagccgtggccacctctgataagctagccacagctgagctcaccattgccaaagaccagctgaagtcccttcatggaactgttatgaaaattaaccaggagcgagcagaggagttgcaggaagcagagaggttcagcagaaaggcagcacaagcagccagagatctcacccgagcagaagctgagatcgaactcctgcagaatctcctcaggcagaagggggagcagtttcgacttgagatggagaaaacaggtgtaggtactggagcaaactcacaggtcctagaaattgagaaactgaatgagacaatggaacgacaaaggacagagattgcaaggctgcagaatgtactagacctcactggaagtgacaacaaaggaggctttgaaaatgttttagaagaaattgctgaacttcgacgtgaagtttcttatcagaatgattacataagcagcatggcagatcctttcaaaagacgaggctattggtactttatgccaccaccaccatcatcaaaagtttccagccatagttcccaggccaccaaggactctggtgttggccttaagtactcagcctcaactcctgttagaaaaccacgccctgggcagcaggatgggaaggaaggcagtcaacctccccctgcctcaggatactgggtttattctcccatcaggagtgggttacataaactgtttccaagtagagatgcagacagtggaggagatagtcaggaagagagtgagctggatgaccaagaagaacccccatttgtgcctcctcctggatacatgatgtatactgtgcttcctgatggttctcctgtaccccagggcatggccctgtatgcaccacctcctcccttgccaaacaatagccgacctctcacccctggcactgttgtttatggcccacctcctgctggggcccccatggtgtatgggcctccaccccccaacttctccatccccttcatccctatgggtgtgctgcattgcaacgtccctgaacaccataacttagagaatgaagtttctagattagaagacataatgcagcatttaaaatcaaagaagcgggaagaaaggtggatgagagcatccaagcggcagtcggagaaagaaatggaagaactgcatcataatattgatgatcttttgcaagagaagaaaagcttagagtgtgaagtagaagaattacatagaactgtccagaaacgtcaacagcaaaaggacttcattgatggaaatgttgagagtcttatgactgaactagaaatagaaaaatcactcaaacatcatgaagatattgtagatgaaattgagtgcattgagaagactcttctgaaacgtcgctcagagctcagggaagctgaccgactcctggcagaggctgagagtgaactttcatgcactaaagaaaagacaaaaaatgctgttgaaaagttcactgatgccaagagaagtttattgcaaactgagtcagatgctgaggaattagaaaggagagctcaggaaactgctgttaacctcgtcaaagctgatcagcagctaagatcgctccaggctgatgcaaaggatttggagcagcacaaaatcaagcaagaagaaatcttgaaagaaataaacaaaattgtagcagcaaaagactcagacttccaatgtttaagcaagaagaaggaaaaactgacagaagagcttcagaaactacagaaagacatagagatggcagaacgcaatgaggatcaccacctgcaggtccttaaagaatctgaggtgcttcttcaggccaaaagagccgagctggaaaagctgaaaagccaggtgacaagtcagcagcaggagatggctgtcttggacaggcagttagggcataaaaaggaggagctgcatctactccaaggaagcatggtccaggcaaaagctgacctccaggaagctctgagactgggagagactgaagtaactgagaagtgcaatcacattagggaagtaaaatctcttctggaagaactgagttttcagaaaggagaactaaatgttcagattagtgaaagaaaaactcaacttacacttataaagcaggaaattgaaaaagaggaagaaaatcttcaggttgttttaaggcagatgtctaaacataaaaccgaactaaagaatattctggacatgttgcaacttgaaaaccatgagctacaaggtttgaagctacaacatgaccaaagggtatctgaattagagaagactcaggtggcagtgctagaggagaaactggagttagagaatttgcagcagatatcccagcagcagaaaggggaaatagagtggcagaagcagctccttgagagggataaacgagaaatagaacgaatgactgctgagtcccgagctttacaatcgtgtgttgagtgtttgagcaaagaaaaggaagatctccaagagaaatgtgacatttgggaaaaaaagttggcacaaaccaaaagggttttagcagcagcagaagaaaatagcaaaatggagcaatcaaacttagaaaagttggaattgaatgtcagaaaactgcagcaggaactagaccaactaaacagagacaagttgtcactgcataacgacatttcagcaatgcaacagcagctccaagaaaaacgagaagcagtaaactcactgcaggaggaactagctaatgtccaagaccatttgaacctagcaaaacaggacctgcttcacaccaccaagcatcaggatgtgttgctcagtgagcagacccgactccagaaggacatcagtgaatgggcaaataggtttgaagactgtcagaaagaagaggagacaaaacaacaacaacttcaagtgcttcagaatgagattgaagaaaacaagctcaaactagtccaacaagaaatgatgtttcagagactccagaaagagagagaaagtgaagaaagcaaattagaaaccagtaaagtgacactgaaggagcaacagcaccagctggaaaaggaattaacagaccagaaaagcaaactggaccaagtgctctcaaaggtgctggcagctgaagagcgtgttaggactctgcaggaagaggagaggtggtgtgagagcctggagaagacactctcccaaactaaacggcagctttcagaaagggagcagcaattggtggagaaatcaggtgagctgttggccctccagaaagaggcagattctatgagggcagacttcagccttctgcggaaccagttcttgacagaaagaaagaaagctgagaagcaggtggccagcctgaaggaagcacttaagatccagcggagccagctggagaaaaaccttcttgagcaaaaacaggagaacagctgcatacaaaaggaaatggcaacaattgaactggtagcccaggacaaccatgagcgggccaggcgcctgatgaaggagctcaaccagatgcagtatgagtacacggagctcaagaaacagatggcaaaccaaaaagatttggagagaagacaaatggaaatcagtgatgcaatgaggacacttaaatctgaggtgaaggatgaaatcagaaccagcttgaagaatcttaatcagtttcttccagaactaccagcagatctagaagctattttggaaagaaacgaaaacctagaaggagaattggaaagcttgaaagagaaccttccatttaccatgaatgagggaccttttgaagaaaaactgaacttttcccaagttcacataatggatgaacactggcgtggagaagcactccgggagaaactgcgtcaccgggaagaccgactcaaggcccaactccgacactgtatgtccaagcaagcagaagtattaattaaaggaaagcggcagacagagggcactttacacagtttgaggagacaagtagatgctttaggggaattggtcaccagcacctctgcagattcagcgtcatcacccagtctgtctcagctggagtcttccctcacagaggactctcaacttggacaaaatcaggaaaagaatgcctcagccagatga

SEQ ID NO: 23830 - DNA, 3402 bp, Homo Sapiens
atgcgttccagaggcagtgataccgagggctcagcccaaaagaaatttccaagacatactaaaggccacagtttccaagggcctaaaaacatgaagcatagacagcaagacaaagactcccccagtgagtcggatgtaatacttccgtgtcccaaggcagagaagccacacagtggtaatggccaccaagcagaagacctctcaagagatgacctgttatttctcctcagcattctggagggagaactgcaggctcgagatgaggtcataggcattttaaaggctgaaaaaatggacctggctttgctggaagctcagtatgggtttgtcactccaaaaaaggtgttagaggctctccagagagatgcttttcaagcgaaatctaccccttggcaggaggacatctatgagaaaccaatgaatgagttggacaaagttgtggaaaaacataaagaatcttacagacgaatcctgggacagcttttagtggcagaaaaatcccgtaggcaaaccatattggagttggaggaagaaaagagaaaacataaagaatacatggagaagagtgatgaattcatatgcctactagaacaggaatgtgaaagattaaagaagctaattgatcaagaaatcaagtctcaggaggagaaggagcaagaaaaggagaaaagggtcaccaccctgaaagaggagctgaccaagctgaagtcttttgctttgatggtggtggatgaacagcaaaggctgacggcacagctcacccttcaaagacagaaaatccaagagctgaccacaaatgcaaaggaaacacataccaaactagcccttgctgaagccagagttcaggaggaagagcagaaggcaaccagactagagaaggaactgcaaacgcagaccacaaagtttcaccaagaccaagacacaattatggcgaagctcaccaatgaggacagtcaaaatcgccagcttcaacaaaagctggcagcactcagccggcagattgatgagttagaagagacaaacaggtctttacgaaaagcagaagaggagctgcaagatataaaagaaaaaatcagtaagggagaatatggaaacgctggtatcatggctgaagtggaagagctcaggaaacgtgtgctagatatggaagggaaagatgaagagctcataaaaatggaggagcagtgcagagatctcaataagaggcttgaaagggagacgttacagagtaaagactttaaactagaggttgaaaaactcagtaaaagaattatggctctggaaaagttagaagacgctttcaacaaaagcaaacaagaatgctactctctgaaatgcaatttagaaaaagaaaggatgaccacaaagcagttgtctcaagaactggagagtttaaaagtaaggatcaaagagctagaagccattgaaagtcggctagaaaagacagaattcactctaaaagaggatttaactaaactgaaaacattaactgtgatgtttgtagatgaacggaaaacaatgagtgaaaaattaaagaaaactgaagataaattacaagctgcttcttctcagcttcaagtggagcaaaataaagtaacaacagttactgagaagttaattgaggaaactaaaagggcgctcaagtccaaaaccgatgtagaagaaaagatgtacagcgtaaccaaggagagagatgatttaaaaaacaaattgaaagcggaagaagagaaaggaaatgatctcctgtcaagagttaatatgttgaaaaataggcttcaatcattggaagcaattgagaaagatttcctaaaaaacaaattaaatcaagactctgggaaatccacaacagcattacaccaagaaaacaataagattaaggagctctctcaagaagtggaaagactgaaactgaagctaaaggacatgaaagccattgaggatgacctcatgaaaacagaagatgaatatgagactctagaacgaaggtatgctaatgaacgagacaaagctcaatttttatctaaagagctagaacatgttaaaatggaacttgctaagtacaagttagcagaaaagacagagaccagccatgaacaatggcttttcaaaaggcttcaagaagaagaagctaagtcagggcacctctcaagagaagtggatgcattaaaagagaaaattcatgaatacatggcaactgaagacctaatatgtcacctccagggagatcactcagtcctgcaaaaaaaactaaatcaacaagaaaacaggaacagagatttaggaagagagattgaaaacctcactaaggagttagagaggtaccggcatttcagtaagagcctcaggcctagtctcaatggaagaagaatttccgatcctcaagtattttctaaagaagttcagacagaagcagtagacaatgaaccacctgattacaagagcctcattcctctggaacgtgcagtcatcaatggtcagttatatgaggagagtgagaatcaagacgaggaccctaatgatgagggatctgtgctgtccttcaaatgcagccagtctactccatgtcctgttaacagaaagctatggattccctggatgaaatccaaggagggccatcttcagaatggaaaaatgcaaactaaacccaatgccaactttgtgcaacctggagatctagtcctaagccacacacctgggcagccacttcatataaaggttactccagaccatgtacaaaacacagccactcttgaaatcacaagtccaaccacagagagtcctcactcttacacgagtactgcagtgataccgaactgtggcacgccaaagcaaaggataaccatcctccaaaacgcctccataacaccagtaaagtccaaaacctctaccgaagacctcatgaatttagaacaaggcatgtccccaattaccatggcaacctttgccagagcacagaccccagagtcttgtggttctctaactccagaaaggacaatgtcccctattcaggttttggctgtgactggttcagctagctctcctgagcagggacgctccccagaaccaacagaaatcagtgccaagcatgcgatattcagagtctccccagaccggcagtcatcatggcagtttcagcgttcaaacagcaatagctcaagtgtgataactactgaggataataaaatccacattcacttaggaagtccttacatgcaagctgtagccagccctgtgagacctgccagcccttcagcaccactgcaggataaccgaactcaaggcttaattaacggggcactaaacaaaacaaccaataaagtcaccagcagtattactatcacaccaacagccacacctcttcctcgacaatcacaaattacagtaagtaatatatataactga

SEQ ID NO: 23831 - DNA, 4816 bp, Homo Sapiens
gcggctcctgcgcgttcccgccgaggcagtggcggcgggagcggcagagacggcagcggccggagtcccgttgctgagtctcacatccgggttctggccgtgacccagctgcggccgccgcggagatgtgacccggcagtacggcaaatatggcggagccatctgttgaatcttcaagtccaggaggttcagcaacatcagatgaccatgaatttgatccatcagctgacatgctggttcatgattttgatgatgaacgaacattagaagaggaagaaatgatggaaggagaaacaaacttcagctctgaaatagaagatcttgcaagggaaggcgacatgccaattcatgaacttctcagcctttatggttatggtagtactgttcgactacctgaagaagatgaggaagaggaagaagaggaagaagaaggtgaagatgatgaagatgctgataatgatgacaacagtggctgtagtggggaaaataaagaggagaatataaaggattcatcaggtcaggaggatgaaactcagtcttccaatgatgatccatcacaatctgttgcttctcaagatgcccaggaaataatccgcccacgtcgatgtaaatattttgatacaaatagtgaagtagaagaagaatctgaagaagatgaagattatattccatcagaagactggaaaaaggagattatggtgggctccatgtttcaagcagaaattccagttggcatttgtagatacaaagaaaatgaaaaagtatatgaaaatgatgatcagctcctgtgggaccctgagtacttaccagaagataaagtgattatatttcttaaagatgcatctagaagaacaggtgatgagaagggtgtagaagcaattcctgaaggatctcacataaaagacaatgaacaggctttatatgaattggttaaatgcaattttgatacagaagaagcattgagaagattaagatttaatgtaaaagcagctagagaggaattatctgtttggacagaggaagagtgtagaaattttgaacaagggctgaaggcctatggaaaggattttcatttgattcaggctaataaagtccgaacaaggtcagttggtgaatgtgtagcattctattacatgtggaaaaaatctgaacgttatgatttctttgctcagcaaacacgatttggaaagaagaaatataatcttcatcctggtgtaacggattacatggatcgtcttctagacgaaagtgaaagtgctgcatctagtcgagcaccatcccctcccccaactgcatcaaacagtagtaacagccagtctgagaaagaagatggcactgtaagcactgctaatcaaaatggagtgtcatctaatggaccaggtgaaatattaaacaaagaggaagtaaaagttgaagggttacacattaatggaccaacaggtggaaataagaaaccacttcatgcagatatggatactaatggttatgaaacagataaccttaccactgacccaaaacttgcccatatgactgcaagaaatgaaaatgattttgatgaaaaaagtgagagacctgccaaaaggcgaagggtaaacagcaatggaaaagaaagtccaggttcttctgaatttttccaagaagcagtctcacatgggaaatttgaagaacttgaaaacacagatgactaaattttagacctattttactttctttggagtaaattctggtgtgactaaaattttcagggttgatgggttaccttaaaaagttgatttccttgaagcagtttgaaaatttgaattgagtcttaactttaggaaatgaggtttcataattctgccttttgcagattttttttactttaaagctgtcagactcttttaagggtattttaaaaattagtaaatttgaatgaactaaagatatatctctaccttctcatttgaatatctttagttcattcagatttactaattttggtaaatctgaatgaactaaagatgtatctgtaccttctcatttgatgtattaatcataaaatttcactacaaggtaatttttgcttagtttgatggatgaatgggaaactcaagtccaaatttctgcttaataccaatttctctgagtttcttgaaatgtctttaaaacagacatttttctcaccaaacagtttgagtatctttattaaggaaacccttacgaatcctgaaaattatgctagcatgatttttttatatatagaagtttaaaaataaaccaggtcaggtttgtatatgtaaaattgttgacatcaatgatgtctttccatattcttatctgggcttaagaaatacattctgtatttttccagattctttgtagcctttgaaagatttttacagtacatatgtcttgactgagctgtcctttcttaatacaaaagcgtgtataattttcttaacttgtacagttggtaaacttttatgagaggaattgttattctgagtctgtcagctttcattttattttgctaaggtttttctaatgaatttttaagtgtttgtgtagtaattaagtcatatttcttatccaggtggttaaagcattcataaaggattataaaatttttttttttttttttttaaatttctacttaagggcaagtaatttgagaattctgaaattaagcatgatgcttagattgcagtttgttttgcatttgctctaattttcaaaattatttttgaagcaagacaaaagtttaatgtcagcttaagtgcttaaatatatcatgctgaccagaatcctgttatttttatatgcatcataaaatttcccatttctgcattaaataaacagaggaggggggtcaagtgatacttagatattggcacacacaaggaacaactgttggcaggcagtatcgattttatgaagagaaagtgaagtttgaaaacttttcaaacttttctagttacaatccaatttttcagatttgataatgcttttccaaagtgaaaataagatacacaataatcattgctttttgtgattacagataggattatccatctgcatagccttgtaaaagtgccattttatttttagtgctaaattcttgttaaataatgtagttttatatagctgatagaccaacctatatccaaacttttataaaatattaattattcttgtttttctcacacaggcatactccaaatgcttcttccagttcatttttcagccatcagttcaagagccaatgcctttttaaaataaagcttctgtggtcttgtttttaatggctcaactgtctgatgtaattgagtgaaggtttgcactgagaaattagcattcaggccttacccccatgaagtattactgttaacatatgttcggactgcttcccttcaccaatgtgaacaactttttttcccaaacagtattaaaagccactttgcaacacttgacttcatcttaatgtacattcactgttgttacatacatatctaagtaaatcaaagttttgggtggaagtgttgagaagtatgagttttttgttgtttttgttttacttaaaacttttaatttatccagaatggcagtagctttagcaagcagatggtcacaatctgttttctaaatcattttttattaaatgaatccaaagtatcctagctctttgtcaaagatggtctgtagaaatgtttttaaagattagggatgctgtactttttgaattgttgcagtgttggagatgccattttcacctttttaaaaagatgcattttatttgcaggtttgtgaagttcttgcaaactcttactacagaaatgttttaaatacattctcaggcatgtttgcaaaaatatggcacatgtatacattttaggaaatgttacttttgttaatctttaaaaaatacacctaatgaaagacattccactattatgcgtaatgctcagctttttgtaaagaaatatttaattgtattttgtgtttatacaggtatttcacacaataatttgttcttaatgcagccactataacttgataagtcattgcactatttaaaaagttttagtaatatcatgaatttaatttgcttaagatttagtacatttcagaacttttgaacttttgacaaattgcattgggaaaagaagtctgttaatagtgatttagtctccccgcctcattcccacccccaacaaagcactatcattttcatttggaatgggtatttttctgtttcatgatgtattttcaaatagagttcaggatctgcaattcagttcaacacaagtttgttgagctttaaaatgtatttgaagtaatatttaaataggcatttaaaatttcaaattagatgttaaatttatgcatagtaattttgcactgtaaaataattcccttctcccattccttgtctgccattctgaatatgcttattaaaatatttttttaaacatatttgcctacataatactgtgtgaatattttcattagattaattcactaagattttattagagattgtttgaatgatgcatgttattgacaaggcaaatatatatatatacacagtctgtttcttctattcctagacatattgcactactttttcagtggttcttggtcccctttaccacatcttgggtgatgtatttttgtcttcttcccctttgccacaagagatcctttcagtccctagacctccattcactctgtttctcttctgctggattatataatttaaaaataatgtgttcccgtattttgtagtggagttcatatcacattatgttttgcaaaataaaacttgttttgtcacaat

SEQ ID NO: 23832 - DNA, 4897 bp, Homo Sapiens
ctggaagaaggaggcgggcggcccgggcctcaggcccctcccaggctctgagtctcccggctgcaggcggattggatggggcttcttcaggcggtggcggcagcagcgaaggtggcggcggcagcagcggcagcggctatggtgtggtcgctcgattctcccagtgcctggctgagtttcggacgtggttaagaaccaactggttgaggttcaatgcagacaagacggatgtgatgctgccatctgttgaatcttcaagtccaggaggttcagcaacatcagatgaccatgaatttgatccatcagctgacatgctggttcatgattttgatgatgaacgaacattagaagaggaagaaatgatggaaggagaaacaaacttcagctctgaaatagaagatcttgcaagggaaggcgacatgccaattcatgaacttctcagcctttatggttatggtagtactgttcgactacctgaagaagatgaggaagaggaagaagaggaagaagaaggtgaagatgatgaagatgctgataatgatgacaacagtggctgtagtggggaaaataaagaggagaatataaaggattcatcaggtcaggaggatgaaactcagtcttccaatgatgatccatcacaatctgttgcttctcaagatgcccaggaaataatccgcccacgtcgatgtaaatattttgatacaaatagtgaagtagaagaagaatctgaagaagatgaagattatattccatcagaagactggaaaaaggagattatggtgggctccatgtttcaagcagaaattccagttggcatttgtagatacaaagaaaatgaaaaagtatatgaaaatgatgatcagctcctgtgggaccctgagtacttaccagaagataaagtgattatatttcttaaagatgcatctagaagaacaggtgatgagaagggtgtagaagcaattcctgaaggatctcacataaaagacaatgaacaggctttatatgaattggttaaatgcaattttgatacagaagaagcattgagaagattaagatttaatgtaaaagcagctagagaggaattatctgtttggacagaggaagagtgtagaaattttgaacaagggctgaaggcctatggaaaggattttcatttgattcaggctaataaagtccgaacaaggtcagttggtgaatgtgtagcattctattacatgtggaaaaaatctgaacgttatgatttctttgctcagcaaacacgatttggaaagaagaaatataatcttcatcctggtgtaacggattacatggatcgtcttctagacgaaagtgaaagtgctgcatctagtcgagcaccatcccctcccccaactgcatcaaacagtagtaacagccagtctgagaaagaagatggcactgtaagcactgctaatcaaaatggagtgtcatctaatggaccaggtgaaatattaaacaaagaggaagtaaaagttgaagggttacacattaatggaccaacaggtggaaataagaaaccacttcatgcagatatggatactaatggttatgaaacagataaccttaccactgacccaaaacttgcccatatgactgcaagaaatgaaaatgattttgatgaaaaaagtgagagacctgccaaaaggcgaagggtaaacagcaatggaaaagaaagtccaggttcttctgaatttttccaagaagcagtctcacatgggaaatttgaagaacttgaaaacacagatgactaaattttagacctattttactttctttggagtaaattctggtgtgactaaaattttcagggttgatgggttaccttaaaaagttgatttccttgaagcagtttgaaaatttgaattgagtcttaactttaggaaatgaggtttcataattctgccttttgcagattttttttactttaaagctgtcagactcttttaagggtattttaaaaattagtaaatttgaatgaactaaagatatatctctaccttctcatttgaatatctttagttcattcagatttactaattttggtaaatctgaatgaactaaagatgtatctgtaccttctcatttgatgtattaatcataaaatttcactacaaggtaatttttgcttagtttgatggatgaatgggaaactcaagtccaaatttctgcttaataccaatttctctgagtttcttgaaatgtctttaaaacagacatttttctcaccaaacagtttgagtatctttattaaggaaacccttacgaatcctgaaaattatgctagcatgatttttttatatatagaagtttaaaaataaaccaggtcaggtttgtatatgtaaaattgttgacatcaatgatgtctttccatattcttatctgggcttaagaaatacattctgtatttttccagattctttgtagcctttgaaagatttttacagtacatatgtcttgactgagctgtcctttcttaatacaaaagcgtgtataattttcttaacttgtacagttggtaaacttttatgagaggaattgttattctgagtctgtcagctttcattttattttgctaaggtttttctaatgaatttttaagtgtttgtgtagtaattaagtcatatttcttatccaggtggttaaagcattcataaaggattataaaatttttttttttttttttttaaatttctacttaagggcaagtaatttgagaattctgaaattaagcatgatgcttagattgcagtttgttttgcatttgctctaattttcaaaattatttttgaagcaagacaaaagtttaatgtcagcttaagtgcttaaatatatcatgctgaccagaatcctgttatttttatatgcatcataaaatttcccatttctgcattaaataaacagaggaggggggtcaagtgatacttagatattggcacacacaaggaacaactgttggcaggcagtatcgattttatgaagagaaagtgaagtttgaaaacttttcaaacttttctagttacaatccaatttttcagatttgataatgcttttccaaagtgaaaataagatacacaataatcattgctttttgtgattacagataggattatccatctgcatagccttgtaaaagtgccattttatttttagtgctaaattcttgttaaataatgtagttttatatagctgatagaccaacctatatccaaacttttataaaatattaattattcttgtttttctcacacaggcatactccaaatgcttcttccagttcatttttcagccatcagttcaagagccaatgcctttttaaaataaagcttctgtggtcttgtttttaatggctcaactgtctgatgtaattgagtgaaggtttgcactgagaaattagcattcaggccttacccccatgaagtattactgttaacatatgttcggactgcttcccttcaccaatgtgaacaactttttttcccaaacagtattaaaagccactttgcaacacttgacttcatcttaatgtacattcactgttgttacatacatatctaagtaaatcaaagttttgggtggaagtgttgagaagtatgagttttttgttgtttttgttttacttaaaacttttaatttatccagaatggcagtagctttagcaagcagatggtcacaatctgttttctaaatcattttttattaaatgaatccaaagtatcctagctctttgtcaaagatggtctgtagaaatgtttttaaagattagggatgctgtactttttgaattgttgcagtgttggagatgccattttcacctttttaaaaagatgcattttatttgcaggtttgtgaagttcttgcaaactcttactacagaaatgttttaaatacattctcaggcatgtttgcaaaaatatggcacatgtatacattttaggaaatgttacttttgttaatctttaaaaaatacacctaatgaaagacattccactattatgcgtaatgctcagctttttgtaaagaaatatttaattgtattttgtgtttatacaggtatttcacacaataatttgttcttaatgcagccactataacttgataagtcattgcactatttaaaaagttttagtaatatcatgaatttaatttgcttaagatttagtacatttcagaacttttgaacttttgacaaattgcattgggaaaagaagtctgttaatagtgatttagtctccccgcctcattcccacccccaacaaagcactatcattttcatttggaatgggtatttttctgtttcatgatgtattttcaaatagagttcaggatctgcaattcagttcaacacaagtttgttgagctttaaaatgtatttgaagtaatatttaaataggcatttaaaatttcaaattagatgttaaatttatgcatagtaattttgcactgtaaaataattcccttctcccattccttgtctgccattctgaatatgcttattaaaatatttttttaaacatatttgcctacataatactgtgtgaatattttcattagattaattcactaagattttattagagattgtttgaatgatgcatgttattgacaaggcaaatatatatatatacacagtctgtttcttctattcctagacatattgcactactttttcagtggttcttggtcccctttaccacatcttgggtgatgtatttttgtcttcttcccctttgccacaagagatcctttcagtccctagacctccattcactctgtttctcttctgctggattatataatttaaaaataatgtgttcccgtattttgtagtggagttcatatcacattatgttttgcaaaataaaacttgttttgtcacaat

SEQ ID NO: 23833 - DNA, 4972 bp, Homo Sapiens
ctggaagaaggaggcgggcggcccgggcctcaggcccctcccaggctctgagtctcccggctgcaggcggattggatggggcttcttcaggcggtggcggcagcagcgaaggtggcggcggcagcagcggcagcggctatggtgtggtcgctcgattctcccagtgcctggctgagtttcggacgtggttaagaaccaactggttgaggttcaatgcagacaagacggatgtgatgctgaaaatgtgcatcagatgtttatgtttaattggtttacagactgtctgtggactcttttcctgtcaaattacccagccatctgttgaatcttcaagtccaggaggttcagcaacatcagatgaccatgaatttgatccatcagctgacatgctggttcatgattttgatgatgaacgaacattagaagaggaagaaatgatggaaggagaaacaaacttcagctctgaaatagaagatcttgcaagggaaggcgacatgccaattcatgaacttctcagcctttatggttatggtagtactgttcgactacctgaagaagatgaggaagaggaagaagaggaagaagaaggtgaagatgatgaagatgctgataatgatgacaacagtggctgtagtggggaaaataaagaggagaatataaaggattcatcaggtcaggaggatgaaactcagtcttccaatgatgatccatcacaatctgttgcttctcaagatgcccaggaaataatccgcccacgtcgatgtaaatattttgatacaaatagtgaagtagaagaagaatctgaagaagatgaagattatattccatcagaagactggaaaaaggagattatggtgggctccatgtttcaagcagaaattccagttggcatttgtagatacaaagaaaatgaaaaagtatatgaaaatgatgatcagctcctgtgggaccctgagtacttaccagaagataaagtgattatatttcttaaagatgcatctagaagaacaggtgatgagaagggtgtagaagcaattcctgaaggatctcacataaaagacaatgaacaggctttatatgaattggttaaatgcaattttgatacagaagaagcattgagaagattaagatttaatgtaaaagcagctagagaggaattatctgtttggacagaggaagagtgtagaaattttgaacaagggctgaaggcctatggaaaggattttcatttgattcaggctaataaagtccgaacaaggtcagttggtgaatgtgtagcattctattacatgtggaaaaaatctgaacgttatgatttctttgctcagcaaacacgatttggaaagaagaaatataatcttcatcctggtgtaacggattacatggatcgtcttctagacgaaagtgaaagtgctgcatctagtcgagcaccatcccctcccccaactgcatcaaacagtagtaacagccagtctgagaaagaagatggcactgtaagcactgctaatcaaaatggagtgtcatctaatggaccaggtgaaatattaaacaaagaggaagtaaaagttgaagggttacacattaatggaccaacaggtggaaataagaaaccacttcatgcagatatggatactaatggttatgaaacagataaccttaccactgacccaaaacttgcccatatgactgcaagaaatgaaaatgattttgatgaaaaaagtgagagacctgccaaaaggcgaagggtaaacagcaatggaaaagaaagtccaggttcttctgaatttttccaagaagcagtctcacatgggaaatttgaagaacttgaaaacacagatgactaaattttagacctattttactttctttggagtaaattctggtgtgactaaaattttcagggttgatgggttaccttaaaaagttgatttccttgaagcagtttgaaaatttgaattgagtcttaactttaggaaatgaggtttcataattctgccttttgcagattttttttactttaaagctgtcagactcttttaagggtattttaaaaattagtaaatttgaatgaactaaagatatatctctaccttctcatttgaatatctttagttcattcagatttactaattttggtaaatctgaatgaactaaagatgtatctgtaccttctcatttgatgtattaatcataaaatttcactacaaggtaatttttgcttagtttgatggatgaatgggaaactcaagtccaaatttctgcttaataccaatttctctgagtttcttgaaatgtctttaaaacagacatttttctcaccaaacagtttgagtatctttattaaggaaacccttacgaatcctgaaaattatgctagcatgatttttttatatatagaagtttaaaaataaaccaggtcaggtttgtatatgtaaaattgttgacatcaatgatgtctttccatattcttatctgggcttaagaaatacattctgtatttttccagattctttgtagcctttgaaagatttttacagtacatatgtcttgactgagctgtcctttcttaatacaaaagcgtgtataattttcttaacttgtacagttggtaaacttttatgagaggaattgttattctgagtctgtcagctttcattttattttgctaaggtttttctaatgaatttttaagtgtttgtgtagtaattaagtcatatttcttatccaggtggttaaagcattcataaaggattataaaatttttttttttttttttttaaatttctacttaagggcaagtaatttgagaattctgaaattaagcatgatgcttagattgcagtttgttttgcatttgctctaattttcaaaattatttttgaagcaagacaaaagtttaatgtcagcttaagtgcttaaatatatcatgctgaccagaatcctgttatttttatatgcatcataaaatttcccatttctgcattaaataaacagaggaggggggtcaagtgatacttagatattggcacacacaaggaacaactgttggcaggcagtatcgattttatgaagagaaagtgaagtttgaaaacttttcaaacttttctagttacaatccaatttttcagatttgataatgcttttccaaagtgaaaataagatacacaataatcattgctttttgtgattacagataggattatccatctgcatagccttgtaaaagtgccattttatttttagtgctaaattcttgttaaataatgtagttttatatagctgatagaccaacctatatccaaacttttataaaatattaattattcttgtttttctcacacaggcatactccaaatgcttcttccagttcatttttcagccatcagttcaagagccaatgcctttttaaaataaagcttctgtggtcttgtttttaatggctcaactgtctgatgtaattgagtgaaggtttgcactgagaaattagcattcaggccttacccccatgaagtattactgttaacatatgttcggactgcttcccttcaccaatgtgaacaactttttttcccaaacagtattaaaagccactttgcaacacttgacttcatcttaatgtacattcactgttgttacatacatatctaagtaaatcaaagttttgggtggaagtgttgagaagtatgagttttttgttgtttttgttttacttaaaacttttaatttatccagaatggcagtagctttagcaagcagatggtcacaatctgttttctaaatcattttttattaaatgaatccaaagtatcctagctctttgtcaaagatggtctgtagaaatgtttttaaagattagggatgctgtactttttgaattgttgcagtgttggagatgccattttcacctttttaaaaagatgcattttatttgcaggtttgtgaagttcttgcaaactcttactacagaaatgttttaaatacattctcaggcatgtttgcaaaaatatggcacatgtatacattttaggaaatgttacttttgttaatctttaaaaaatacacctaatgaaagacattccactattatgcgtaatgctcagctttttgtaaagaaatatttaattgtattttgtgtttatacaggtatttcacacaataatttgttcttaatgcagccactataacttgataagtcattgcactatttaaaaagttttagtaatatcatgaatttaatttgcttaagatttagtacatttcagaacttttgaacttttgacaaattgcattgggaaaagaagtctgttaatagtgatttagtctccccgcctcattcccacccccaacaaagcactatcattttcatttggaatgggtatttttctgtttcatgatgtattttcaaatagagttcaggatctgcaattcagttcaacacaagtttgttgagctttaaaatgtatttgaagtaatatttaaataggcatttaaaatttcaaattagatgttaaatttatgcatagtaattttgcactgtaaaataattcccttctcccattccttgtctgccattctgaatatgcttattaaaatatttttttaaacatatttgcctacataatactgtgtgaatattttcattagattaattcactaagattttattagagattgtttgaatgatgcatgttattgacaaggcaaatatatatatatacacagtctgtttcttctattcctagacatattgcactactttttcagtggttcttggtcccctttaccacatcttgggtgatgtatttttgtcttcttcccctttgccacaagagatcctttcagtccctagacctccattcactctgtttctcttctgctggattatataatttaaaaataatgtgttcccgtattttgtagtggagttcatatcacattatgttttgcaaaataaaacttgttttgtcacaat

SEQ ID NO: 23834 - DNA, 9377 bp, Homo Sapiens
ctcggacgcctcgctccgacatgccccgctctggcggccgggctcgcggaggatcatgactgcggcagcgaactgggtggcgaacggggcgagcctggaggattgtcactccaacctcttttcgctggctgaactcacgggaatcaaatggcgtaggtacaattttggagggcatggggactgtggacccataatttcagccccagcccaagatgatccaattctgttaagtttcatccgctgtctgcaagctaacctgctttgtgtatggcgtcgtgatgtcaaaccagattgcaaagagttatggatattctggtggggagatgaacccaacctagtgggtgtaatacatcatgaactgcaggttgtggaagaaggactctgggaaaatggcctttcctatgaatgtaggacgctgctcttcaaagcgatccacaatctgttagaaaggtgcctaatggataagaacttcgttaggattgggaaatggtttgtccgaccctacgaaaaggatgaaaagccagtcaacaaaagtgagcatttgtcctgtgctttcacattctttctgcatggagaaagtaatgtatgcacaagtgtggagattgcccagcaccagccaatttatttgatcaatgaggagcatatacacatggctcagtcttcacctgcaccatttcaagtactggtaagtccttatggcttaaatgggacgctaacaggccaagcatacaagatgtcagacccagccactcgtaagttgattgaggaatggcagtatttctacccgatggtgctaaaaaagaaagaagaatcgaaagaggaagacgagttgggatatgatgatgatttccctgtggcagttgaagtaattgttggtggtgttcggatggtttacccttcagcatttgttttgatctctcagaatgacatcccggttcctcagagtgttgccagtgctggaggccacattgcagttgggcagcaagggcttggtagtgtgaaggacccaagtaactgtgggatgcctctgacccctcccacctctccagaacaggctatcctaggtgagagtggaggtatgcagagtgctgccagtcacctggtttcccaagatggagggatgataacgatgcacagtccaaagagatcggggaagattcctccaaaactccacaatcatatggtccatcgagtctggaaggaatgcatcctcaacagaacccagtccaagaggagccaaatgtcaactccaactcttgaagaagagcctgctagcaatcctgctacttgggattttgtggatccaacccaaagagtcagctgttcttgttccaggcataagcttttaaaacgttgtgcagtcgggcccaatcgacctcccacagtatctcaaccagggttcagtgcaggaccatcatcatcttcatctttaccacctcctgcttcttctaagcacaaaacagcagaaagacaggaaaaaggagacaagctgcaaaagagacccttaataccatttcaccataggccctctgtggccgaagaattatgcatggagcaagatacaccaggacagaaactagggttggcagggatagactcctccttagaggtgtctagcagtaggaaatatgataagcaaatggccgtgccttccagaaatacaagcaagcaaatgaatctgaatcctatggattcacctcattcccctatatcccctctgccaccaacactcagccctcagccacgaggtcaggaaacagagagtttggacccaccatcggtccctgtgaatccagccctttatggaaatggactagaactccagcagttgtctactctggatgacagaactgtcctcgtaggccaaagactgcctctcatggcagaggtcagcgagacagccttatattgtgggattaggccctcgaacccggagtcatcagaaaagtggtggcatagttatcgtctcccacccagtgatgatgctgagttcaggcctccagagctccagggtgagagatgtgatgccaaaatggaggtaaactcagagagcactgcattgcaaagactcttagcacaacctaacaaacggtttaaaatctggcaagacaaacagccccagttgcagccactccacttccttgacccattgcctctatcacaacaacctggagacagtttgggagaagtgaatgacccatatacctttgaagatggtgacataaaatacatctttacagccaacaagaaatgcaaacaagggacggagaaagattccctgaaaaagaataagtcagaggatggatttggtaccaaggatgtcactacaccaggtcattccacgccggtgcctgatgggaaaaatgccatgtctattttcagttctgctactaaaacagatgtccggcaggataatgctgctggcagagctggctccagtagccttacacaggtaacagatttggcaccttccctgcatgacttagacaacatctttgataattctgatgacgacgaacttggggctgtatcacctgctctgcgctcatcaaaaatgcctgcagttgggacagaagaccgacctcttgggaaggatggaagagctgctgttccttatccaccaacagttgcagacttgcaaaggatgtttcccactccaccatctttggaacagcatcctgcattttctcctgtgatgaattataaagatgggatcagctcagagacagtgacagcattaggcatgatggagagccctatggtcagtatggtttcaacacaactcacagaattcaaaatggaagtggaagatggattaggaagtcccaagcccgaggaaattaaggacttttcatatgtgcacaaagttccatcctttcaaccttttgtgggatcctccatgtttgctccactgaagatgttgccgagccattgtttgctacctctgaagatacctgatgcctgtctgtttcggccttcatgggcaattcctcctaaaattgaacaactgcccatgccccctgcagccactttcattagagatggctacaataacgtgcctagtgttgggagcctagcagatccagactatctgaacacaccacagatgaacacacccgtgacgttgaacagcgctgccccagccagcaatagtggggcaggagtcctaccatctccagcaacccctcgcttctctgtccccacaccacgaacccccaggaccccaagaactcccagaggtgggggcactgccagtggtcaagggtctgttaagtatgatagcaccgatcaaggatcaccagcctccaccccctctactacacggcccctcaactctgtggagcccgccaccatgcagccaattcccgaagcccacagcctctatgttaccctgattctctccgattccgtgatgaatatctttaaagacagaaactttgacagctgttgcatctgtgcctgcaacatgaacatcaaaggggcggatgtcgggctttacatccccgattcttccaatgaggaccagtaccgctgtacctgtgggtttagtgcgattatgaaccgcaaacttggctacaattcaggactcttccttgaagatgagttggatatttttgggaagaattctgatattggtcaggctgcagagaggcgcttaatgatgtgtcagtccaccttccttcctcaggtggaaggaaccaaaaaaccccaggagccacccataagccttctcctcctcctccagaatcaacacacacaaccttttgcttcactgaatttcctggactacatttcctctaacaatcgccaaactcttccctgtgtaagctggagttatgaccgggtgcaagcagataataatgattactggacggaatgctttaatgcgttggagcaggggcggcagtatgtggataaccccactggtggaaaagtggacgaagctctggtgagaagtgccactgtgcactcttggcctcacagcaatgtgctggacatcagcatgctctcctcccaggatgtggttcgtatgctgttgtccctgcagccctttctccaagatgccatccaaaagaagcgcacgggcaggacctgggagaacatccagcatgtgcagggaccactcacttggcagcagttccataaaatggcaggacggggaacctacggttcggaagaatctcctgagccgttgcccatccccactctgctggtaggctatgacaaggatttcctcaccatctcgccattctccttgccgttttgggagaggctcttgttggacccatatgggggccaccgtgatgttgcctatattgtggtgtgtccagaaaatgaggccttgctcgaaggagccaaaactttcttcagggacttgagtgctgtatacgagatgtgtaggcttgggcagcacaagcccatctgcaaagtgctacgtgacgggatcatgcgcgtgggaaaaactgtggcacagaagctgacagatgagcttgtgagtgagtggtttaaccagccttggagcggcgaggagaatgacaatcattccagactcaaactttatgcgcaagtttgccgccatcacctagcaccttatttagccactctgcagcttgatagcagcctattgataccacctaaataccagaccccaccagcagcagcacagggacaagctacgccagggaatgctgggcccttagctccaaatggatcagcagctcccccagctggcagtgcatttaatcccacctcgaatagtagttctacaaatcctgcagcaagtagttctgcatctggttcctctgtgccaccggtctcatcgtctgcctctgctcctggtattagccagataagcactacctcttcttcaggattcagtggtagtgttggagggcagaaccccagcactgggggcatttctgcggatagaacgcaagggaacataggctgtggtggagacactgaccctgggcagagctcttctcagccctcacaggatggacaagagagtgttacagaaagggagagaataggaattcccacggagcctgactctgcagacagccatgcccaccctccagctgttgtcatttacatggtggacccgttcacgtatgctgcagaggaggactccacttctgggaacttttggctgttgagcttgatgcgctgctacacagaaatgctggataatttacctgagcatatgagaaattctttcattctccagattgtgccttgccagtacatgctgcagacaatgaaggatgagcaagttttctacattcaatacttgaagtccatggcattttcagtgtactgccagtgcaggcgaccactgcctacacagatccacattaaatccctcacgggatttgggcctgcagccagcattgagatgaccctcaagaaccctgagcggcccagcccaatccagctttactcccctccctttatattggccccaatcaaagacaagcagacagagctgggagagacgtttggtgaggcgagccagaaatacaatgtgctcttcgtgggctattgtctgtctcacgaccagcgctggcttttggcttcctgcactgacctccatggggaattattagagacctgcgttgtaaatattgctttaccaaacaggtcacggaggagtaaagtatctgcacgtaaaattggactacagaagttatgggagtggtgcatagggattgtccaaatgacatctctaccctggagagttgtaatcgggcgacttgggcgtcttggccatggggagcttaaagattggagtatcctccttggagaatgttcactacagacaatcagcaaaaagctcaaggatgtgtgccggatgtgtggaatctctgccgcagactctccttctatccttagtgcctgcctggttgccatggagccccaggggtcctttgtagtgatgccagatgctgtcacaatgggctctgtttttggccgaagtaccgcactgaacatgcagtcatctcagctcaacacccctcaagatgcttcttgtacacacatcttggtgttcccaacatcatcaaccatccaggtggctccagccaactaccccaatgaagatgggtttagccccaacaatgatgatatgtttgttgaccttccattcccagatgatatggacaatgatattggcatattaatgactgggaacctccattcctctcccaactcttccccagtaccctccccaggctctccttctggaattggtgtgggctctcacttccagcatagtcggagccagggtgagcgtcttctttctagagaagcaccagaggagctaaagcagcagcccctggcccttgggtattttgtatcaactgccaaagctgagaatcttccccagtggttttggtcatcgtgtccccaggctcaaaaccagtgccctctcttcttaaaggcttcgctgcatcaccacatttcagtagcacagacagacgaacttctgcctgccaggaattctcagcgggttccacaccctcttgactccaaaaccacgtcggatgttttaaggtttgttttggagcagtacaacgctctgtcctggctcacgtgcaatccggccacccaggaccgtacttcctgccttcccgtccactttgtggtgctcactcagttgtacaatgccatcatgaatatactttaattggaaaagcacttgttctctctggctcagttccttctccctgcaacctcagtccaaggaacctgctacactctgcaaataacccacatccttttcttcagaccactctccacagtcctgcactgtgattccttctcagcaggcacatgtcaattctgcagtgttcattaccagagtgactccttgacacttctctcatggacctggaaacttccataagtggtgactttcagccagtgcggtggtgtgtgtagccccaaccactggtccccaggaagtggtggtggttgatggcttttcagcgggaaacagaagagacagtgtccttttgcacaagagtctgtgttttcagcctctgtatacaattgagggcagtctagccctttggatgaaatcctcttagttactggtgtatggcctgtgggttacctgaactccataatcggggactttttaaaaataagaaccagctcaagtacatggtttcatactggggtttctgtctccctagtgttcccatccagattagcatgagtgctttggttgacttcaaacctgtgtgtcaatgcagaaggtctggagacagcttcattttgtttatttattttaatttgttttgtcatatggtttttgtgactttatttttttaattcacaaggaccaggtacagtagctgaaacccaattcagatccaccataggattctttgactacatacctctgtcctagaagccggaaaaggagtaaaaacacattggggagatcatgcctaaaagtaatatattcaaaaccacccagcagtaggttttgttaacaacaaactggattttaaaagttctgccatgttaagtggccagcatttcatgaaggataacatttttatacagaaggcagtcaagctcaactcagagccatggaggcaagtaccttaattagttttatatagtcacaacggaaatatattttctagtgaattcttattggaagccaggtctctcctctcattagatcaaaagggacttatgtacatacaacaattgaaagtgtttgctcatgaaatcagttataaatatggtgaatttttttctggaccataggaatattatttcaaagaaatattacaacttaaccattaaattagtacttgaagttgagcctttgtggtgggactttttaaaaaaatgcctttttaaagcattaatggctaattgaagtattttatgactcctcattcctggcccagagggttgtctttgaaaccctgtttctaacccttgtgttgtgtgtttctgtctgaggacagtgggtgtgtactggcctcccgggagccactgtgaccaggcctttgagctcttgtcatctgtggagagaatcatgcaaattttaaaagttcttccaagagacttccatgtcctggttattaacaaaaaagaaaaaatgtaataattgatatgattttgtaaaagtatttttcttgaaataatctaaagtttaaaacattatattaaaaaaaaagttgtgtggtgggaatgtgaaagcagagaaataacttgtaaatggataattttgttctctgtaccaccagttgaagggggggttgactttcgcaatgtataggataaaaaatctgatatatcaaaccatttgtatctaatgtgtacagtgtaaaattgactttaaaaatattgcagtgctattttttcttaatcagaaaggaaaattctcaaggccttttgaagagcataagaagatgaagattgtaaacttgtataaaattatcttggtgagaagacaaattgtaaagtagatatttgtaatcttttaccactttggggttgcttttttcccggaattcatcagaactttgaattttttttttaaatgggctgtttttaatgcaggggcttttcttccctagaaacccaattctaagcagaaaaagaaaaaaaacacaaaaaataaaaaacccctacaaaaaaactttaaaaaaaatggcagcaaagggtagttttcatctggtgtcttttatttaagttttttaagttaagaaaagctggtgacatatttatacgtttttgtgcaaaaataaatgaatggcaatagattttaaaaaatcttattatgtacttctgtgtgaaaaagtctgtataatatttcccttaaatatgcattattttacttgtgagttttttactgaattaatctgaaatgtacaagccctggatttgctacagagtgagaagttattttatttttttttatttttaattttggaaattctgcagaaatcagaactcttaccatggtttgaacaaaaaaaggggaaatggggaggggaaaagggtgggattgtccagcatgcttgtatgtatatttcagaaccttttttaaatgtaaaagctgtacatttctgggaagttctgaatttcttttgtttccttttttccttcaagcattttgcagtgagcttcttttatatatagcaaacaatttgaaagaatacaaaaatatgtgaagttcatttaaaaaaataactacagtatagcgctggtacagtacactaaaagactttgataaaaagaaacaataataaaaggcctccattttaaatgtcattcatatataccttgtggatgagagctatatacttttacacacttttttagaggaataaattattgaattactg

SEQ ID NO: 23835 - DNA, 9377 bp, Homo Sapiens; identical to SEQ ID NO: 23834

SEQ ID NO: 23836 - DNA, 1993 bp, Homo Sapiens
aagaatttcgaagtctggaaaatagcaactgtgtttgtttctaaaggatcttctcctgacccagcatcgctcatcacaatgaagaaccaagacaaaaagaacggggctgccaaacaatccaatccaaaaagcagcccaggacaaccggaagcaggacccgagggagcccaggagcggcccagccaggcggctcctgcagtagaagcagaaggtcccggcagcagccaggctcctcggaagccggagggggctcaagccagaacggctcagtctggggcccttcgtgatgtctctgaggagctgagccgccaactggaagacatactgagcacatactgtgtggacaataaccaggggggccccggcgaggatggggcacagggtgagccggctgaacccgaagatgcagagaagtcccggacctatgtggcaaggaatggggagcctgaaccaactccagtagtcaatggagagaaggaaccctccaagggggatccaaacacagaagagatccggcagagtgacgaggtcggagaccgagaccatcgaaggccacaggagaagaaaaaagccaagggtttggggaaggagatcacgttgctgatgcagacattgaatactctgagtaccccagaggagaagctggctgctctgtgcaagaagtatgctgaactgctggaggagcaccggaattcacagaagcagatgaagctcctacagaaaaagcagagccagctggtgcaagagaaggaccacctgcgcggtgagcacagcaaggccgtcctggcccgcagcaagcttgagagcctatgccgtgagctgcagcggcacaaccgctccctcaaggaagaaggtgtgcagcgggcccgggaggaggaggagaagcgcaaggaggtgacctcgcacttccaggtgacactgaatgacattcagctgcagatggaacagcacaatgagcgcaactccaagctgcgccaagagaacatggagctggctgagaggctcaagaagctgattgagcagtatgagctgcgcgaggagcatatcgacaaagtcttcaaacacaaggacctacaacagcagctggtggatgccaagctccagcaggcccaggagatgctaaaggaggcagaagagcggcaccagcgggagaaggattttctcctgaaagaggcagtagagtcccagaggatgtgtgagctgatgaagcagcaagagacccacctgaagcaacagcttgccctatacacagagaagtttgaggagttccagaacacactttccaaaagcagcgaggtattcaccacattcaagcaggagatggaaaagatgactaagaagatcaagaagctggagaaagaaaccaccatgtaccggtcccggtgggagagcagcaacaaggccctgcttgagatggctgaggagaaaacagtccgggataaagaactggagggcctgcaggtaaaaatccaacggctggagaagctgtgccgggcactgcagacagagcgcaatgacctgaacaagagggtacaggacctgagtgctggtggccagggctccctcactgacagtggccctgagaggaggccagaggggcctggggctcaagcacccagctcccccagggtcacagaagcgccttgctacccaggagcaccgagcacagaagcatcaggccagactgggcctcaagagcccacctccgccagggcctagagagcctggtgttgggtcatgctgggaagggagcggcagcccagccaggcctggcccataaaaggctcccatgctgagcagcccattgctgaagccaggatgttctgacctggctggcatctggcacttgcaattttggattttgtgggtcagttttacgtacatagggcattttgcaaggccttgcaaatgcatttatacctgtaagtgtacagtgggcttgcattggggatgggggtgtgtacagatgaagtcagtggcttgtctgtgagct

SEQ ID NO: 23837 - DNA, 4604 bp, Homo Sapiens
cacaggaacggggctgcctctttaaagcagaggggtgcactatagccctgagggaaccagctgcagttgtggtaatcttgggaggcagctccccaccccctgccaccccctccctgctgtcaggagaggattagaggagaggccagcggattaaagggtttcatgttgccacagcctctcccccagtccctgtctccgaggcctgcttgctaggtggggcgactcttctgtgagctgcagctgtggggcagagagaagccctccccacccaggactgagaggctggagaccccaggctcgccaaggcacggaagacaaaggcctggggcgtcctggggtctgggaggaaggcagacagagctcatggtctgtggctgctctgccctccttcccctccccaaccccaggcccaccatgcctgcaactcccaacttcctcgcaaaccccagctccagcagccgctggattcccctccagccaatgcccgtggcctgggcctttgtgcagaagacctcggccctcctgtggctgctgcttctaggcacctccctgtcccctgcgtggggacaggccaagattcctctggaaacagtgaagctatgggctgacaccttcggcggggacctgtataacactgtgaccaaatactcaggctctctcttgctgcagaagaagtacaaggatgtggagtccagtctgaagatcgaggaggtggatggcttggagctggtgaggaagttctcagaggacatggagaacatgctgcggaggaaagtcgaggcggtccagaatctggtggaagctgccgaggaggccgacctgaaccacgaattcaatgaatccctggtgttcgactattacaactcggtcctgatcaacgagagggacgagaagggcaacttcgtggagctgggcgccgagttcctcctggagtccaatgctcacttcagcaacctgccggtgaacacctccatcagcagcgtgcagctgcccaccaacgtgtacaacaaagacccagatattttaaatggagtctacatgtctgaagccttgaatgctgtcttcgtggagaacttccagagagacccaacgttgacctggcaatattttggcagtgcaactggattcttcaggatctatccaggtataaaatggacacctgatgagaatggagtcattacttttgactgccgaaaccgcggctggtacattcaagctgctacttctcccaaggacatagtgattttggtggacgtgagcggcagtatgaaggggctgaggatgactattgccaagcacaccatcaccaccatcttggacaccctgggggagaatgacttcgttaatatcatagcgtacaatgactacgtccattacatcgagccttgttttaaagggatcctcgtccaggcggaccgagacaatcgagagcatttcaaactgctggtggaggagttgatggtcaaaggtgtgggggtcgtggaccaagccctgagagaagccttccagatcctgaagcagttccaagaggccaagcaaggaagcctctgcaaccaggccatcatgctcatcagcgacggcgccgtggaggactacgagccggtgtttgagaagtataactggccagactgtaaggtccgagttttcacttacctcattgggagagaagtgtcttttgctgaccgcatgaagtggattgcatgcaacaacaaaggctactacacgcagatctcaacgctggcggacacccaggagaacgtgatggaatacctgcacgtgctcagccgccccatggtcatcaaccacgaccacgacatcatctggacagaggcctacatggacagcaagctcctcagctcgcaggctcagagcctgacactgctcaccactgtggccatgccagtcttcagcaagaagaacgaaacgcgatcccatggcattctcctgggtgtggtgggctcagatgtggccctgagagagctgatgaagctggcgccccggtacaagcttggagtgcacggatacgcctttctgaacaccaacaatggctacatcctctcccatcccgacctccggcccctgtacagagaggggaagaaactaaaacccaaacctaactacaacagtgtggatctctccgaagtggagtgggaagaccaggctgaatctctgagaacagccatgatcaatagggaaacaggtactctctcgatggatgtgaaggttccgatggataaagggaagcgagttcttttcctgaccaatgactacttcttcacggacatcagcgacacccctttcagtttgggggcggtgctgtcccggggccacggagaatacatccttctggggaacacgtctgtggaagaaggcctgcatgacttgcttcacccagacctggccctggccggtgactggatctactgcatcacagatattgacccagaccaccggaagctcagccagctagaggccatgatccgcttcctcaccaggaaggacccagacctggagtgtgacgaggagctggtccgggaggtgctgtttgacgcggtggtgacagcccccatggaagcctactggacagcgctggccctcaacatgtccgaggagtctgaacacgtggtggacatggccttcctgggcacccgggctggcctcctgagaagcagcttgttcgtgggctccgagaaggtctccgacaggaagttcctgacacctgaggacgaggccagcgtgttcaccctggaccgcttcccgctgtggtaccgccaggcctcagagcatcctgctggcagcttcgtcttcaacctccgctgggcagaaggaccagaaagtgcgggtgaacccatggtggtgacggcaagcacagctgtggcggtgaccgtggacaagaggacagccattgctgcagccgcgggcgtccaaatgaagctggaattcctccagcgcaaattctgggcggcaacgcggcagtgcagcactgtggatgggccgtacacacagagctgcgaggacagtgatctggactgcttcgtcatcgacaacaacgggttcattctgatctccaagaggtcccgagagacgggaagatttctgggggaggtggatggtgctgtcctgacccagctgctcagcatgggggtgttcagccaagtgactatgtatgactatcaggccatgtgcaaaccctcgagtcaccaccacagtgcagcccagcccctggtcagcccaatttctgccttcttgacggcgaccaggtggctgctgcaggagctggtgctgttcctgctggagtggagtgtctggggctcctggtacgacagaggggccgaggccaaaagtgtcttccatcactcccacaaacacaagaagcaggacccgctgcagccctgcgacacggagtaccccgtgttcgtgtaccagccggccatccgggaggccaacgggatcgtggagtgcgggccctgccagaaggtatttgtggtgcagcagattcccaacagtaacctcctcctcctggtgacagaccccacctgtgactgcagcatcttcccaccagtgctgcaggaggcgacagaagtcaaatataatgcctctgtcaaatgtgaccggatgcgctcccagaagctccgccggcgaccagactcctgccacgccttccatccagaggagaatgcccaggactgcggcggcgcctcggacacctcagcctcgccgcccctactcctgctgcctgtgtgtgcctgggggctactgccccaactcctgcggtgacaccacccagcctgacctgtgttttggcaaggtgatccttccagagccatcccaaaaagtcagcactgacatgggatgcagctaactgcagttgggtcgcccccaggccaacgctcctctcaatcctgggctggtggcccctggctccggagaatgctggatggaacaggaaaccaatcacctggcaccactttcaagatgcttcatggtgcccggtaccatctgccctaggtctcaacatgagcatacttctgacctaaccttcctgtctcctcttcgggaagccagcgtgagctcagcttggaccaagacaaaataatttagttcttcctgtactccagagtccagacccagccaagaaagggtcagttgtttctgaccctttctgtcggagtggtctctggtagaacccaaggacttctgggtactgagaagcagcagcagaatgaggccaaatgcagagatgaggctaaggcaagaatatgccccaactaaagcatagattccccaaagtgaggctcatggtgggaggccactcaccttcctagctgctgctcgaaaaggttttgactgtgttggggtgggggttgggtaagggaatggtcaagactgagaaaggaatgaaatccattcaggaaatatcgacagggctacacgtgatgtccccaaactgctgctattgaagaacttcccaaaacttctttacaaagccctaaaggaaagtttgcatctatgaaaagccaataggctgagacatccaattgctgcatggaaattgatgtacattcaggggacggcaaaaatagctgtaaaagtgaaaaaaaaaa

SEQ ID NO: 23838 - DNA, 3653 bp, Homo Sapiens
cggccgctctcgtcgccgccgcagcgggcgcgtcggagggagcccagcatggccgggccgggctcgccgcgccgcgcgtcccggggggcctcggcgcttctcgctgccgcgcttctctacgccgcgctgggggacgtggtgcgctcggagcagcagataccgctctccgtggtgaagctctgggcctcggcttttggtggggagataaaatccattgctgctaagtactccggttcccagcttctgcaaaagaaatacaaagagtatgagaaagacgttgccatagaagaaatcgatggcctccaactggtaaagaagctggcaaagaacatggaagagatgtttcacaagaagtctgaggccgtcaggcgtctggtggaggctgcagaagaagcacacctgaaacatgaatttgatgcagacttacagtatgaatacttcaatgctgtgctgataaatgaaagggacaaagacgggaattttttggagctgggaaaggaattcatcttagccccaaatgaccattttaataatttgcctgtgaacatcagtctaagtgacgtccaagtaccaacgaacatgtacaacaaagaccctgcaattgtcaatggggtttattggtctgaatctctaaacaaagtttttgtagataactttgaccgtgacccatctctcatatggcagtactttggaagtgcaaagggcttttttaggcagtatccggggattaaatgggaaccagatgagaatggagtcattgccttcgactgcaggaaccgaaaatggtacatccaggcagcaacttctccgaaagacgtggtcattttagttgacgtcagtggcagcatgaaaggactccgtctgactatcgcgaagcaaacagtctcatccattttggatacacttggggatgatgacttcttcaacataattgcttataatgaggagcttcactatgtggaaccttgcctgaatggaactttggtgcaagccgacaggacaaacaaagagcacttcagggagcatctggacaaacttttcgccaaaggaattggaatgttggatatagctctgaatgaggccttcaacattctgagtgatttcaaccacacgggacaaggaagtatctgcagtcaggccatcatgctcataactgatggggcggtggacacctatgatacaatctttgcaaaatacaattggccagatcgaaaggttcgcatcttcacatacctcattggacgagaggctgcgtttgcagacaatctaaagtggatggcctgtgccaacaaaggattttttacccagatctccaccttggctgatgtgcaggagaatgtcatggaataccttcacgtgcttagccggcccaaagtcatcgaccaggagcatgatgtggtgtggaccgaagcttacattgacagcactctccctcaggcacaaaagctgactgatgatcagggccccgtcctgatgaccactgtagccatgcctgtgtttagtaagcagaacgaaaccagatcgaagggcattcttctgggagtggttggcacagatgtcccagtgaaagaacttctgaagaccatccccaaatacaagttagggattcacggttatgcctttgcaatcacaaataatggatatatcctgacgcatccggaactcaggctgctgtacgaagaaggaaaaaagcgaaggaaacctaactatagtagcgttgacctctctgaggtggagtgggaagaccgagatgacgtgttgagaaatgctatggtgaatcgaaagacggggaagttttccatggaggtgaagaagacagtggacaaagggaaacgggttttggtgatgacaaatgactactattatacagacatcaagggtactcctttcagtttaggtgtggcgctttccagaggtcatgggaaatatttcttccgagggaatgtaaccatcgaagaaggcctgcatgacttagaacatcccgatgtgtccttggcagatgaatggtcctactgcaacactgacctacaccctgagcaccgccatctgtctcagttagaagcgattaagctctacctaaaaggcaaagaacctctgctccagtgtgataaagaattgatccaagaagtcctttttgacgcggtggtgagtgcccccattgaagcgtattggaccagcctggccctcaacaaatctgaaaattctgacaagggcgtggaggttgccttcctcggcactcgcacgggcctctccagaatcaacctgtttgtcggggctgagcagctcaccaatcaggacttcctgaaagctggcgacaaggagaacatttttaacgcagaccatttccctctctggtaccgaagagccgctgagcagattccagggagcttcgtctactcgatcccattcagcactggaccagtcaataaaagcaatgtggtgacagcaagtacatccatccagctcctggatgaacggaaatctcctgtggtggcagctgtaggcattcagatgaaacttgaatttttccaaaggaagttctggactgccagcagacagtgtgcttccctggatggcaaatgctccatcagctgtgatgatgagactgtgaattgttacctcatagacaataatggatttattttggtgtctgaagactacacacagactggagacttttttggtgagatcgagggagctgtgatgaacaaattgctaacaatgggctcctttaaaagaattaccctttatgactaccaagccatgtgtagagccaacaaggaaagcagcgatggcgcccatggcctcctggatccttataatgccttcctctctgcagtaaaatggatcatgacagaacttgtcttgttcctggtggaatttaacctctgcagttggtggcactccgatatgacagctaaagcccagaaattgaaacagaccctggagccttgtgatactgaatatccagcattcgtctctgagcgcaccatcaaggagactacagggaatattgcttgtgaagactgctccaagtcctttgtcatccagcaaatcccaagcagcaacctgttcatggtggtggtggacagcagctgcctctgtgaatctgtggcccccatcaccatggcacccattgaaatcaggtataatgaatcccttaagtgtgaacgtctaaaggcccagaagatcagaaggcgcccagaatcttgtcatggcttccatcctgaggagaatgcaagggagtgtgggggtgcgccgagtctccaagcccagacagtcctccttctgctccctctgcttttgatgctcttctcaaggtgacactgactgagatgttctcttggcatgctaaatcatggataaactgtgaaccaaaatatggtgcaacatacgagacatgaatatagtccaaccatcagcatctcatcatgattttaaactgtgcgtgatataaactcttaaagatatgttgacaaaaagttatctatcatctttttactttgccagtcatgcaaatgtgagtttgccacatgataatcacccttcatcagaaatgggaccgcaagtggtaggcagtgtcccttctgcttgaaacctattgaaaccaatttaaaactgtgtactttttaaataaagtatattaaaatcat

SEQ ID NO: 23839 - DNA, 2973 bp, Homo Sapiens
ttattcatcttcttgaactgactttgaagcagtatttacaacgtctgaaagtgaggcgctctgtgctccaatgacatcgtcgaatctccaggccctttcttcatctgccccctggtggacccagtgcctcttacctgcccacgactcagggacactagctcctcccctttccccaccccacaaggggccgtcccacgtggctcccgggctttctggcgccggaaaactggcgatgcgggtgggcgcgaaagcccggaaaactttggcatgttttggaccgtaggtaactggttgtgcggcatggactccagctccgttgcgctgtaataaccagacccagttttccctcacgctccaggccagggaggagcccgggggccgctcaggaagtcctgcgcacgcgcgcgtgctcggcccggattggctgttcggagcggcgaggggcttggcgggagcttccagtcgctcgagagcggagagcggcaccatggccccgcgggggcggcggcggccgcggcctcacaggtctgagggcgcaagacgttcaaagaacactttagaaagaacacattccatgaaagataaagctggtcaaaagtgcaagcctattgacgtgttcgactttcctgataattctgatgtctcaagcattggcaggctgggtgaaaatgagaaagatgaagaaacttatgagacctttgatcctcctttacatagcacagctatatatgctgatgaagaagaattctccaaacattgtggactgtctctctcttcaactcctccaggaaaagaagcaaaaagaagttcagacacttctggaaatgaagcaagtgaaatcgaatctgtaaaaattagtgcaaaaaagccaggaagaaagctcaggcccattagtgatgactctgaaagcattgaagaaagtgatacaaggagaaaagttaaatcagcagagaaaataagtacacaacgtcatgaggttattcgaaccacagcgtcttcagaactttcagagaaaccagctgagtctgtcacttctaaaaagacaggaccccttagtgcccagccctctgttgaaaaagagaacttggcaatagaaagtcaatcgaaaactcagaaaaaagggaagatatctcatgacaaaaggaagaaatcaagaagtaaagccataggctcagatacttctgacattgtgcacatttggtgtccagaaggaatgaaaaccagtgacatcaaggagttgaatattgttttgcctgaatttgagaaaacccacctagagcatcaacaaagaatagaatctaaagtttgtaaggcagccatcgccacattttatgttaatgttaaagaacaattcatcaaaatgcttaaagaaagccagatgttgacaaatctgaaaaggaagaatgctaagatgatttcagatatcgaaaagaaaaggcagcgtatgattgaagtccaggatgaactgcttcggttagagccacagctgaaacaactacaaacaaaatatgatgaacttaaagagagaaagtcttcccttaggaatgcagcatatttcttatctaatttaaaacagctttatcaagattattcagatgttcaagctcaagaaccaaacgtaaaggaaacgtatgattcatccagccttccagctctgttatttaaagcaagaacacttctgggagccgaaagccatctgcgaaatatcaaccatcagttagagaagctccttgaccagggatgagaagagcagtctactaaaatgtgcctataggaagactagtctcatgctgttaccttctgaactgtacctttataaatcaattgttttgcaaagaagttatggcctacttagaatctaaaatttgttattcaaattaaatggctgtgaacaatgttaaatagcatcagtttgtccaatagttttaaaggccataatcatcttttctggttaatatcttgagtaattttaaaatgttgacaccttaatcggtcccaggtatgagctataataaacttgtaaaattaagttgatgtgaacataattttgattaattaataaggcgatttctcctgaatttacaccaaagctaatttttaatgaaattggtttacagaagtaaaaaacaaaaattggaaagcaaagtaataaaacttagtttatataaacaggttgaatgatatatttatcaaatctcacagacatcaggcaaattatagcctggtgacaaaagtgttcatagtgaattagttactcttgtaatacttctataattagttcatcaggaatttcatccacttcactgttataactgagaagactgttctctgcagcttcagctaattcagcatcttcagtagcttctaaaaaataagcatcatcaatgccattatcccagacagcatcagcagatgcacctgttgacagcctgctaggtgatggtttatgaggattctgggtttcattgctcctagtttcatctgcttcatctgttgtaaactcttcttcctttatttcagtggtgaagggatagagagtgggataggaaaatatttactcaggatatgtgatttaaccttatactctatgttgaagtaaggtattaagtgacagatactaaagtgaatatgcaggaggaatgctgtctccgatatctcaccgtgggaatgagtgcactgattcaaacgttgctgcactgaagctcagacacacttgaaactccaaatttgaaattacctacagttctgtgcacatacttttcaatactccccgacggaagagcaagggtggatttaattttttaacaagtggacagtccagctgaagacaaatcagaagataaatttgctatcttgacaatggacttagtacccatgctttaaattttaaagtatttagcaaatcgtaaacatggattgaaaaaagattaaaaacagttgccaaaatatgaaaaaaaaaaaaaaaaaaaaaaa

SEQ ID NO: 23840 - DNA, 33528 bp, Homo Sapiens
tttctaaattgtctgaggtcaccccatcttcagataatctaccctacattcctggatcttaaatacaagggcaggaggattaggatccgttttgaagaagccaaagttggagggtcgtattttggcgtgctacacctacagaatgagtgaaattagagggcagaaataggagtcggtagtttttttgtgggttgccctgtccggggcccctggcatgcagggctggatggagggagaggggtggggggtggcgggggaccgcgtttgaagttgggtcgggccagctgctgttctccttaataacgagaggggaaaaggagggagggagggagagattgaaaggaggaggggaggaccgggaggggaggaaaggggaggaggaaccagagcggggagcgcggggagagggaggagagctaactgcccagccagcttgcgtcaccgcttcagagcggagaagagcgagcaggggagagcgagaccagttttaaggggaggaccggtgcgagtgaggcagccccgaggctctgctcgcccaccacccaatcctcgcctctcttctgctccaccttctctctctgccctcacctctcccccgaaaaccccctatttagccaaaggaaggaggtcaggggaacgctctcccctccccttccaaaaaacaaaaacagaaaaacccttttccaggccggggaaagcaggagggagaggggccgccgggctggccatggagctgctgtgccacgaggtggacccggtccgcagggccgtgcgggaccgcaacctgctccgagacgaccgcgtcctgcagaacctgctcaccatcgaggagcgctaccttccgcagtgctcctacttcaagtgcgtgcagaaggacatccaaccctacatgcgcagaatggtggccacctggatgctggaggtaggtcggggggtggcgctcgccaggagccaggacccctccggatgctcgggtccccggccggagccctaaacctgggagagggcaatccccgcgccggcctcccggctcctgtgcgggagtttaccgcgcgccttctggcgagacgcgtggctttatttctgttcctctccagataaactggggaggcagaggggggaggaaaatctgggagaagcgaggctgtcctgggcgggggtaggggagcatcccgcgcgcgtgttcctgcatgtggctgcctcttcttcccacccccctcgcgacctgtcttttgcgaagccgccgcggctgcttgcgctgcggccaggaagagagtcggggcctgaaatcgggaccccgagtagaaaggcaaccccccccaaaaggccagagcaaattcgtcttggcctcaggtccccgcctgtggtcgcgactccgcgctggcacttcaccggggaggtggagggaggagggagaaggagagaaacggggaattcgggagccccggaagtcccattgaagaaacgcgtgtttcaggggaacccaaaagaaccgcttcttgcccctcactccaagtctttgcccagcgagccgtgtgcccacgtatgcacagctctggacctgccgtggtttcgccatgttgctttgcaaactccctttggaaaggctgggaaacgtcgcccgcttaccctcgcaccccattatcccggccaccccacttctaatcgtgccctctcccccaccccccacctcacgaagattacttacagtttggttttccagcttcctcggtgcggagatttgggtggggtaggaagggggggagggggtgtgtgtaggggggataccgggtcacccctgaaggagaggtgggagccccccgtgcctctttccagggctctctgctcccgtctttcccctcgctcgtcaccgcgttccctagtttctgtccttgtgggccgcagccggacactcccgccgcggcgctcaccccttcaagtttcctcccgggatccaaagccccaggggtcggaatacagacctttctggcacccgaaacctctgtttcgggaagcctggctcttctttggggttttcacgccaaaagggcttttctaggatatttcctcgatttttaattattttttgaaaccatccccccctgctccgactccagctgccgaggctgcggcgctcttcctcctctcctccctccccctctcttccccacctctcctcacccgcccccccaaaagcggcccctgggccgcagggacccccccagacattttttccaattgtcgggaatgatagaggaggatctggggatccggatgagaccaagaagtggacccccggagcctccagaatatttttattgattttttgaaaagatgacgaaatccaaaaaagagtgagtgagttagagtgcgcgaaggagtagccaaagggagcgtcgcggagctgccgcggctgctgcgcacttctccgactccccgttttggagctgtagttcacccccttttataggatccctgggaataccaaagcactgatgggctattctgattcactccagtttcctcatctttgttctttattcttatcacgcattctggtcccctccccctcccacaaaaaaaaattaattttttttgtttcgatagattacgcttttttattctttttctcttttgctgatgctatgctctccacccccgccccccaaccctttcccactcccattataggtctgtgaggaacagaagtgcgaagaagaggtcttccctctggccatgaattacctggaccgtttcttggctggggtcccgactccgaagtcccatctgcaactcctgggtgctgtctgcatgttcctggcctccaaactcaaagagaccagcccgctgaccgcggagaagctgtgcatttacaccgacaactccatcaagcctcaggagctgctggtaatgaccggccccttcctcccttcctttctgcgattcccgctttcccctggccaacaatatgccttctatcaccactgccagagcaaattcttgggatccagaatgaccccaccaatagaatttacccacttatgggcgatagctcatttaataggaaaccactgtttattttttgtgtgttcctactatgtgcccaggctccgtgcccagcactgaggctacatctgtgaataagatcctcatggagatttgggttggtgagactcatttgcaattgtgtatgcatgtgtgtaggggacgcatggaatattttaattaacagtgataatattttaattaaattccaaatttccaaaaatagtctgagaacgtgttcacatgataggtatgtggctgtggtgtctcctaaaaacttggagttcaaaggtaatgccctctatatctacaaagtctcaagataccaacacataatagctgttcactaaatatcagttcattgacttttgagcaaagtcaaaatgtggcctttcactgaaggagtccgaggcctgggttcctacctccagtgggactgtgacctctgtacaaccccagggatcctgtcttatctctgcttttctaccagggaacctttttcccacctgatctaactccttttccctgcagcttgacatataagacgaccatattgcagctgtaccgcatggaatagcggctccaaggcccaccttcggtggtttgcacacccctctttgcactgttcagaaaagcaccccctccttcccgcccctccccctcctcactggtagggcccgcacaaagtccacagggctgaggctggcttcttgaactgagctctttgtgaggagccttcctttctggggctctgctgccatctagtggaagacatgcacaaggttgggggaggaattgccgagaatgtggagaggggcctgaatgacttcacctttgaaccgctgccaggttttagctgcttctggtttggtccgagaggcctagaaaggtgctttcttctgggagatctgcttcctttaataacggtgcaagaccagtggttcgtactcgcattaccctgtgaagaggaagggctggcatttcaagccatctttgaagatgatggtggtttagtagtttattggggtgctttaccccggctgtccacagaaagccaaggcagattttaaagcttatgaagaaaacattgttagaattgggaaccaatttgtttttctcatgagagagcaggaaaaatcatcttcatatggttcatttgtttcgagaggatggtgaattgagatgttcttcaggacacccaaatctttccaggactagccaagcaatatattgctacaaacaaacttggctttttcctattccctttatcccagaagttgggatttggaagagtcctattttacaaatgagaaggctgaggcctgggagggaaagggaatcacccccagccccacagctgtgggactggtgctctggttgctggtttagcaaatgaaagagattccaggttctccaggtgaatgggagagagggtgcattggcaaacaggccctgcctctcattcttctgatgacagctcagtggataggcatattttctggtagcacatacgatatttttaatgttttattttggaccgtttccctttgagcacagtttcccgtaagtatctcagtgaaagagggaaacaaggttctttttcaggtgggttgctggtgagagacccaaaagagacagggttgtgtggtccccacacttgcactgagggatgctgtgacactgagcaggcaccctcaccttgccccagatcacctccatctgcaaaatgaggttgctaatgaccatgtggtcctttagtcatgatgacaatggcctgtgaaacatttaggggaaagggctgagtgtcacatccccagaatttctgcctgatatgtaaaaggggagtttgagcagcagagagataaaggcactttttggcactaagtaaaagcaagctaattggttgccaaggagttgggccaaggaaccttattttgagctttatctgtgtgcatcatttttccatgaagattaaaaagactattaattcggtgatagagacatatacaataaattaccatgaaagggccacaatgaccttggccgtatctcattgtaggttcagctttctgggtgggcgggaagcagtattgcctgcaagtcagggttgggagggggtaaggggagctggagtggaaacgaagtagaagaaaatagaatcttggcaacagctacctgggctctcattattttcagtggagcctgacatttgaagcataagaagagctgtcaacaacttcaaagcttcaggggcacattgacaaatgggcccgccttacaatctagcagccacgtcctaatgagcggccttaaaactggtctggagcccaacccccagccccctacaccaggtcagcctgtggaatttagattctcctcttctcttcctgccttcccctccaggagtgggaactggtggtgctggggaagttgaagtggaacctggcagctgtcactcctcatgacttcattgagcacatcttgcgcaagctgccccagcagcgggagaagctgtctctgatccgcaagcatgctcagaccttcattgctctgtgtgccaccggtaagatgaggcttgagccggggagggagatgggggagctcttttgggagatgtccggggagaggcaaaaggccgtaggaactttcattttagttcaggagtttggaggaggggtggtcttgagtagtctaaagtctgaagtttcattcctgggttgctttttctttatctgagctttatatattcgctttctctgctaaactcataaatggtttatgaggacaggtgtggttaaggcaaaaaaaattagtgcctgttaaaatattctttatgatggctaaagtgctctttgaagattacatatactgctcactggttgtgttcaaatctttaatcttttaaggaaaaggatggcttggagataagcccaagaggaaatctcgagggggatgggggcaaatacaggttaaaggaacaacgtcaagataaatatgctgcctgccttgattagtggtaagggagaccaaagaaattcttttttttttttttttactgtagggcatttatggccttctagctgtttgcttctctagctgtttgccccactgggcgcgggagggaacctggttggctttcggtgaggctttactttctgagcgctgggttctgatgccctcagttcatgtggaggtgttttgattttggccgcagcctttaacgttgcaattccgcctaccacgtggatcccacaattgatacatcattcctactggcccatttgttttgtagtttcctaataaaccaaaggcagtggtttgctgttgtcttattaaacagccttggccagtgtctactggttttttgtttttttttttcttggtagtggccatggcagagaccctggaaccttactcatccaagggagagatgtcaggagttcatgttttgacaatcagaaaccttaggtaaaaagctgatcacttgggaagacctttcggtgtgcttcacctcaaatttgccaagagtagttaaatcgctaggtggactcacgtggtaacttttttcaggatgttgttacatgttactggtgagttctacggaacggatgattatataacgtacgatgtagtgcatatgccctgtgctcacagtcaaaaagtcaggctttgctgcatatcagtgagtgacctttaattggctgcttaacctctctgaacccgagcttcttcatctccaaaacaagcctattgatacatcatcctacagccttttcagagcagctaggaaaattaaaatcagaaagaggtgatgcacgtggacgtgctttgtaaaccgaagtgtaggttggaccttcactaattgtgaaaatgctaccatctccgattttcaccctgattttaactgttccgactaaagtggatatgatggctttccttttctggctgcccttacgtgtttctagcaggacctgtgtgttctgcacttgcaggcttgagtgtggagtcctcccggccccctgcctgttcatctagggcacaggtttccccttgctggttttctgtagtcctgttctcctggatgcaggccaggcctcatggcgtgcacatgcgccctgtgccccttggtgggagagtccgttatccttcctgcagccctgggggcggttcttaggacccctgtggacccctgctgccttttggatagtggtcactctggcttccttcccttctgctgtctggcccgggcccgagaggtcagtcctccagtgacctgtcattttgtctcccaggctcggctgtctccttcctctctcatcatgattcactgtgggggaggggtcagccagttctttctctctggcccaaggacagctgacccccgaccctaaactcccccactgcccagctgttgatagccagagctctgctcaacactgtctcttgactaacagatcttttggggtctaactgccccttcctcctctctgatctctgattggggtaggggtgctgggtggagttaccggggtgtgggcagatccccagattccgtctagacccattctcgaaaaccggggatcccatcccccacccgtggccttcttgcccagatctttgggctggctgccagctccggggccagagtagggagcctgggattcagagactgaggacagaggcccagagggatacagaggcagttataaagactgtgttttgggggccttgaactagctttggtcagggactaggaaaggacacccccaaaccacatgaaaatggtgtgctaggcactaagcctcaggcgttgacagggcagagcacaggtaggtcctcggcagtttcctgggtctggaaaggaggggcctgtatcgaaagaagttgctttccctcatctgcacttgggtttgtgcaactgactgagtcacatagaatcctggctgcgtggagttttacaacagtcggcctcacagtacaaacaccgaaggccgcttttcttgaaggaaacaccttccatggagaggcgattgtgcattgtggggccagggtgtgatgaatgggcaaggacccaggactctggccagtagcgggcacagagtgactgagaggcagaggtaggagatgcagattccccaacccgagctgttgccctcacctgctcctcaaatcgcacacttccctccttttctcgcagtcctggatgttccgtcctggagctgatgaaacacctgcggccagggtctcggaggtccacagtgggtggagggtgggggtcccgagagatggccgccaaccctcaggccgtgcagctatttgatgggaaaagctggttgtgaaagagctggcagtggttctgcagtgtgtggggagcgtatttgtgtgtgaaaggggaagggagagcaggagaacatagaggggccgcgtaagtgtggcgaagtggcggtcttgctttatggggctctggattaagatggtggcaaggcggagaggagccctccttccttccctgctcagcctaaaatggcttctggaagagcaagggccgcaagctgctggtatccctctgcagcaggtcctgggcagtgcaggcatgggtgggttgggcgggggatcttcctgactacagctcctagcattcctgttcctggagtttccaaaactggggaagcagaactgagccatagcttccctggttgccgctctgctgatagaacacccaggtctgcaagcgaggaaagaaggccattggagatgacctgggttcgcactctggcactgggagattgttgagatgtgataccatgctcggtggatgattccagttagtctagcagagccaatggcattgagtttacacctggcaccgggtagggggaggtgctcaccctccctctccaggcacccacatcccctctttcttcactagaagcccaccctaagatgctgcaccttggtatttgtgccacacacggtagccacccccaggcctccccacgccaaggccagagccccattgttgactagaacccattgtgctgtcctagccccttccctggctttacctacaggtgttccctcagattccatcgccaagtgagagggagacagtggtggcccagagaagttcgatgacttggcccttgatctagagtgggagatttcgccttgatgggtgctgggaaggaagaatggaaacccgtctttccatctgcaagtctctgagctacccctgaagccgcgaggtcatgggactgagggggagtcgttagcatgccctgtggggacaagcagccaggcagtgtggtgcttgccatcgctcttccctctggctgtaagatgaatgggtagcaggctgctcatcgccctccaaccagccccctccccagctcctcccagcaggccttgcagttgcatgggcattcccttgccatggcagccctgccccacaaggacagggtatgctggtcctcttatgggggtggcagatgaggtgcgtgcccagtgacgtccctggcctgtgaacactctggttctggccctttgaacttccacctgactgcaggttggagaagagagatggggaaagcctgacctggccttccctttcttcttcagcgtcagagtgcgtatctctctccccctattggtgaacagaagcaaagccatcacccctgcaccccaagacctcggccaccatagccaaaatgatgggtgctaaatgtactgggcaggaccatgtattccgtggttttaaacttacttagctctgaactctttatttggtaaaatcctaccaagaagtgcagataccaagttgatgaaatggagcacttctcagggcccatgcccaggtgagggagcccagcgggacccccagaggctcccagggcatccttgggaggataagccttttgtgcttgctggtgccggggctgcggctgggacccaattcctttgattcctgagccagagcgccacctttggggctcttctcccacttccgacgtgaaaggctgccctgtcctcctgagtggtatatgggaggtgactttgaggagctggtcagcttccagtaagttacgaagagctctgcatccagagtctcaaagtctcatccggatcccaggcccaacactcacagtgagtgacatcagccagatcacttcatctcccaagacttcattgattcacctgtaaaaggagatgtttgaaacagatgaatttcaagctcctttttattaatacctcaccatcatcaccgccgtcataagcaagcatgcagcccacagcagagctgcccctggcgcctgtgggtccagctgggattcccctaaggtgtgtcctttgcctccaccattttgccaggagggaggcgggaatgtcgggtgttcctggttatctgggcatcgttccttggctcgggtgaactgcatctcaatgaattgtggaatgtgctgggttagagttgccaacttctctcttccattcgctgagtgttcatggggttcttttcattcccctgtggggctgcactttctcccagttctgcaaagcagcaggaggctttggggactcgatgatgtcatttctgggacacatacacaactggatagtgacagattctccaggaagcacagagccctcattcttcctggcctgcttggcctgctccctgcatctgcctgcaatccagggatgctgggcgcctttctcctcatccctccagacgctggagagcatctccagtcggaactccccaccacagtcctgcaggaagtactaggagtgagagcagaggaggggcaggttggggaggatgctggctgacattcattgcttaccttgaaccaggcactgtgcttttacaaggattattttaagtgaatcctcagaacagcactacaacgtgggtattgctgttgtcattatttgcagatcagaaaatgaagactcagagaggtcaggtaacttgctcatcttcacacacttggtaggtggtgggatggagattccacctccttctgattccagagctaatactctgaaccagtgagctgtgttctccagaggtctgctttggttggaggggagctggagccctaggccctgggacggcctctgttgcccatggcaaggcgtgtggctgctcctgctctcttcagatctccagatgcagcaacctggagaaaggccctcctgggtctggtggggactggggcaggagtggaggctgcccaagctccgtgcactccacgttccagcttggagctttttgagtctactctccaaatccttcccatctccctgaagagtcttctgagaagtgtctcaaatgctcctcttcactcaagagcctcctttctttttttttttcttttctttttcttttttttttttgagacagtcttgctctgtcacccaggctggagtgcatggcacaatctctgctcactgcaacctccaactcccgggttcaagtgattctcttgcctaagcctccagaatagctgggattacaggcgcgtgccaccatgcctggctaatttttgtatttttagtacagacagggtttcaccgtgttggccagactggtctcgaacttcggacctcaggtcatctgcccacctcggcctcccaaagtgctaggattacactgtgagccactgcgcccagccttcaagagccccctttctttgagaagtttcttcagaagttatccatatagtagtacagacctagccattatagcacaccatcctctactatctaatgcattgatgcccagccttaagaagtctgaatattgtacgttttggggggagtcctccatgctgcctggaacagggaggagcacattgtcatgagtcgatcagaatggatcgctgatcggttcattgcctctctctctgctgcaggaggaaggatctcaggaagtcaccagcatctcacctctccaggtgggcaattaacgatggcgagggcacaccctcacccctgagcgtgccttctgcaccagcatattgcttgttggcatttttgatcaagagacttaacagactgctgagaaatttgtacctggtttttatttgttaaaataatattacgtacaaattttacaaactcatctgtgtttctcccacctaacagaacagcttttattttccgtgcatccttccagttcatccataggcatatatgtatgtatttacccatggttgtaatcttcatcgtcgcatgcatgcatgcaatttggttttccgcttccttcttctgagtggatattgtgaccatttctccatcctgtcatagcgacaaagctgatggtttccaggaatggctgcattgggtaggtggagctttccacagttgagggtgggggttggctaattacagctaggaagctagtgcacagatgaaatgatgtttgatttttttgtttttctctctgttcagtatcccctaccagtagagagggggatgtccttgagagtggtcctggggcagccctggtgccacggggaagtagcgccgctctgtggagagggctgctttgtgaatttgccggctggtagacaccgtgatccattctattgtctcctcattgttcttctccttgggagtcattcccattccagatcctcaagtaagagcaaagtagacctgtaaggcacctgggaggttatcctgcttactatctttaaactcttgacctaagccatgtaggaagaaacacattttataacacaactcaggatacttgtacaagtatatcaaactgatacaaaagtttctccgaacaatatttactcttaacgacatacggtgagcctgatactttctatcctactctatttggttaaaggagaacaacaacagaaagtgctggtcacgacccacaaatgcatttcatgacccattaatgagttgcagctagaagttagaaaaacacttatctcacccaacccgttattagacaaatgggaaaccaagcccttggaaagaggaagtgacttgcccacagtcccacgtctggacctagctggagggctgatgttgcctcagtatttgactaacctggaggagaggtggggcatgctcagggatcccgaggaagatgctcgtcttctgtgtagcgggcaacagagggcagcacggccgccgtcctcgtctccagcggcgtctctcctctggctgtgggaacacactgctcctttggtgccactctgagctgctgagaggcagtcaagttcatgcacatagtgctccccaattctgtgggattggacagtgtccccaagaggactcccctgaaaatcttcttagtaaaacaaaaagggaggtagagtctccctgtgcaaccggtgcacctgttccccctatgcctgctggcttccagaagttcattcgtatgccaataataagagttggttttgctagcagtgggacagcagagatgggcatgtgtgaggtgtgcttcccggtctgaggcctatggcagagggaagggagggccggggatacttgcctgcctcttccctggcagatgctcccacccgggcctttgtgggcccagggccatgggccggctgccccgcttgtgttatgaatgtcacaggggggagctaacgaggttattgggcagagaaacactctcctgtgacccatgtggaagagacctacagcagagcaagaggcagggaggctggctttgtcacactgttcatggcgacagagaaggcgtaggaggggcgggtggacagcaggcgtgggcgcagcaccattatatacgtccctcaagaggtggagatggtgagagggcaatggagaaaaagccaaggagacaggcagatggccaggtttgctctgcgttcatgatgggaggggagggctgtgcttggctcagggatccacggtgtctaacaatgctgctaacttgatgctggggcaatgggctgaccattaaaagagctgctgtagaaagtgtgtttgtaatagagtgtgtacaggaggaaggggaaataggagaggggctggtttttgtagatttaacctgattgtttttgctgtaagttgaagggtgacccacggttccctgtatgctgtgtctcctgcccccacgtgccccttccatgtctacacacagtaagctcactagagcaatgctaaaacgagaaagagtacgctttggaagacttgctgcactccaggaccgtcactagcgtgatggctgcaactatacccaccctaatatctgtcaacacgagcaggggcaacttaaactctcaaaagtctcagggttctcacccataccattagggtgacgctcgtgtgcatcttctgtggctgatgggtaaattaaacaggacgtaatgtgtagcgtactgcatgtggtggtcattggtagctgtcagcagctgtaacaggagaagttggctgtctttatttcccctcgatggaccaagcagctgctggatcatggccacccagcccctctgaaggagtgctcggaggaacacaagggggctggtcttccaagaggagccctctagcatggcagtggacggggttcaagcccctctgatttattatcctcattctgcacttccctgtagcaagtcacatttttttctcttagcaataaaatggggccttcagtctcatgagtcataacatcgaaaccgagtcacccatctgattcggatgcaatgattaatcttcagtgcttagttagagccctatgttagggttagaatcctctgccctaatgttctgagggttcttgctgttgggccagaggttgggaactgggtggaactcagcccccactcgcccactccctgcattgctgcttctctcatttccttttttagatcaaaccttttttttttttttttgggtgggggtcatattaatcctcaatgcctgtccagagactataacaagatcccatctgaattagcattatgcatagattttgcccgtttctcccatctccttgtactttccctccttctcacatctggagcccctggtctgtcctgcttgcatggcccatggggtaccttgtctgcactggtctcaggcattctctgctctgttcccaccatcacctctagaggagactatgactcgctcaccttgctccccccaccagggtcaagaatgttaactcagacatgcttaatatgactgggatctggggattggggaccttgaatcctctgtgcattcattgtgtgcgcttagataagctgtcttccttccctgcctcagtctccttcgtttaatctggaacagccatggtgatggcaaataaacacaggctccttgtgaaagaactcgagggaggacatgcctgtagggcacggggtcactcgcgccgctgacctgctgccgtcctgtttctgagtctctgcagtctcgggagctccaggatccaaattcgttctgtgccctgaccttctgcctctcattccttgcagactttaagtttgccatgtacccaccgtcgatgatcgcaactggaagtgtgggagcagccatctgtgggctccagcaggatgaggaagtgagctcgctcacttgtgatgccctgactgagctgctggctaagatcaccaacacagacgtggtaggtggccaccaccttcttggctaagtccagatgtctcttctcagctcagggaaggagacgacggatttgattatgttgtgtcagaggtatttttctggtttgtttcctaagatcgacatccaagggagtgcaaagttcagcaggtgacaccccctcttaaggttctgaaaagctgtgcacgggaaaatacggaagaaaactcagcaagcagatgaagggggtgggggtgggagggctgtttaccgatgttcctttatggcgtgggcttctcagtgggtctgaattgttgcttcattgccatatttgtacacgctgccaggctgcctctgcccggcagcgaagagctgccgtgtctgctttcacacgctgaggctgtaaggcgcacagaggagaaaggagagccaggactcagctgcagtggatggagcagacacacaagaggtgccccactgtgagaacggtgtccgtccctggcaaacctctcgacccctccccgctctctcttcccttttgttcaatgcagtaatggattacaaagtgctttcaaaagacaaagtgccatacaaactcaagaaactattattagctacggagcttccccattctgtgtgccctgtggacggcccagaggctgttaacttcctgttgccagaatttggagctcctgagaagaaaggttttgagagagaccagggtcaagtgagcctctgaattcaatcagcaggaagctgcagtcctagcccgtccgagacaggatggtgccaagaggtcagagaggccattccttcgttttccacgggcaggacagggactgaagtaaccagccaggagcggggtgggcagtggctgagctggggctagaacccccaggctccggctgccccctggaaacttcccactccacccttgttgccgctcctgggatcttttggtttgaaaaaaaaccctggggtttaaagtcaacctgagagaggggtgttggccctgagccctcatgcatcaccatggagaggctgaagaatgctgggcacttcacgatgacaccctctggatggtccggggggattcagatgccctctgcgggcttttattgagttaagggatcatgtggtttataggcctatggctgaggcctgcacgagggatacgggacaggttaaacctcagagagcccacggctgcagctcgccggcctcctcgcccgcccacctggattttccctggcatttgttcccagctcagagaaatggcgcagggagatgctgacggagcaaatccggggtcctcctctgagatagttcgtagatatggttttaaaatgcgggctccaaacatacgctttttaaacgaggactccagaacacagactgaaaacctccctccagtgcagcatgaagaatgcttttctaatcctccagaggaaaatcgtggacgggacttaacgtttatagaaatggtacgctttcctccttttctgaatgtctccaattaaggctgccttacaaataggactctcagccagtttaagacaagcccttcctcaatgcctggagacaaaaatgtcagtgacaggagttggaagcggccacccccctcctcctgcccccaggcattgtaaccttttccccccgatgttgatagacctgctctgatgggctgaccaccctaccggctccagccttttcccacctccctttgtcccccgttactgatctcacatggacagtggtggaaatttccctcctgggagttgctgctacgtctcttggcttttcgagaccgcaggcaagtcagtccgtcatctcatctggagaaactgtttgcctttttctgatactacgtagccagtccatttaagtcagctggccaactctgttaaatggatatgaagtgggtacgaagctggtttaggggtgtcctcctataaatcctaactgttggtcaagttgatatctcatttctataatgggcacacgccgtgtttcctaactggggctgcctgtgtgtgcctcattcacaccggtggacctgggttgaacatgttcatatttaaaaaccaagagtgaacgcggtgaaatgtacaattcataacactttttcaaagaaaaatctgagccctcaggaagttccaggcttacctctggcaccccggaggctggttcgctctccctgaaaatgtttttagtggaaaggttcaagcagctctgggctaggctgtgtgtgtgtgtgtgtgtgtgtgtgtttatgcacctttccaagtgctaaatctcctcccatccatcagcctgtgttctctgaaaagctgacgctcagagggaagaaaaataaaaggactagaatttagaacacattagtgtttggagggaggtgagttgtgcttcctgagctctgtttaccatttcacgagtcaagaagtggtgtatttccttcattcgtttctggaagtctttactgaaaggcccagttgttgctagaagttggggtggatggtggcatctgggaaatagaggatgagattcctgccttcaaggaacttagcagttgtatgatgaagcaagagtaaagcgtgcaaaaccctagcaaattaagaacgtaaacaaaggtgtgctacgtaacgtgttacgaaccctaaatgcagtaggaaatcaacccaaaagaaggagctcatcaggcctaacgtagaatgccggcctcccagcagagaaaacttggtgatagaaactgttcttagagtagagaaacaaaatgtatgggcacgcaatggaatattattcaaccttaaaaagaaatgaaattccgatccatgttataacatgggcgaaccttgaaaatactatgttaagtgaaacgagccagacacaaaaagacaaatactatatgattccacttataccaggtacctggaatagtcaaattcgtagagacagaaagtagaatagaggttcccaggagtctggggagaggagaggatggggagttagtgtttaatgcgtacggagtttcagtttgggatgatgaaaacaattctgtagatggagagttctgatggccacacagcagtgtgaatgtacttaatgccactgtacatttaaaagtggctgaaaagggaaatttgacattatgtgtatttatgatagtaaaatgtgtgtgtgtatatatgtatatacacacacatacataaatggatatatatatatatgtatgtatgtatgtctgaaacattctcgggccacgctatgaaatgcccataggttgatgttgagctcttccctggaaaagtgaaatacacaggaccacattttgccccctggccctagtgcattgacaaacgggaatcaggaagagctgacagtttcccccagagcccctgaagttatatgtcagctcctacacaccttgctgtttctgatttcttcaagcttgcaatgctctctgttactttgggggttaggtcgtgggttgtcggggatcgagctgtggaaagagggtccccctgattcttgtgagatggccaggcgagtctctgtggttcattggccaggagcagatagctttgatatgagggacgcatgcggctctgagaaagtcggcctttgttgctccgtctggttgccaaaataaaccagaacgcttcattccaaagagaaagctgagtgaggggcctgacagttttatagggaataaacgtctcagagagtggtatattttaaatactttttccttccaatcgtaagagttgctaaaaacagccagagaggcagtttggctgtaggggggacgtctattgggggtgtccagtgcctgggtaggtttgagaggggagggtgccactggcctgggtccccggtgaccatggccctgcttccttgggctgaatcggggtcctcttccatcccctctgcacactagtcgggctgcgtgccagcattgatctcactgcttccttgtctatagaacctcttgaataaggcccagcttttcctcagctctttatccagagcccctggcagagtcattgggagtgatgcttaagagaggaagggaagaggaaggaaggagcaaaggacaaaggcaggcagatgggtttccagtgggtttccgattcactggtctgtccatgtcctttgaaaagctgtgtcttttctttaacttcaattctgtgtcagggccttccgagccttctgagttttccccaaccttatcttagagtaggttaaatgaagtggcttcattttcatatgacacagttgcacaaattcactaactaaaaaatggaatggaggctcacaggccataaaggtgttgtgaagttattgcaagatacttaacagaagaaagactctagtcatctgttccttatatttatccttttttgtctaagtcacatcaaaactctttgtcacattctttaaaaacaaaaagcaaaaaacaaaactttagattcaggggatccatgtgcggtttgttacgtggatatatcgtgtgatgctgaggtttgggcttcagtcgaacccgtcacccagacagtgtacacagtacccaatagggagtgtttcaactctcgtccctgtccctagacacattcttaaatattgcccagagaagattccaggatatcccttccttagggtcatcctggcattttacggtcctggttatcaatgagctattaaaaagcagggaggtggaggcgccgtggaagaagtctcagtttcgaccacatgtgtgtgattcatggggtttagcattgtgtgtttctgctccgtagctggaagtgccgccaccctcgccccacatgtcattttcaagcctccactgttacagattctgtcttctgtggactcttcagggcctgtggtcaggaaccttgtgaagtgttgctggaagctgggggtggggaggtggaatagaatcgggggctgatgcctccctctcctgcctcatttttctgtgggcctcatttggtatgcaaggaaataagccaaacagcctgtgaagaaaggaagaatgagatagtttcctaagttgtctctgcctgagttggccgcgggtctggggctcattcagccctttgtccccctgttgagtgcagtgcgtgtgtggtgacaatgaggtggtgcagttacactgagggctaatggtaggagttccgtcagcccattcatggaggcagaggagggtgcagggcgcggagctcgagccagcaagcagaggaagtcagaggcccttgtaacgagctgaagatcacaaacactgctgtgagggctccaggcttgggggcgggggcagccaggagggaagggggcaagggagggggcctatcatcatagaagttggaggtctgcccgacccccagcgcggtagggtaccacctgtccaggctgacagacgagcattatggcttcccttttaatcagcttaatttggggcatcttaacacaatggctggtgctttggaggctgcaggaaagctgatgtcctagagccgccacacttgacatgcgtgtaacaccttttgattagaggcgctttcgtgtttttccagccacttgggctctgtctctttttcttggagattctctggtctgtatgtctttacttagagcttagaagtcgaggtatataggaaaaaggagttctgaaattggaggcttgccctttctaaagccagtctgagctttcagccagatgtcactgggacaagccacgtcaactctccacgctccattccctagctgggaaacgagggcatttggctatttgatttccagaggccctttggacctccaaattctccaagtctgtgattatttgtgtatgtcttcttataatccagcccctttggaagcactaactccactcttctctcagcttgatcctctaatagaagcaacctggttggatttaaggtggaggtcttcctctctccaggtggctgccctcatctctacccccaccccaatcccatgcattctcctgccctcctgctttgggcaagacccgggcgatgtggagttggcatgtccagttgcaggtatcagcaccactgcaccatctcctctgccttcacttcccaccagcacacagaatttatatgcccttcccaagtccaaaaagggcccctgccatgctaaacaaaggtattcatatgcaaggcatgagctctgtctcatggaagggagaggccaagttctctttccaccatcagagagtagcgttcaacatcatttatacaagacaggcttttgcccttttagtcttgctgaactagaatgagggatttgtgtagtcgaaagtcaagctgatcattgtcaagtttcgtggaagtggaacctgaaggaaggttaggtggagactgcagagagggttagcgtcctgccttaccacaaggtaagtctagaagagggtggggaagggagttcagaattcttcattcatggagtgtacctgccttggtcatccttttatcttccagtcagaggggtcatcagtcaagagctggccaggctgggtgtggtggctcatgtctgtaatcctagcactttgggaggccaaggcgggtggatcatctgaggtcaggagttcgagaccagcctgaccaatctggtgaaaccctgtctctattaaaaatacaaaaatcagctgggggtgatggcgtgcacctgtaatcccagctacttgggatgctgagacaggagaattgcttgaacccaggaggtggaggttgcagtgagccgagatcgcaccattgcactccagcctgagtgacagtgagactccgtctcaaaaaacaaaacaaaagctggccgtagtcaagtcagtgatgatttggattgaaattaaaatgtgactaaagagagagtatgcagttttgtctatctatgaaaccttcctctgttttatgtgggacacctgggcacccactcttggctggaacttacataaaacactactgtgcacgcacatgtcacctcaagtcccgtggctctgaaagtccagtagaagtgacagccagacatcccagtcctccctgtagggttttctcagaactgttcctttaaggtctcaggctgctggaagggagggctgatagcagaaaaagtggggacactgggaactccaaagggaagacgcgcatggcctgaaaccgagttctttcgctttctggagcctggtctccctatgtggagggtcatgctggcatggctggcaatggttaattcaccgatggccatggagtcccaagttggccatattattgcggtaaaagatacattaacccagatgaccttgccgggggccagaatagagcccgtgaggaaggagagcaaggcaggatcggccgggaggcgagagggattttgttgaggagcaaggtcttccacaggaactgcgacttggaaagtattcaccaagggctgtgccatgcgaaaccctctttaaaggaaccgcatcgctacgcctaacgggcatttcttttttaatgtaatggttcagagctattgtctaccacgcctcgcgtgcacacgcgcacacacgcaagttccctcagtcagccgagaatcctgccatctcttttagataacaaaagctcttaggccttatgctttgggtaggatttgtcttccatggacaggtattcagttggaaacaagtatatagtcactgcctctatggtatggagatactccgatttagtccctctgcctcttggggaaaaaaaaaaaaaaattgtaaacatccccttcagcagcttctcaagtccctgtacagtggaggaacattacacgtgaacttcctggattcaatggattcttctttgcaagaaaaaaaacaaaacaaaaaaacagagaaagaagaaaatatcaatttagactgttaggtccaacgtttcactcagtgagtgagcacagggggtgacggaggatggctggaatgtggggttgaagctgctgttctgggtctcagctcctgcccatgtaccgtggagtgagcatctcacaccacgatgattctggcatttaagtgaactccttcacacggtgctcaagtggagaaagggctgtccatgtctatcccagcttagaagaaaaactgatggtatgagacttgccattcctctctgatgtagaacctgcctaagggacattccacagcagttctgaccgttgtcactttgtgccttaacccccacattcattttgattctatatttagtattaaattttttagattattaggatttaaggttttcaaacatctactgaaatgcaagtgcccctagaaacattatactttcaggccgggctcagtggcttatgcctgtaatcccagtacttcgggaggccaaggcgggcagatacctgaggtcaggagttcaagaccagcctggccaatctggtgaaatcccatctcaactataaatacaaaaatcagctgggcgtggtggcacgtgcctataatcccagctgctcgggaggctgaggaaggagaattgcttgaacccgagaggtggaggttgcagtgagccaagattgtgccattgcactccagcctgggcgacagagcaacactctgtctcaaaaaaaaaaaaaaaaaaaaaaaaaaacagaaaagaaaagaaacattataccttaacttttcgcacctagtgagtgataacctatgaggataatgctgccacatggtccttgagggaagaacttggggaagagccgaacagggatgaggcaggtgagccccatgtgatttatcgtcattcattcagctcaacaggtcggacagggtaagggtaagggatgtaaccaggagatgccacaggaacgtctgagaggtgttagcaagtcccagaggccagcgcccgactccatttcagcctcgttcagggtggcacggagactcctgctgctgcgtcacgtctgtcatgttcagcactcttcccagacacacagtcttgactaaagattgtcaggatcttgacacacgcttcattagtcttgactaaatgcgaatctatacctcatttcaaagaaatctgaattctttaggttccaggaccagtttattgttatacataatcacgatcatttattgagctccacttagcactgcacatatatcagtatcatctcagttgccctttactctgattattttgtggggaaactgagatcagaaaagttaaataacttaggtgccacctgcaagtatagtgggtgggcagcagataccacccttcctcatttcattgttccaggtgatatttcgtctctgcctttggcctttagtctgtggttgttcctaatcttagttttcattgaaagctgtagtttgaaatgtgggatagatgagagataggaaaggaaaatttaggggtatggaaattttgttccttagtggttagttccagctttattttgtttatttatatgtttgtttttaaagatcgggagcttgctgtgttgtccaggctggtatcgaactcctggtttcagcttcccgcctcagcctcccagagtgctgggattacaggcatgagccaatatgcctggccagctgtgttttagatctttgggaaataaagagaatgcttttgggcttggcaaaatagaaacctctgggtggggagaattgcacagtaaaagaaacaaaagggaagtttatattaaactatgaaaagacacagggaggttcaatttaacatatttgccttatgtatgtgcttcttaagagagtgcacaaaggcacctttgcagaggagagaggctagaaaatgcccgttagaagcaagtctacggtttgcaccctcttactagcaccagcaacggtccctgtctagtgatacccatgacttgtcattgcattgcatgtcatctgcctaagagaagctcctgcctggggcagacacactgtcaattacccctacaatatagactgatactaaagcaaggctgcatattcttgcttattcccaaattggatggctcaaggttccagaatgttgtagacattctgcattatatctttatgagagttaaggaaatggtaaagaagcagaaaaagttggggatttttttttttaagtatttacagtgaggcgcggtggctcatgcctgtaatcccagcactttgggaggccgatgcgggcggatcacaaggtcaggagttcgaggccagcctggccaatatggtgaaaccctgtctgtactaaaaatacaaaaattagccaggcgcggtggcgggtgcctgtagtcccagctacttgggaggctgaggcaggagaatcgcttgaacccggaaggtggaggttgcagtgagccgagattgtgccagtgcactccagcctgggggacagagtgagaaaaagtatttacagtttatgtgagggtcagtacgttggttcattggcttccttcttatctagttctcgggctgagtttgctaatgtcatagcacttctagtagccttccccttttctctgccacttcccagcttccccaggcagaaagcatctggttggccccttgattaccaggcatccataagtgaccatcatttaggccagtgcttctcagaatgccaatcacctgggctccactaaaaggcaggttctgaatagctcggcctgggttgactgagattctgcggttccaacaagctcgcaggtgatgctgatgctgccagcccatggaccccacctggagtagtgaggttccttggcactttaagaacatccctcctttacttcacatttatttctactggaaactagcacagacttatgcaagctaaattacgcatgttttctccgtaggatgctctatgtcctgttcctcttactaacaactctggtctggaccattgttctaggattgtctcaaagcttgccaggagcagattgaggcggtgctcctcaatagcctgcagcagtaccgtcaggaccaacgtgacggatccaagtcggaggatgaactggaccaagccagcacccctacagacgtgcgggatatcgacctgtgaggatgccagttgggccgaaagagagagacgcgtccataatctggtctcttcttctttctggttgtttttgttctttgtgttttagggtgaaacttaaaaaaaaaattctgcccccacctagatcatatttaaagatcttttagaagtgagagaaaaaggtcctacgaaaacggaataataaaaagcatttggtgcctatttgaagtacagcataagggaatcccttgtatatgcgaacagttattgtttgattatgtaaaagtaatagtaaaatgcttacaggaaaacctgcagagtagttagagaatatgtatgcctgcaatatgggaacaaattagaggagacttttttttttcatgttatgagctagcacatacacccccttgtagtataatttcaaggaactgtgtacgccatttatggcatgattagattgcaaagcaatgaactcaagaaggaattgaaataaggagggacatgatggggaaggagtacaaaacaatctctcaacatgattgaaccatttgggatggagaagcacctttgctctcagccacctgttactaagtcaggagtgtagttggatctctacattaatgtcctcttgctgtctacagtagctgctacctaaaaaaagatgttttattttgccagttggacacaggtgattggctcctgggtttcatgttctgtgacatcctgcttcttcttccaaatgcagttcattgcagacaccaccatattgctatctaatggggaaatgtagctatgggccataaccaaaactcacatgaaacggaggcagatggagaccaagggtgggatccagaatggagtcttttctgttattgtatttaaaagggtaatgtggccttggcatttcttcttagaaaaaaactaatttttggtgctgattggcatgtctggttcacagtttagcattgttataaaccattccattcgaaaagcactttgaaaaattgttcccgagcgatagatgggatggtttatgcaagtcatgctgaatactcctcccctcttctcttttgccccctcccttcctgcccccagtctgggttactcttcgcttctggtatctggcgttctttggtacacagttctggtgttcctaccaggactcaagagacaccccttcctgctgacattcccatcacaacattcctcagacaagcctgtaaactaaaatctgttaccattctgatggcacagaaggatcttaattcccatctctatacttctcctttggacatggaaagaaaagttattgctggtgcaaagatagatggctgaacatcagggtgtggcattttgttcccttttccgtttttttttttttattgttgttgttaattttattgcaaagttgtattcagcgtacttgaatttttcttcctctccacttcttagaggcattcagttagcaaagaggttggagcaacaacttttttttttttttttgcacaattgtaattgacaggtaatgaagctatttgttaaaatatttgcctttttaagtaaaaaagaaaaatcagaacagggctatttgaagaattattttatacacagattctgccttgtttcatagtatgagggttgaagacggaaaacaatctaagggtctctcatttttttaattttgttttgttcagtttggtttttttttttttttgcgctgctaagaagctaaagtcatccatccttattcacgttgacagtacctagctgtaatgtttcacagagtgtgctgctattttataaacatttttataatatattattttactgcttaaattccaagtcctgaagtagatggttgagatatgagttcttcgtactggaaaagcccttccgtagtttgttttcttctggtagcatattcatggttgtttttttttttcttttttggttttttggttttttttttttcctctgatcacattcttcaaagacggagtattctttacctcaggtttactggacaaaatcaataactacaaaaggcaatgattcacgcttttgttttcataatacctcacaaccgtacagtttctgcttgggagcccattcgcatgaggaatacagaagcagtgtgagcagggctgactccctctcaggtggaaggcagggcggtctcactcccagggacctttttggtcatggaggccatcgggctcccagttagaccctggtatcctcatcatgatggaaaaaatacattgaaccaagggatcctccctccccttcaaggcagacgttcagtacaaacatttatgcggtaggctcagatgtcgtaatttgcacttaggtaccaggtgtcaggaaacagactaaaaagaattccaccaggctgtttggagatcctcatcttggagctttttcaaaagcggggcttcatctgcaaagggccctttcatcttgaagtttttcccctccgtctttcccctcccctggcatggacaccttgtgtttaggatcatctctgcaggtttcctaggtctgaatctgcgagtagatgaacctgcagcaagcagcgtttatggtgcttccttctccctcctctgtctcaaactgcgcaggcaagcactatgcaagcccaggccctctgctaagcggtactaaacggtcgggttttcaatcacactgaattggcaggataagaaaaataggtcagataagtatgggatgatagttgaagggaggtgaagaggctgcttctctacagaggtgaaattccagatgagtcagtctcttgggaagtgtgtttagaagggttcaggactttgtgagttagcatgaccctaaaattctaggggatttctggtgggacaatgggtggtgaattctgaagttttggagagggaagtggagcagccagcaagtaagctagccagagttttctcaagagccagctttgctcagcacactctcctgggccccaaggagtcccacggaatggggaaagcgggaaccctggagttcttgggaatcttggagcctaaagagaaaccgaggtgcaaattcatttcatggtgactgacccttgagcttaaacagaagcagcaaatgaaagaaccggacaaataaggaagggcacaagcctacccgactctatttacagtctgtaactttccactcttcctgtagtcccgaggcccctgggtccttctagcttttctctttcccatccttggggccttgtgtgatgatgggtgtggggctgccgatgggaaagtcgggggttgttaggcttttctgcctgctcctgcttaaacacaagaaggaatcctggattttgccctctccttagctcttagtctctttggtaggagttttgttccagaggagctctcccccttggatttgaacttgctctttttgttgttgttgttctttctcttctttttcttacctcccactaaaggggttccaaattatcctggtctttttctaccttgttgtgtttctatctcgtctttacttccatctgtttgtttttttctccatcagtgggggccgagttgttcccccagcctgccaaattttgatccttcccctcttttggccaaatcctagggggaagaaatcctagtatgccaaaaatatatgctaagcataattaaactccatgcgggtccataacagccaagaagcctgcaggagaaagccaagggcagttccctccgcagaacaccccatgcgtgctgagaggcgagctccttgaagaaggggctgttcttccaggaggccttattttgaactgcctcaggaccccactggagagcacagcatgccttactactgggtcatccttggtctatgtgctctgtactggaggctctgttctgcctcttatcagccaggtcaggggcacacatggcttaagtgacaaagccagaggagaagacaaccctgacagcatcacgctgcatcccattgctagcaggattggcaactcttcagacggagctgcgcttccctgcagtctagcacctctagggcctctccagactgtgccctgggagctctgggactgaaaggttaagaacataaggcaggatcagatgactctctccaagagggcaggggaattttctctccatgggccacaggggacagggctgggagaagaaatagacttgcaccttatgtcatgtaaataattgattttctagttcaagaagataatattggtagtgtgggaattggaggtaggaaggggaggaagtctgagtaagccagttggcttctaagccaaaaggattcctctttgtttatctctgagacagtccaaccttgagaatagctttaaaagggaaattaatgctgagatgataaagtccccttaagccaacaaaccctctgtagctatagaatgagtgcaggtttctattggtgtggactcagagcaatttacaagagctgttcatgcagccatccatttgtgcaaaatagggtaagaagattcaagaggatatttattacttcctcataccacatggcttttgatgattctggattctaaacaacccagaatggtcatttcaggcacaacgatactacattcgtgtgtgtctgcttttaaacttggctgggctatcagaccctattctcggctcaggttttgagaagccatcagcaaatgtgtacgtgcatgctgtagctgcagcctgcatcccttcgcctgcagcctactttggggaaataaagtgccttactgactgtagccattacagtatccaatgtcttttgacaggtgcctgtccttgaaaaacaaagtttctatttttatttttaattggtttagttcttaactgctggccaactcttacatccccagcaaatcatcgggccattggattttttccattatgttcatcacccttatatcatgtacctcagatctctctctctctcctctctctcagttatatagtttcttgtcttggacttttttttttcttttctttttctttttttttttgctttaaaacaagtgtgatgccatatcaagtccatgttattctctcacagtgtactctataagaggtgtgggtgtctgtttggtcaggatgttagaaagtgctgataagtagcatgatcagtgtatgcgaaaaggtttttaggaagtatggcaaaaatgttgtattggctatgatggtgacatgatatagtcagctgccttttaagaggtcttatctgttcagtgttaagtgatttaaaaaaataataacctgttttctgactagtttaaagatggatttgaaaatggttttgaatgcaattaggttatgctatttggacaataaactcaccttgacctaaattatctggccgtttttgacttatttataaaccagcagtcctcagaatggaatacacttgtctcatgtcagaactgtttcatgccgctgcaacatttggcagtggcataaaagacacattctaacctggaatggaatctacatgtgcctctgtgttatggcggtacaagtcattgttgacattgctaggggacgaggggtgcccatgcagccagcttataagctagaagcctcagtccaccttcagaaggtgggtacatcacagacactatgactggtcctcagaggatcgtccctgattgttgccagctactcattctgggctgtgaggaagcatctcctggcatgagaggtaccagaagcctgcggtgccatctccagagtctagggagtctctgggaaccctgcccctgcagctttcctggctcctgcctgctgttcttcgtggctcccacctgatttctgatccttcctgcacccctcttctgagacacaggccacaactacctttgctggagtctggagaagcagagcctgggaatgggatgtgacagtctccgtactgctgaaatgaattgccaggccctaggcccagctgctcttggaccttagctcagaccagcttctttcccgagagtgatgggtgtgcagaagacaagggcctaatgaacacttttttgtgtgttttgtttagaaacagggtcttgctgtgtcccccaggttggagtgcagtggcacaatcccagcttgctgcagcctcacactcctgggctcaagcaatcctcctgcctcagcctcccaagtagctgggattacaggcgcccaccaccacgcccagttaatttttttattttttgtacagattttttgtatagctttgttgcacaagctataacagacattttgatgttactgtaaaattaattttttccaaagttccttgtctggaagtcatcgaaggctgttttccattttaattctgacctgagttgtaaacaagatttaaaactggccgttggggaagtccagattaagatattccaggctgatctcaagtaacttcacttaataggacttttaagcttacaaggaccctagaaattcccctttgttcccattccccttgacatccgccattcttagcgacaaatgggggtaacttttttcttgggtttctgcctagtgaagtctgctggcctcctgggagtttcaagggcctctggttgccattcttaaccatccttggaattctctttggcatgacataatgtccaactgggttcctctccctccctttccctatctttttgctctgtaggatcaatgctatatctgtttatagcatgacaactccactccctctctcaaatgccacccagcaacactgctgggcttcccccattctgaacaatggatgttttaagggcgggaagagcagatgaagcacacagccgagcagtgagaaatctgactgtcccatctac

SEQ ID NO: 23841 - DNA, 3663 bp, Homo Sapiens
gctgcgcggcgcggcgctgcggagaccgttggttcatttgcatgtccccgcctcgcgcggcggcggcggcgggtgaggagcctgaggcggcggcgggggtggctccgcgcgcggtggtctcgggggcaaaataacatggcagccagacgaattacacaggagacttttgatgctgtattacaagaaaaagccaaacgatatcacatggatgccagtggtgaggctgtaagcgaaactcttcagtttaaagctcaagatctcttaagggcagtcccaagatccagagcagagatgtatgatgacgtccacagcgatggcagatactccctcagtggatctgtagctcactctagagatgccggaagagaaggcctgagaagtgacgtatttccagggccttccttcagatcaagcaacccttccatcagtgatgacagctactttcgcaaagaatgtggccgggatctggaattttctcactctgattctcgggaccaggtcattggccaccggaaattggggcatttccgttctcaggactggaaatttgcgctccgtggttcttgggaacaagactttggccatccagtttctcaagagtcctcttggtcacaggagtatagttttggtccctctgcagttttgggggactttggatcttccaggctgattgagaaagagtgtttggagaaggagagtcgggattatgacgtggaccatcctggggaggctgactctgtgcttaggggcagcagtcaagtccaggccagaggtcgagctctaaacatcgttgaccaggaaggttccctcctaggaaagggggagactcagggcctgctcacagctaaggggggtgttgggaaacttgtcacattgagaaatgtgagcacaaaaaaaatacccaccgtgaatcgtattactcccaaaactcagggcactaaccaaatccagaaaaacactccaagtcctgatgtgaccctggggacaaacccagggacagaagatatccagttccccattcagaagatccctctggggctggatctgaagaatcttcggctccccagaagaaagatgagctttgacatcatagataagtctgatgttttttcaagatttgggatagaaataatcaaatgggcaggattccacaccataaaagatgatattaaattttcccaacttttccagactctctttgaacttgaaacagaaacctgtgctaaaatgcttgcctcattcaaatgttccttaaaaccagagcacagagatttttgcttttttactatcaaatttttaaagcactctgctttgaaaacacccagagttgataatgagtttttaaacatgcttttagacaaaggtgctgtgaagaccaaaaattgcttttttgaaatcataaagccttttgacaagtacataatgagacttcaagaccggcttctgaagagtgtcacacctttgcttatggcctgcaatgcctacgagctaagtgtcaagatgaagaccctcagtaaccccctggacttggctcttgccctagaaaccaccaactctctctgccggaagtctttggcccttttgggacagacattttccttggcctcttctttccggcaggagaaaatcttagaagctgtcggcctgcaagatatagctccctcacctgctgcgtttccaaacttcgaagactccactttgtttgggcgagagtacatagaccacctgaaggcctggctagtcagcagcggatgtcccctccaggttaagaaagccgaaccagagccgatgcgagaggaggagaaaatgattcctcctacgaaacctgaaattcaggccaaggctccaagtagtctgagtgatgctgtcccccagcgagcagatcacagggtagtgggcaccatcgaccagcttgtgaaacgtgtcatcgaaggcagcctgtctcccaaagagagaactcttctcaaagaggaccctgcttactggtttttgtctgatgaaaatagtctggagtataaatattacaagctgaagttggcagaaatgcagcggatgagcgagaacttgcgaggagccgaccagaagccgacctcagcagactgtgcagtgagggccatgctgtactcccgggctgtccgcaacctcaagaagaaactccttccgtggcagcggcgggggctcctccgtgctcaagggctccggggctggaaggcgaggagagcgaccaccgggacccagaccctcctatcctcaggcaccaggctgaaacaccacggccggcaggctccaggcctctcacaggcaaaaccatccctgccagacagaaatgatgctgccaaggactgcccgccagacccagttggaccttctcctcaggaccccagcttagaagcctcaggcccatcccccaagccagcaggagtggacatctctgaagcacctcagacctcttctccctgcccatctgctgacattgacatgaagacaatggagactgcagagaaactggctagatttgttgctcaggtgggaccagagatcgaacaattcagcatagaaaacagcaccgataaccctgacctgtggtttctacatgaccaaaatagttctgctttcaaattctatcgaaagaaagtgtttgaactatgtccatcaatttgtttcacgtcatctccgcacaaccttcacactggtggtggtgacaccacgggttctcaggagagccccgtggacctcatggaaggggaagcagagtttgaagacgagccccctccgcgggaggctgagctggagagcccagaggtgatgcctgaggaggaggacgaggacgatgaggatgggggagaggaggcccccgctcctggaggggcgggcaagtctgagggcagcacccctgccgacggccttcccggcgaggctgccgaggacgacctggctggagcacctgccttgtcacaggcctcctcaggtacctgcttccctcggaagaggatcagcagcaagtcattgaaggttggcatgattccagctcccaagagagtgtgtctcatccaggagccaaaagtccatgaaccagttcgaattgcctatgacaggcctcggggtcgtcccatgtccaaaaagaagaaacccaaggacttggacttcgcccagcagaagctgaccgataagaacctgggcttccagatgctgcagaagatgggctggaaggagggccatggcctgggctccctcggaaagggcatcagggagccggtcagcgtgggaaccccctcggaaggggaagggttgggtgctgacgggcaggagcacaaagaagacacattcgatgtgttccgacagaggatgatgcagatgtacagacacaagcgggccaacaaatagttccagggtcacccccgagaggacaacaggcatctggaagtgctctctcgccactctgggtgctttactgtctctggcttgtttccatcactggaaatcacttagagaattgtagtgtttttggtccttgataaagcctagaagacatttgtgatgttacaaaatggaagttttcttttgtttctgttttttaagatctaagaagttgtgaatgttgttaatcatttagccgttgcaataaatgtagaggaaatgcaaaaaaaaaaaaaaaaaaaaaaa

SEQ ID NO: 23842 - DNA, 573 bp, Homo Sapiens
atggcttcggggcaaggcccaggtcctcccaggcaggagtgtggagagcctgccctgccctctgcttctgaggagcaggtagcccaggacacagaggaggttttccgcagctacgttttttaccgccatcagcaacctagcagcaccatggggcaggtgggacggcagctcgccatcatcggggacgacatcaaccgacgctatgactcagagttccagaccatgttgcagcacctgcagcccacggcagagaatgcctatgagtacttcaccaagattgccaccagcctgtttgagagtggcatcaattggggccgtgtggtggctcttctgggcttcggctaccgtctggccctacacgtctaccagcatggcctgactggcttcctaggccaggtgacccgcttcgtggtcgacttcatgctgcatcactgcattgcccggtggattgcacagaggggtggctgggtggcagccctgaacttgggcaatggtcccatcctgaacgtgctggtggttctgggtgtggttctgttgggccagtttgtggtacgaagattcttcaaatcatga

SEQ ID NO: 23843 - DNA, 2580 bp, Homo Sapiens
caaaaaaaaaaaggacctaggcgcggtagctggggctggcttttgaggggcgcgggcagccttctgactgggtcggaggcctgcgggcccgaagcctctgtccctcctgttcttgtccggcgctgcttagcccctccgcgtagtcatcatggatctgattttaaaccgaatggattatctgcaggtgggagtaacatctcagaagactatgaagctaattcctgcctcaagacacagagctacacaaaaggtggttattggagatcatgatggggtagttatgtgctttggcatgaagaaaggagaagcagcagcagtgttcaagactttacccgggccgaagattgcaaggctggaactgggaggggttatcaacacacctcaggagaaaatttttattgctgcagcatctgagattagaggcttcacaaaaagaggaaaacagttcctctcctttgaaacaaacctcactgaaagcattaaagctatgcacatatctggctcagacctctttctcagtgcaagttacatctataaccattattgtgactgcaaagaccaacattattacctttctggggataaaatcaatgatgtgatctgccttccagtggaaagattatctcgtatcacacctgtattggcctgccaggacagagtgctcagagttttacagggatctgatgtgatgtatgcagttgaagttcctggaccccctactgtcttagcactacacaatggaaatggcggtgactctggagaagaccttttgtttgggacatcagacggaaaacttgcgcttatacagattactacatccaaaccagtacgcaagtgggaaattcaaaatgagaaaaagagaggaggtattttgtgtattgacagctttgacattgtgggtgatggggttaaagatttacttgttgggagagatgacggaatggtggaagtgtatagttttgataatgcaaatgaacctgttctacgatttgatcagatgttgtctgaaagcgtcacatctatccagggtggttgtgtaggaaaagacagctatgatgaaatcgtggtgtccacatattcaggctgggttacaggtctgacaacagagcccattcataaggaaagtggaccaggagaagaactaaaaattaatcaggagatgcagaataaaatttcttccttacggaatgagttggaacatttgcagtataaggtattgcaggaaagagagaattatcaacagtcttctcaatcaagcaaagcaaaatcagcagtaccttcctttggtataaatgataaatttacactaaataaagatgatgccagttacagccttatcttagaggtacagactgcaatagataatgtcttaatacagagtgatgttccaatagatttacttgatgtggataaaaattctgctgttgttagctttagcagctgtgattctgagtcaaacgacaacttccttcttgccacttatcggtgccaggcagatactacaaggctggaactcaagattcgctcaattgaaggccagtatggcacactactagcatatgtgactccaagaattcaacccaaaacctgtcaggtccgccagtaccacatcaaacctctttcactccatcaaagaactcactttattgatcatgacagacccatgaatacactgaccctaacaggccagttcagttttgctgaagttcactcctgggtggttttttgtctgcctgaagttccagaaaaacctccagcaggagaatgtgtgacattttactttcagaacacctttctagatacacaacttgaaagtacctacagaaaaggagagggagtttttaaatctgacaacatttctactatctccatcctaaaagatgtgctttctaaagaagctacaaaaaggaaaattaacctcaacatatcatacgagataaatgaagtatcagtcaaacacactttaaagctaatccacccaaagctggagtaccagttgcttttggctaagaaagtgcagttaattgatgctttaaaagaattacagattcatgagggaaatacgaactttctgataccagaatatcactgtattctagaagaggcagatcacctacaggaagaatacaaaaagcaacctgcacatcttgaaagactctatggttagtggaccattctagaataccttgccatatttcttttcaactggctatttcccaaggatcatgtaagagaagctgggcagaaagataaaaagattacatcagtcatgattcatgaaccagtcatgaatcagttgacaacaaatttattgcacagaatatttctgtattttgtcaagctacttttaatatttaattcttttacttgataaaatgcaagtatattaagaaataagtatactgtgatgaattaatctatatatatgaacaaacctggtataaaatgaatgtaatctatgaacctttagagcttagactgtatttcacacaaataattgtcatgttttgttgctattgtgaattataaaaatgcagcatttaaaatttttaaggcaaaatttaataaaggatatacagt

SEQ ID NO: 23844 - DNA, 2888 bp, Homo Sapiens
caaaaaaaaaaaggacctaggcgcggtagctggggctggcttttgaggggcgcgggcagccttctgactgggtcggaggcctgcgggcccgaagcctctgtccctcctgttcttgtccggcgctgcttagcccctccgcgtagtcatcatggatctgattttaaaccgaatggattatctgcaggtgggagtaacatctcagaagactatgaagctaattcctgcctcaagacacagagctacacaaaaggtggttattggagatcatgatggggtagttatgtgctttggcatgaagaaaggagaagcagcagcagtgttcaagactttacccgggccgaagattgcaaggctggaactgggaggggttatcaacacacctcaggagaaaatttttattgctgcagcatctgagattagaggcttcacaaaaagaggaaaacagttcctctcctttgaaacaaacctcactgaaagcattaaagctatgcacatatctggctcagacctctttctcagtgcaagttacatctataaccattattgtgactgcaaagaccaacattattacctttctggggataaaatcaatgatgtgatctgccttccagtggaaagattatctcgtatcacacctgtattggcctgccaggacagagtgctcagagttttacagggatctgatgtgatgtatgcagttgaagttcctggaccccctactgtcttagcactacacaatggaaatggcggtgactctggagaagaccttttgtttgggacatcagacggaaaacttgcgcttatacagattactacatccaaaccagtacgcaagtgggaaattcaaaatgagaaaaagagaggaggtattttgtgtattgacagctttgacattgtgggtgatggggttaaagatttacttgttgggagagatgacggaatggtggaagtgtatagttttgataatgcaaatgaacctgttctacgatttgatcagatgttgtctgaaagcgtcacatctatccagggtggttgtgtaggaaaagacagctatgatgaaatcgtggtgtccacatattcaggctgggttacaggtctgacaacagagcccattcataaggaaagtggaccaggagaagaactaaaaattaatcaggagatgcagaataaaatttcttccttacggaatgagttggaacatttgcagtataaggtattgcaggaaagagagaattatcaacagtcttctcaatcaagcaaagcaaaatcagcagtaccttcctttggtataaatgataaatttacactaaataaagatgatgccagttacagccttatcttagaggtacagactgcaatagataatgtcttaatacagagtgatgttccaatagatttacttgatgtggataaaaattctgctgttgttagctttagcagctgtgattctgagtcaaacgacaacttccttcttgccacttatcggtgccaggcagatactacaaggctggaactcaagattcgctcaattgaaggccagtatggcacactactagcatatgtgactccaagaattcaacccaaaacctgtcaggtccgccagtaccacatcaaacctctttcactccatcaaagaactcactttattgatcatgacagacccatgaatacactgaccctaacaggccagttcagttttgctgaagttcactcctgggtggttttttgtctgcctgaagttccagaaaaacctccagcaggagaatgtgtgacattttactttcagaacacctttctagatacacaacttgaaagtacctacagaaaaggagagggagtttttaaatctgacaacatttctactatctccatcctaaaagatgtgctttctaaagaagctacaaaaaggaaaattaacctcaacatatcatacgagataaatgaagtatcagtcaaacacactttaaagctaatccacccaaagctggagtaccagttgcttttggctaagaaagtgcagttaattgatgctttaaaagaattacagattcatgagggaaatacgaactttctgataccagaatatcactgtattctagaagaggcagatcacctacaggaagaatacaaaaagcaacctgcacatcttgaaagactctatggcatgatcactgatcttttcatagataaatttaagtttaaaggcaccaatgtaaaaactaaagtaccccttctattggaaattctggacagttatgaccaaaatgcattgatttcattcttcgatgcagcatgacatacaaataaggtaaagtcccaaagaagtggtctgtttaaatgaaaaatgttaaaagagaattagaagttaactgtgtatgtactttaatttcaaatgcttttttatatctaaaaatatttgagatataatggctttttaaagtaatgcttctatttcttttgacaaattgaactttctaaaactaaaagagtctttttatttttaaaacacaagtagaatgatttaaataggattttaatgaatttttggcaagtggctgttttaatttttaaattgagaagtaatatgtggaaaattaaaatatattcaaatgtattacaaggtacataaacacataaacatgtagaccgctttataggcttcaaaatgtatttttatatattaccttatttgatcttcacaactgttgtaaaatttgtcaaatcatataagaaaactgattctcagtgaaattttgtgattaagaggacatgctaatattttgtaaagctgggaccagaacccaagtactggtacttgctttgtgtcctggttactatgtatgttgccagctagtggaaataacctaccaattgttttttctaggaga

SEQ ID NO: 23845 - DNA, 10223 bp, Homo Sapiens
  misc_feature (2016)..(2123): n is a, c, g, or t
gatgctgaaggagatgagtgggcttcgcagtgaatgtggcagttcaaaaaataccttcattgtttggacctgcatatttagctgttttggaacacagttgattccttgagtttcaaatatagactgctacagtcacatcacaatattcagcggtgaaatcttgtttgttactgtcattcccattccttttcgtttagaatcagaataaagttgtatttcaaatatctaaaaacaaaaaatccttcctttttcaactcaatatttgtgtaaggctagattttttaacatatacacttcaatcaaagtaagaaaatggctgggatgcagctggaggccataatcctaagtgaattaatgcaggaacagaaaaccaaatactgcatcttctcacttataattgggagctaaacactgagcacacatagacataaacatgtgtataacagacactgtagacgactagagtggagagggtggggacgtgggttgaaaaactacctgtgggtactatgttcactacctgagtgacaggatccataccccaaacctcagcatcagacaacatacccatgtaacaaaccggcacatgtaacccctgtatctatttttttctggttttttttttttttttttgagacaatttcactcttgttgctcaggctggagcgcaatggcgtgatctcggctcatcgcaacctctgcctcccgggttcaagcgattctcctgcctcagcctcctgagtaggtgggattacaggtatgcgccaccacctccagctaattttgtatttttagtagagatggggtttctccatattgataaggccggtctcgaactcccgactgggattacaggcgtgagccaccgcgcctggccaccccctgtatctaaaataaaagttaaaaatttaaaaataagtacataagagaatgtatgctatgagccaagaatgatgcttgcaaaattttgcaagaacaacacttatgaaaatgaaaaataatcactcttcttgttaccaaaaatcttggtagctgcataaggtgggatctttcctcactgggagtcgcagagccaatacatgaaaccaaaagtgagccttaagcagagcaagctttatttcctgcacaggacttgtaaagaggagagcagctctgccaagtcaacttctccactagtgaggcggctagtgaggggtgagggggctaaaatgtaggattgctctaatgaaggggttgggcattaaaagtgagggggaggaatattcatatgttttatgggaacaggcagtgaacttctccaaactggtaataccgctttccttttggtccttttaggacttcttctactcatcgtcatggagatcgtcaactgtcatggcatggatgggagcgcaatttagcctggaaacgggattacaatgaagcatgaggtctttttgaagtcatttggccggctctcttggttgtaacgagtctcagctggtttgactacaaaggcaacttcttgaagcagatcctgtttttttgtttttgtttttgttttttgtttcttgttttttccccctagacatctcactctgtcgcccaggctggagtgcagtggtgtgatctcggctcactgcaaccaccacctctcgggttcaagcaattctcctatctcagcctccagagttgctggaattacaggcgcgcaccaccacacccggctaatttttgtattgttagtagagacagggtttcatcatgttggccaggttagtcttgaactcctgacctcgtgatctgcctgcctcggcctaccaaaatgctgcgattacaggcgtgagccaccgttcccggcctatacgttgtttattttggaaaaattaaaaattaagttttttttcattaaagatatgttatttccgatcaagagatcaagaccatcctggccaacatggtgaaaccccgtctctactaaaaacacaaaaattagctgggtgtggtggcacacgcctgtagttccagttactgggnnnnnnnnnnnnnnnnnnnnnnnnnnnnnnnnnnnnnnnnnnnnnnnnnnnnnnnnnnnnnnnnnnnnnnnnnnnnnnnnnnnnnnnnnnnnnnnnnnnnnnnnnnnnaaaaaaaaaaagttgtttctattaacatgtaatgggttattaatattctcttaaatgaattaatatttttaatattttgttttaatatcttttaatttatatatgataaaaattgatacaatccacagaaacaaaatttatttgggtcctcactaatttcttttttcttgttgcccaggctggagggcaatggcacgatcttggctcaccgcaacctcctcctcctgggttcaagtgattctcctgcctcagcctcccaagtagccaggattacagccatgcgccaccacgccggctaattttttggacttttagtagagacagggtttctccatattggtcgggctggtctcgaactcccaacctcaggtgatcagcccgccttggcctcccaaagtgctgagattacaggcgtgagccaccgcgcccagccaggactaatttctaagagtgtgcagagataccgaaacctaaaagtttaagaactgctgattgctgggaaactctgcagtttcccgttcctctcgtaacctggtcatgtgtccttcttcctggatactcatgacgcagactcagttctcattcccaatgggtgtcgggtttctagagaagccaatcagcgtcgccacgactcccgactataaagtccccatccggactcaagaagttctcaggactcagaggctgggatcatggtagatggaaccctccttttactcctctcggaggccctggcccttacccagacctgggcgggtgagtgcggggtcgggatggaaacggcctctaccgggagtagagaggggccggcccggcgggggcgaaggactcggggagccgcgccgggaggagggtcgggccgatctcagcccctcctcgcccccaggctcccactccttgaagtatttccacacttccgtgtcccggcccggccgcggggagccccgcttcatctctgtgggctacgtggacgacacccagttcgtgcgcttcgacaacgacgccgcgagtccgaggatggtgccgcgggcgccgtggatggagcaggaggggtcagagtattgggaccgggagacacggagcgccagggacaccgcacagattttccgagtgaacctgcggacgctgcgcggctactacaatcagagcgaggccggtgagtgaccccggccaggggagcaggtcacgacccctccccatcccccacggacggcgcgggtcccctcgaatcttcgggtcccagattcaccccaaggctgcggaacccgcccagaccctagaccggggagagtctcaggcgcctttacccggttctttttcagtttaggccaaaatgcccacagggtggtggcgacgggggcggggcttggtgggcgggactgactaaggggcggggccagggtctcacaccctgcagtggatgcatggctgcgagctggggcccgacgggcgcttcctccgcgggtatgaacagttcgcctacgacggcaaggattatctcaccctgaatgaggacctgcgctcctggaccgcggtggacacggcggctcagatctccgagcaaaagtcaaatgatgcctctgaggcggagcaccagagagcctacctggaagacacatgcgtggagtggctccacaaatacctggagaaggggaaggagacgctgcttcacctgggtaagagggtccacagggctactctcccatctccttcttgggctaggactgtgcccacagctgacagacctcaaacagtagaagaaacagggatggaggccagaataccactcctcccttggatcaggagagggagctgtcacctgaggtacaggagatcctataccacagagtgactctcttaaagggccagacctctctcaggggcaattaaggaatctagtctcgctggagattccatccttcagatgaactgatgagcagttctctttgactcccagtattaggaatcacgggggagtttctctcgtgcctgattctcagccccacaccaagagtttttggaggtctgactccagcttttctcagtcactcagcatccacacaggccaggaccagaaatcccttttcaccttctaccctgggctagctcatcccgattctagaactttccaaggaataagaggctatcccagatccctaagtccaggctggtgtcaaggttttgtcctcttctcctactataattgtcctcttccttctcaggatggtcacatgggtgctgctggagtgtcccatgagagatacaaagtgcctgaattttctgactcttcccctcagagcccccaaagacacacgtgactcaccaccccatctctgaccatgaggccaccctgaggtgctgggccctgggcttctaccctgcggagatcacactgacctggcagcaggatggggagggccatacccaggacacggagctcgtggagaccaggcctgcaggggatggaaccttccagaagtgggcagctgtggtggtgccttctggagaggagcagagatacacgtgccatgtgcagcatgaggggctacccgagcccgtcaccctgagatggagtaaggagggggatgggaggtcatgtctcttctcagggaaagcgggagcccttctggagcccttccgcagggtcagggctgaggcctgggggtcagggccccttacgttcccctcttttcccagagccggcttcccagcccaccatccccatcgtgggcatcattgctggcctggttctccttggatctgtggtctctggagctgtggttgctgctgtgatatggaggaagaagagctcaggtggggaagggagaagggtggggtctgagttttcttgtcccactgggtgtttcaagccctaggtaaaagtgtgtcctgcctcgttactgggaagcaccatccacacacacgagcctacccagcctggggccctgtgtgccagcacctactctttttttttgagacggagtcttggctctgtcacccaggctggagtgcaatggcgtggtttcagctcactgcaacctccgcctcccaggttcaagcaattctcctgcctcagcctccctagtagctgggactacacatgcgtgccaccacacctggctaatttttttttttgtatttttagtggagatggggtttcactatgttggccaggctggtctcgaactcctgactttgtgatctgcctgcctcggcctcccaaagtgctgggattacagtcgtgagccaccgcacccagccgcacctactcttttgtaaagcacctgtgacaatgaaggacagatttatcaccttgacaattgtggtgatggggacctgatcccagcagtcacaggtcacaggggaaggtccctgctgaagacagacctcagaagggcagttgatccaggacccacacctgctttcttcacgtttcctgatcctgccctgggtctgcagtcacagttcaggaaacttctctgggatccaaaactaggaggttcctctaggaccttatggccctgcctcctccctggcccctcacaggacattttcttccaacaggtggaaaaggagggagctactctaaggctgagtgtaagtgcggggcgggagcgtggaggagctcgcccaccctataattcctcctgcaccacatctcctgtgggctctgaccaggtcttgtttttgttctaccccagggagcgacagtgcccaggggtctgagtctcacagcttgtaaaggtgagattctgggggtctgaagtgggtggagggtggggcagaggggacaggactgggttgtggggattttttgattcagaatttttgagtgtgtggtgggctgttcagagtgtcatcacttaccgtgactgacctgaatttgttcatgactattttcttctgtagcctgagacagctgccttgtgtgcgactgagatgcacagctgccttgtgtgcgactgagatgcaggatttcctcacgcctcccctatgtgtcttaggggactctggcttctctttttgcaagggcctctgaatctgtctgtgtccctgttagcacaatgtgaggaggtagagaaacagtccacctctgtgtctaccatgacccccttcctcacactgacctgtgttccttccctgttctcttttctattaaaaataagaacctgggcagagtgcggcagctcatgcctgtaatcccagcacttagggaggccgaggagggcagatcacgaggtcaggagatcgaaaccatcctggctaacacggtgaaaccccgtctctactaaaaaatacaaaaaattagctgggcgcagaggcacgggcctgtagtcccagctactcaggaggcggaggcaggagaatggcgtcaacccgggaggcggaggttgcagtgagccaggattgtgcgactgcactccagcctgggtgacagggtgaaacgccatctcaaaaaataaaaattagaaaataaaaaaagaacctggatctcaatttaatttttcatattcttgcaatgaaatggacttgaggaagctaagatcatagctagaaatacagataattccacagcacatctctagcaaatttagcctattcctattctctagcctattccttaccacctgtaatcttgaccatataccttggagttgaatattgttttcatactgctgtggtttgaatgttccctccaacactcatgttgagacttaatccctaatgtggcaatactgaaaggtggggcctttgagatgtgattggatcgtaaggctgtgccttcattcatgggttaatggattaatgggttatcacaggaatgggactggtggctttataagaagaggaaaagagaactgagctagcatgcccagcccacagagagcctccactagagtgatgctaagtggaaatgtgaggtgcagctgccacagagggcccccaccagggaaatgtctagtgtctagtggatccaggccacaggagagagtgccttgtggagcgctgggagcaggacctgaccaccaccaggaccccagaactgtggagtcagtggcagcatgcagcgcccccttgggaaagctttaggcaccagcctgcaacccattcgagcagccacgtaggctgcacccagcaaagccacaggcacggggctacctgaggccttgggggcccaatccctgctccagtgtgtccgtgaggcagcacacgaagtcaaaagagattattctcttcccacagataccttttctctcccatgaccctttaacagcatctgcttcattcccctcaccttcccaggctgatctgaggtaaactttgaagtaaaataaaagctgtgtttgagcatcatttgtatttcatttgtgcgttttgtgccttgttgttttaattttttaaccacattcaagctatcctttggcttccaatgccatggtccacccagaactgcattcactggcccgtgttctagttctggtcatgccgactttcctgttttcctggtgaatccctgtaatcacctgagtctcattctgtcaggtgatatccagtaagaaggcaacatgtgcggtgagaaagcccagggagtcctgggtgtgaatttttactttgccatttcttcctgtgtgacacgcggtggggcttcacctgtctgagctccagttcctcatcttgtacgtggcactgttttcttgggagagtcattataaagctaatataaagtacctgtactgtggtttgaatgtgtcctccaaaaagcatgtgttggaaactgaatccacaatgcaaccatatcgggaagtgaatcctaatggctggctggccatggaggttccaactttatgaatggattaatactgattataaaagggcttgaggttgaggcaagttcaacctcttgccctcactcacccacttgcctttaccaagagatgatacagcaaaaagactcaccaaatgccgggatcttgatattagacttcttatcctccagaaccatgaaataggctgctttgctttataaattactcagtctgcgtattatattacagcaacacaagatgggcaacctgatacttaggtttcagttagtggtagatatttttatttcaagcattcctactggagtattagtttcttcataagcccagaatctttgcattttagcaacaacaaataagtcttttttttttttttttttgagactgagtttcactcttgtcacccaggctagagtgcaatggcatgaccttggctcactgcaaacttggcctcccaggtttaagtgattctcctgcttcagcctcccaagtagctgggattacaggcgcctgctaccacgcccagctaatttttgtatttttagtagagacagagtttcatcatgttggccagctggtctcgaactcctgatctcaggtgatccacccaccttggcctcccaaagtgctgggattataggcatgagccaccacgttccaccagaagtcttaattaatgcaaagaaaatcaatctatagatttgatggaaatttggactcctatatcctactttttatcccactcctatatactactcataaggagtatagaactattttccttctctacttggtctgcccatttctacttcctgccatatcggcaggctatgtttgcctcacctcaaagatctgccttcctcagttttagatcttaaatctttttaagccagactccaagggatctttaacaaatatttatcgaacccttcctgtgttcaaagaatgttgtgaggtccagggtgggactagggggcgagaaaggttcctgcgctgaaggaatctaagatttagtaacaatgaataaacagacttgaagataactattgtggttagcgctgaaagaaacgtacaaaatgccaaaagtcaaggaggaaactatgttttctaggacagtggttcccaacatttttggcatcagggaccggtttcatggaagacaatttttcggaggggtggttttgggatgattcaagcgcgttacctgtattgtggactttatttctattattacattataatacataatgaaataattatacaactcaccataatgtagagtcagtaggagccctgagcttgttttcctgcaactagacagtcccatctgagggtgatgggagacactgacaggtcatcaggcattagattctcataggagcgagcaacctagatccctcgcatgcacagttcacaataagattcacactcctatgagaatctaaccccactgctgatctgacaggaggcagagctcaggcgctaatgcttggtcacctgccactcacctcctgctgtgcagcccagttcctaacaggccatggaccggtaccagtccatggcccagggcttgggaacccctgttttaggagacttaggtttttctaaaggaaaaaatgtttgagttatgctttgaaaaatgtaagacaccactgtagatgttttaatcagggaattgggttattaccaaaaaaaaatgttggaagatgaaagagcaggttctttatgcctcctggcttgaccctggaacaatttagaaccagcccagtgaggcatgtactccccatgaggccacacaagagctgtgctttcttagatctggatcccactaccacataggggttcctgggcacctggacaccagggaagaggggtcaaccaggtcccactcctctggcatgacactcagtgattcagtcaagatactgttgggaaaacagcccatgccatgggacttccccatggtcggaaaagtcttgaatagctaaaagcaaaacaggatagttaggctgcattatgtagataatggtgactcatgggcaggccctgcctccttgggccattgtatgtgaacagatctttgtgtgattatgggataattctgggttcttttctccatgtgcctgttcttaattggcccaggagagggaacccaagggaaggaggaacccgagtgatcttgtcctcttttgacatctcatttctagccacaaggttatgaatcatagatctccagaagtcagtggtcctagaggaaaaaagcatctgccatagc

SEQ ID NO: 23846 - DNA, 1209 bp, Homo Sapiens
ttaacagcaaccactatattagtgactttaagctactctttttcttaaaatacttaaaagaggatttttgattctggccaagtgagcctacctttacaactttttaaaaagatttatttcatcttgctgtagttttctagtaatagagctgcttctgtagatgattgttttttacgtttctgattttgtcaccaatgtgaaaggaaggaacatagtaaatagatgcagtgctgacagtgctttaggactggagcattgttttgtataatatcatttcttttttcagatgccgcagtatcagcaggctttctttcaacagcagatgctagctcaacatcagccgtctcaacaacaggcatcacctgaatatcttacctcccctcaagagttctcaccagccttagtttcctacacttcatcacttccagctcaggttggaaccataatggactcctcctatagtgccaataggtcagttgctgataaagaggccattgcaaatttcacaaatcagaagaacatcagcaatccacctgatatgtcagggtggaatccttttggagaggataatttctctaagttaacagaagaggaactattggacagagaatttgaccttctaagatcaagtaagggacacttgaaggcttattttgcttcacagtaaaataacagctctattattattcagcaaggccaaagacttttgagaatgtgtatggaaaattctttttgtgcatttgagggcaaaattcaggccatcttcttatacatatactatcaaattatgttgtgtgcattagaaatcagttgcttgatagtagctattaaacccaatattgctgatagtatgctaatatcctaaaacttaaatattgcatatctatgaatgttaaattcagaatatctctaaaacatggaaaattgatgtttcaataaaaagggagacattttattattttgccttactaatgattttgcagctctgtttttctgcacactcaatagaaaatattgtgggtctgagatgccctttgaaaatgcctgaaagaaaacatgggctactacattatgttaatgttttgtaatgtccttttaatgagtggtgacataaaagggctgctttgttgtcctgatatggcaaaaattaaataaattctttttcacttttaaaaaaaaaaaaaaaaaaaaaaaaaaaaaaaaaaaaaa

SEQ ID NO: 23847 - DNA, 1405 bp, Homo Sapiens
cggaggaccagggaccggctccggaccgcgcagttagcgccgcctggcctgggccggacccggtcagggttctcaagctgtcgtccctatggggctgtgttttccttgtcccggggagtccgcgcctcccacgccggacctggaagagaaaagagcaaagcttgcagaggctgcagagagaagacaaaaagaggctgcatctcggggaattttagatgttcaatctgtgcaagaaaagagaaagaaaaaggaaaaaatagaaaaacaaattgctacatccgggcccccaccagaaggtggacttaggtggacagtttcataaagcataacatgagtagaagaatctactgccaataactgtttattatctgcaatcaagtgggcttcatcaatttaatttcttctctttgagtaaatgaagattcagactttgtaatattattgcccttaagtgcaatgctaaaaaaacgttgattttcaagcttagagaatggctagacttttcattaaatactgattttcctacatttgctcttctgcagttagtgggtgatttgctatttttcttagtagttaaaaaatggaactaaatagtgaatatacatacactgcatgtaaacattctgcatatacctctaagattaaaattcgcagttgtcttttcatcctttataaaatgatctaactacttatatttgtgctgcatcgcgttacatctgtttttatttcactatgaagatgtttgattaaacttatggacttagtgcctttaaactgatcatcagggagaatcttgaaaaaatcatttgaagggctgatgtgaaggagcactgtaaatttttataacttagtaatgagtattcttaggcagatgtaaaattttttccaatttatttttatttatgtagcttataaaattaacataccctgttttactttatgataaaggattttttgtttgctgaatttaaaattatatattagtgataccatcagagggcagtgatgttctattgtatattaaattcagctctgtaaggatctttgtagtaattgaatgagttaaactaataatctggatgggttataatgagtagtaatatatttgtccatatttcataagtagtgttaatcttgtgtacttattagagaacgatcataagatttatacagatgtgaaactgcgaaggcaagtatgaatgtatgaaaaaaacatgtaggtactgtacttacaaaaggtctacttcagatataaaaatattaggtaattctatacaatgcatagtcataaaccttaacatttttgttcattagaaacatgaattttatagcattttttgtttctcctatataatacactgaaataaaagaatttgtgttagctattaaaaaaaaaaaaaaaaaa

SEQ ID NO: 23848 - DNA, 34088 bp, Homo Sapiens
  misc_feature (787)..(787): n is a, c, g, or t
  misc_feature (820)..(832): n is a, c, g, or t
  misc_feature (834)..(840): n is a, c, g, or t
  misc_feature (851)..(851): n is a, c, g, or t
  misc_feature (861)..(877): n is a, c, g, or t
  misc_feature (899)..(900): n is a, c, g, or t
  misc_feature (912)..(919): n is a, c, g, or t
  misc_feature (921)..(928): n is a, c, g, or t
  misc_feature (937)..(960): n is a, c, g, or t
  misc_feature (967)..(970): n is a, c, g, or t
  misc_feature (981)..(981): n is a, c, g, or t
  misc_feature (1027)..(1028): n is a, c, g, or t
  misc_feature (1052)..(1077): n is a, c, g, or t
  misc_feature (1079)..(1087): n is a, c, g, or t
  misc_feature (1089)..(1093): n is a, c, g, or t
  misc_feature (1190)..(1198): n is a, c, g, or t
tgtgcctggaatattctctgcttttatttaagtctcaccatctttcaagacacaaaatatgtgtgatctctgaggcctttgtgaactgcgctccagcatttactaagcaattaattctgtctctgaacttttatagcacaaacccattcgttcacttgatatttaacaaatatcaacctctatcacttatctctttttttttttttttcttctgagatggagtcttgctctgtcacccaggctggactgcagtggcgcgatctccgctcactgcaacctctgcctcccgagatcaagcgattcttctgcctcagcctcccaagtggctaggattacaggcgcccgccacggggcccggctaatttttgtatttttagtagagacaaggtttcaccatcttggccaggctggtctcgaactcctaacctcgtgatccacccacctcagcctcccaaagtgctgggattacaagcgtgagccaccgtgcgcagcctatcacttatcttttcatgcttacattttctcactgcttgagattttctttcatccagggtcaagcactgagtctattagaaaccccactgtatatgatctgatgaagatgagattatctttttaaaagccacatattaaatctcttaagttaataatattggcaatcaacttaaatcaactgagtgaccactatgtttaaggaagtttcctttctggtaggctgggaagcgggagaagggaaggatataactttataaaaaaaaaaaagctgcagaagggaaggatataactntataaaaaaaggtccttgttcacaaggagctannnnnnnnnnnnntnnnnnnncagagaagaancgtgttcctnnnnnnnnnnnnnnnnngctgtgtttttgggtttagctnnactcaattcttnnnnnnnntnnnnnnnntttatgagnnnnnnnnnnnnnnnnnnnnnnnntttttgnnnncatctctgtgngaaagtaggtgagtcagaatgagtgcataatatataagtatatatnntaatgataatgaatgtgtagattnnnnnnnnnnnnnnnnnnnnnnnnnntnnnnnnnnntnnnnnttgagagtcttgccctgtcgcccaggctggagtgcaatggcatgatcttggctcactgcagcctctgcctcccgggttcacaggattgtcctgcctnnnnnnnnnccggagtagagtagctgggattacaggtgaccgccaccacgcccgactaatttttgtagtttttagtagagacggcgtttcccatgttggccaggttggtcttgaactcctgacctcaagtgatccacccgcctcggcctacccaaagtgatgggattacaagcgtgagccaccgcgcccagccaaacccaaacattctaaaagcgcagagtaaccgctcccctccccgccaacggtaaccagcatcttcgttctccaaccagaacagctgtatgcaccggtgtataagcctgccttaagtgctatttttaatcttttttaaaaacaggccttaaaataactcatttgggtacaactccagcggctggtggagtgggcttaatatattaaacagctgttaattttggtttctttttggtaacagcgacacggagatccgcatttgtcgcagtttccaccgcgggcgggaagtgtaaacacaagaaatacaaacatagcgcaacggctaaaggagtgtcacagcgccaaaccttgctggctccgcgccaggccgagccccaccctctcagctcgcggccaacacccccaccccgcctcagagcccgccgcgcccgcggggcgacaccccccactccatcatcccggaggtggtgcggccgagccccggacccaattggcggaagcggggccggttgtgtgcgcgcgcacaaatgcccggatgcgccgcgacgacccgcgcgctcccctcgggcggtagggggcgcgcaccgaggcaccgcggcgagcttggctgcttctggggcctgtgtggccctgtgtgtcggaaagatggagcaagaagccgagcccgaggggcggccgcgacccctctgaccgagatcctgctgctttcgcagccaggagcaccgtccctccccggattagtgcgtacgagcgcccagtgccctggcccggagagtggaatgatccccgaggcccagggcgtcgtgcttccgcgcgccccgtgaaggaaactggggagtcttgagggacccccgactccaagcgcgaaaaccccggatggtgaggagcaggtactggcccggcagcgagcggtcacttttgggtctgggctctgacggtgtcccctctatcgctggttcccagcctctgcccgttcgcagcctttgtgcggttcgtggctgggggctcggggcgcggggcgcggggcatggggcacgtggctttgcggaggttttgttggactggggctaggcagtcgccgccagggaggagggcgggatttcggacggctctcgcggcggtgggggtgggggtggttcggaggtctccgcgggagttcagggtaaaggtcacgggggccgggggctgcggggccgcttcggcgcgggaggtccggatgatcgcaggtgcctgtcgggtcactagtgtgaacgctgcgcgtagtctgggcgggattgggccggttcagtgggcaggttgactcagcttttcctcttgagctggtcaagttcagacacgttccgaaactgcagtaaaaggagttaagtcctgacttgtctccagctggggctatttaaaccatgcattttcccagctgtgttcagtggcgattggagggtagacctgtgggcacggacgcacgccactttttctctgctgatccaggtaagcaccgacttgcttgtagctttagttttaactgttgtttatgttctttatatatgatgtattttccacagatgtttcatgatttccagttttcatcgtgtcttttttttccttgtaggcaaatgtgcaataccaacatgtctgtacctactgatggtgctgtaaccacctcacagattccagcttcggaacaagagaccctggttagtatttttgtctcgtgtaacttttaagaataatttattttatgaagtgataaactaaatttcgtatacctcaattgtagcatggctctgtaaataaaattgtatgtgcatagcttaaagtgtgctacctctggcgtaactgcgtggagttaaaaactgttaagaactggtcagtatttttttagccatttgccacatttgctttaaaaattagttccattacattgttaagcgtggttgaagttacgtttgttacgtgactgatttttttttcctttttgacctcccagtatttaatttttaaaaatggtttctaaaagtcaaaaaaattattcgtgcttgttttaaagatttttgtcattagagaaattttaaagtaaaacctgaaaattccaggctttttgctccatgtttccttttagattttttgtgtgcgtacccacatatatttacatttgaatttaaatctatgttattgtcctgtttgttgtactaacaagatgaaactgtagttgttctgtgacttgcatccttgtcaataaataaagtctacagaattctttttaatggctgcatagtattccacagcatgagtataccattttaaaaattatttatgcctttactgataggtttttaaaaattgcctcctgtttttgagtattacagatagtgccgctttgtacatgcatcccgtgtgactatttctgtaagaaagattttatagaattataggctggcctcggtggctcacccctgtaatcccatcactttgggaggccaaggcggaccgatcacctgagatgaggagttcaagactagcctggccaacatggtgaaaacctgtctctactaaaaatacaaaaattagtcgggcatggtggcgcgcgcctataatcccctgctgaggaggctggggcaggagaatcgcttgaacccaggaggcagaggttgcggtgagccaagattgcgccatttcactccagcctgggcgataagagcgaaactccgtctaaaaaaaaaaaaaagaaaagaaaaagattttagagaattagaactcctgagttctcaattttactatttgattgctactggtaacttgctcaccaaaaggctctaacagtttcactcctgccaatactgaatatcaccaatctttaattattattattattattttttttgaggcggagtcttgctctgtctcccaggctggagtgcagtggcacaatctcggctcactgcaatctccgttccccgggttcacgccattcccctgcctcagcctcccgagtagctgggactacaggcgcccaccaccacgcccggctaattttttgtatttttagtagagacggggtttcaccatgttagccaggatgatcttgatcccctgacctggtgatccgcccgcctcggcctcccaaagtgctgggattacaggcgtgagtcactgcgcctggcctcttttattattattactatttttttgataaaaggtactgtaccattgtttaaattcatttttctctagtttcttggtgaggctgggcacctttcctttttgtttttgtttttgttttttttgagacagagtttcactcctgttgcccaggctggagtgcaatggcgagatcttgtctcattgcaacctctgcctcacgggttcaagcgattctcttgcctcagcctctggagtagctgggattacaggcatgcgccaccacgctcagctaattttgtatttttagtagagatggggtttttccatgttggtcaggctggtcttgaactcccaacttcaggtgatctgcctgcctcggcctcccaaagtgctgggattacaggcgtgaatcactgcaccaggcctccattttgttaagtcatttatttcttctgggacttgcctagtcttatctgtccattttccttttagttttttaaaatttttcttagtaattggagtagctctatgtgtttcaagtatatttaacttttgttgtttactaatgtagcatttaattttatgttgtcttttccccattgagaacaattctgtgaagtaaaatttgttggcttttgaatttcatatcatgctttggaagaactctcctgtcccaagatcttgcaaatatattcctatattttcttctagatttaaattttttaaatatttagatcttcacctgtaatttaccttcttgttcttcaatgtaagattacaaatgctattatcttttatagctgttttctcattaatacatgtcttttaagtcactaatatactgatggctttccattacagatttttttttttttttttttttgagactgagtcttggtctgttgcccaggctggagtgcagtggcatgatctcggctcactgcaacctctgcttcctgggttcaagcaattctgccgcagcctcccgagtagctgggattacaggcacccacctccacacccggataatttttgtacttttagtagagatagggtttcaccatgttgtccaggctggtcttgaacttctgacctcctgatctgcctgtcttggcctcccaaagtgctgggattaaaggcatgagccactgcgcctggcccacacctgggtaatttttgtatatttaatagagacggagtttcactgtgttggccaggctggtctcacactcctgacctcaggtgatctgcctgcctcggcctcccaaagtgctgggattacagacctgagccactgcacctggcttccattacagatttttactttgaattattttatctaatttgaagctaatatagcatataataaaaattcaggagaaaaaaggttatttttaaatcttttttgagagagtccattctttagcctgaaagtaaagtgcatatgtaagcacagttaaaaaaaaaaaaagtgatcagaaaaattaataattcaattctatatgtattttaaatttttcaattgttaaataatatttgttttattgattagctggaaataggcaatttttaaaaatctgtttttaaggcatccccaatgggggtgctgtcagattttaaagttagacagaggaccggggcatattaaagagaggtgcagaggtaccagtttgtgtggtagtggcaagctgtaaagatacttgagttttgcagattttgataaaccaaaaggaagggagaaagtgcatagtatattacattcccctcccccatgacaattatttttctcaagaccatttgtaaaacctctagataaggggcaggcaaatgttagcctgtcagccaactttggcctgttacctgtttttgttttagtttttaaattttttttgtagaggtggagtctctcagtgtggcccaggctggtcttgaacacctagcctcaagcaaacctctagcactgtctcccaaagtgctggggttataggcaagagccacctctcccagccagctgcctttctttctgtaaggaaaattttactggaatgcaaccatgcccgttggtttacatagtagccatgctttttacttggatagaaccatttgtatgaaaagcttaaaatacttacagtctggctctttacagaaaaaaattgacccctaatctagttggcaggctccttgcatacaggtcatatgtcttatttgtaatttcttttgcagtacctaccactgtccagtgcatagtagaagctcaataaatgtttgtcaagtagatatttgaaatgtagactaactaagaggcagcatgatatagtaggaagaaaatgctgagttgtagttgagggacctgggttgttatctctgatctgttcttaattacccttgtcagcttgggttagttagttaggttctctagccttcaggaacctaatctttagaaagagaagattgataacaggacccactctaaagatttattcatttctctttgattctctaagttagcttgcaataagctcgttggatcagtacggtaagctcattggatctcagtaatttatggttgtttgtaaggcagtaagcaggtaatataaatagctgaaggaaaaagtaatctttgctcttttggattggatactgtctgtgatcacaactgatacttgatgattccatgatacttgcataatgattagatcctccccagcattttttccaaatcccctttattgaacttgatggatatgtttgctgcagggcctatagttctgggataattttggaagtataatagcagttcttttctctttataggttagaccaaagccattgcttttgaagttattaaagtctgttggtgcacaaaaagacacttatactatgaaagaggtaagctgaatcaagagataagtagtatctcactagttacatgtagccatacttaaagttttcaagaccatgtggagaaattggccatatagaaggatttttcattaagcagcaacatttaattttgtggtcgtttggactatattttaaagctgaaaattctaattatactcgagtttcatttctcagctaggaactcagataaatggaagccccgtaagggtgcttgaccattttatgctgtcaaccctttggtagactccttcccagaatcatgtttttaaatgtatgaaataaaatgtatagaattacaaaggaaacatactaaaatacggttaccaaaatagtaaactagtttgtgatatgtgtgcttttgttattaacataataaatactaagatttagaagaagatataataaatataatgtttttttgttttttgagacgaagtctcgctctgtcacccaagctggagtgcagtggcacgatctcagctcactgcaacctccgcctcctagattcaagcccttcttctgccttacccttccaagtagctgggattataggcacctgccaccacgcctggctaattttttgtctttttagtagagatggggtttctccatgttggccaggctggtcttgaactcctagtctcaggtgatccacttgccttggcctcccaaaatgctgggattataggcatgagccaccatgcctggccaataaatattatcttgatatagtgaggaatataagtcatattttgaaatgtttgccataagtacagtatgataggaaaacacctctgatttttgttggtgatgaaatcacaggtattaatactgttgtgatttgttgcctacatttataatcgaaggaaaagctaaattctagttagaagtttgtgaaaataagaatagaattttttttttcccatccaaattaatggaccccctgaattctatccaaggacttcttgggcatccctggatcccaggttaagaacttctgcactagagatacatgagtacagtatactgatctttctgggatagaggtgagctgattcatgaccatatattctatctaatggttccagcattttaatgcattccccacctttaaatttgtgcacagaagcatgattttcagtgacagattgagcaaccttaggcagaatttcagtgtgattgaaatatgcctgttctctgtctctcccacttagtttatgggactcagattacttaaaacatttaagtttctttcttacaacggtatagtggggcaggaagagcttccatttttctttttcctctccagctatacttttagaaacttccttaaaggatgtttggtagaataaatctaagttctcttcctttttcctttcccactgctggacagcaatctgtccaatccacagtcacataagaatattcctttaaggccgatgcctgcttagccagttaaatccaaagacagtgtttgtaggaaagggccaggttaaatggtatttttaaggctaatttgggattgaccttattatcattggataatcagttaaggaaacaaaaaagtatggatttagcagtagatagaaatgagaaaattggccaaggccatcataaagacttagaatgcttatgctaaactatgtaacagtagtgtatgtattgtctgatatagttctcagttataggatctttgttctggggcacacaggaaggtagtgaaagctagtatgggtagtaaaaagagcgttggattaagagtcagaagagctggggccagtttcttcttcttttttttttttttttttttttttatgtgacagtttctcactctcttgcccaggctggagtgcagtggcatgatcactgctcgctgcagcctggacctcgtgggctcaggtgatcctcccacctcagtgtctgcagtagctaggactacaggcttgtaccactatgcctggctaatttttgtatttttttgtagagatggagtttcactatgttgcccaggctggtctggaactcctgggctcaagggatctgcttacctcggcctcctaaagtgctagatttacaggtgtgagccactgtgcccaacgcaatttcttcatttctaatacagtgataataatcttatgaaatatcagaatgagataatacttataaaagtacattgtaaactgtaaaatgccatatgtatttaggtagttgttaataggtttatatctggatatcttaaaaatgtattgccaacttcttgtcttaatgcagcacagggaatataatttaacttttattaatggttcaaagtcattattttgattatttatcataatatggagtaaattgataccttagagggtttatttcattctcagaattctctcaaactgttttgtagctgtcattgattgattgtttttctgtcttcctcctctggtgacctcagaggctattgaggtttatagtatttatgactatttactaagtggctccagaccactgccatattttagttgatttttgtttctgcaacttttttggctatcagttttttattttgctgccttttcccttcctaatatgttagtatctaagtatctgggcagagttaaagtctacaaggaaaaaaacctcacattttaaggtttgcttaagtaaatagagaagcagttatttctgcttctgtcaaattaaatggaaaaggcttaaaagtagcttttttttttttttttttttttttttttgagatgaagtctcactctgttgcttaagccggagtgcagtggcgcaatctcggctcactgcagcctccacctcctgggttcaagcaattctcctgcctcagcctccctaatagctgggattacaggtgtctgccaccatgcctggctaacttttgtatttttagtagagatgggaccaggatggtctttatctcctgacctcgtgatccatccgcttcggcctcccgaagtactgggattacaggtgtgagccactgcgcccagccaaaagtagcttctaagtacaaaatggttgttctacatagttgtggatatggttcctggttgtttacccctattcagataaataggatattattaaatgtatttacaactaacatttagttttctttaatgctcagaaatcatatttgtatttcaggttcttttttatcttggccagtatattatgactaaacgattatatgatgagaagcaacaacatattgtatattgttcaaatgatcttctaggagatttgtttggcgtgccaagcttctctgtgaaagagcacaggtaattcttcagtttagtccattgtaaaaagccatctgggctaacatttcagttcacctctaccctcattcacttttgtcagagaaaaactgttgaaacatattaaagacatgctgaaacttaattttttagctctgcggcatattatttgagaacctgagctctggcatcttataaaccagtgtttgaaacctagcccaatcatttactagttttgtgactagataaattaacctttttaaacctgcttccccatttataaaatagggataattaaatacttcatgtggaggttaaagctcttgaagagagacgttgtataaaaaagcatagttttgggcacatacaaagcattcaagtattagctgtagctattataactttttattccagaaacagtataccaccacgtggtaaaggcttacatttgagccttagttattttggagatcattttcattgtcacctatcattatggcacttaaccagcagaatttaacccaggtaatatttctagaaataggcctggtgcggtggctcacacctgtaatcccagcactttgagaggccaaggcgggtggatcacctgaggttgggagttggagaccagcctgaccaacatggagaaaccctgtctctactaaaaatacaaaattagctgggtgtggtggtgcatgcctgtaattccagctactcgggaggctgaggcagtagaatcacttgaaccaggcaggtggaggttgtggttgaggtgagccgagattgcgccactgcactccagcctgggcaacgagcaaaactgcatctgaaaaaaaaatttttttaatatatatttttctaaaattattcttttttttgtttgtttgttttgagagggagtcttgctctatggcccaggctggagtgcagtggcatgatcttggctcactgcaacctccgtctcctgggttcaagtgattctcctgcctcggcttcccgagtagctgggattacaggtgcctgctgccatgcctaatttttgtatttttagtagagacagggtttcacgatgttgaccaggctggtcttgagctcctaaccttcggtaatccacctgccatggcctcccaaagtgctgggattacagatgtgagcaaccacacccggcctacatttggaattctttgtcacatttggtttagcacaggcaatccgtgttgagccttagcattcattacattaataaatggaatgaatacgttcacctgagacaattaactagcttctgctagtatttaatgctcaatagtatagctgaaaagatgataattaaatgggattttattttattaaaaaacataacttcctcagctgagcaagggattttataactttaaaacaaccttattattgtaaacatagtatatattattattgaacattaggagatgacagaaaactaagaaaagtaaaggaaaaaaaaggactgtagtttgttaacaaaaggtatttttaccagtcatttgtgtattatgtgcaactgtgtgttttaacctagttatgaatatagtactatatttaaatttcatctagcttcttaatttgtattataatttgtatattatatattataatatacatataatataattatatatattacaaatatatgtataattattattttttattgatgagtcacttctgtttaatatccatatatgttgtcattttatacgtggccttggtatatatggtttaattttataaattttaaaaataactatattggtatattggtgatttctttacctattgaatattgaatcttctattttttttcttttttttttgagatgaagtcttgctctgttgcccaggctgcaacctctgcctcctgggttcaagcgattctcttgcctcagcctcctgagtagctgggattacaggtgcacactactatgagcagctaattttttgtatttttagtagagatggggttttgccatgttggccaggctggtctcgaactcctgacttcaagtgatctgcctgtcttggcctcccaaagtgctgggattacagacgtgagccactgtgcctggtctgaatattgaatcttcggataatgtttggaagtatgatttccttggacttgaattctaaatgttgagagataagaaataggagaaattactgacttgaaaaggatatgaattaaaaatattgtgggtttaggttgctgtatccttattcccaaggatgaaaaaagatagttgggattcatatttcctcttaatattgagtgagaaacaatattttgtgacaaacactctcttaaatccttagtttaaaaacaaaaggaaaaatccattgtgacatcaacgaatactggggtaaatgaattatcctcctgttaggatataaacttcatgagggcatatacatttctgtttcattctttgttttcccccgtgtctggtacatagtaccagtgactggtacgtggtaggttttcagtctgtatttattgaatgaatgagtactgctttatctgttaataagtttcttttttttcttccctgagtcggagttttgctcttgttgcccaggctggagtgcaatggcgtgatcttggctcaccgcaacctctgcctcccgggtttaagtgattatcccgcctcagtctcctgagtagctgggattacaggcatgcgccaccatgcccagctaattttatatttttagtagagatggggtttctccatgttggtcaggctggtcttgagctccaggcctcgggtgatctgccggactcggccttccgaagtgctgggattacaggtgtctgtgagccactgcgcccggcctctgttaatacgttttaagatcaagaaaggaagttgaagcttgatgaaagtcaagattataatcaaattcctatttaatggattttgcgtaactcaatagtttttttggcagtttgtatttaatggattttgcataactcaatgcttttttttggcagtttgctactaagcacagagctaaaaacattcctgtttgaaaataagtatgttcaacctcttcctgcttgcatactcattttttgggggtcttctggtaaagtccaaacaaagcacatttcaggaattggtagtgtgaaatctttcagctagagagactttagtaattattaaaagtagctgtacataatcattgtgctactaattattgtgcttttaagtgcctacaagcttgccaatgataaatttggttttgaatgtgtgcagtagttcatactaagtatgtatgtagaagtctggttagatccagcttaatacaaatttttattctaaaatgtacatctcttgttattttttttttttctgtctacaaggaaaatatataccatgatctacaggaacttggtagtagtcaatcagcagggtaagttaattttgagcatcatggataaataccataaaaacgttttaaagacatttttgtttatgtgcatatgttttataattgtgattctctttaaaagttgctttaattaaatattgtaataaaagtatgataaatttattagaagtacatatgaactaaaaccacatactgaggttctaatgtaaagttaaatatcctgttagatcaatttagacttgggatatcagagttaggatttattttgaaaggtctgtaatttcaaaagctcctgtttaggagtgatctaccttgaaaatgtattgaaaggctttgggaaataatattgttacctaggtaggaccatgtgtaaggatgaaggatgagtctttttctttggttatagacaaaattttgtttaccaatttgtggaagtggaattttatgttcctacttccgtttcttaactggttatttttgggtcacatctctctttaataagctgataaaagcattgggttcttgttccagaaagatgcacatgtatatatacatgggtaagtcaataagtgttttacaacctactttccatgagaaaagccctgatttatgtgcttgctgacttccatagtataatactctcatttgaaggctaaaaacatggagttgggaagagatgtacacagtttgctttttttttttttttttttttgagaaggaatcttgctctgtcactcaggctggagtgtagtggcatgatctcgactcactgcaacctccgcctcccaggttcaagcaattcttctgcctcagcctcccgagtagatgggactacaggcgtatgccaccacgcccggctaatttttgtatttttagtagagagggggtttcagcatgttggccaggctggtctcgaactcctgaccttgtgatctgcctgcctcggccttccaaagtcctgggattacaggtatgagccactgcacccggtctcacagtttgcttttgagtgctgcttagagctgtctctaatacactacactgctcctaaagcccatcctcgaactacagttaagaaatgctcttaggccaggtgtgatggctcatgcctataattccagcactttaggaggctaaggcaggaggatcacttgagccgaggagttcaagaccagcctgggcagcatggcaaaatcctaactctgcaaaaactacaaaaatcagcttggtatagtggtgcatgcctgtagtcctagctactcaggaggctgaggcaggaggattttttgaggctgggaggtcaggactgtagtgaactgtgatcatgccatccagtccaggtgacagagcaagacctcatctcttaaaaaagacaaaaacaaaacaaaacaaaaaaacacctctcaggagcttgtttagttcctagaatgaattgaccactcccttgtacttcctctattccatattcagattttattgtaaaattgctttgttttacttgtgggtttttttgtttgtttttgagatgggctctcactctgtcaccctgcttgaagtgcagtggtaatcttggctcactgcatcctccacctccagggctcaaatgatcctccccctcagcctcccaagttgctgggactacagatgtgctccaccacgcctggctaatttttctgtatgtttggtagagacggtgttgctatgttgcccaggctagtcttgacctgagctcaagagatattctcacctcggcctcccaaagtttaggggttacaggcatgagccactgcgtctggctgttgcacttgtttatatttttgttacctgtgtcctattcaggtttgcattgtgcatcacacactatagtgttttattaatatggtatttaataaatgtgttgaattgaatacttattcttccaaagttaggatttaaagcccagaaaagtatctccattttatcccaaaataaaagtagttattaggctgatgatttggcattttattgttttaaagctctttttttttttgagctttagattgtatcctttttatttcctttttttttaattattatactttaagttttagggtacatgtgtacaatgtgcaggttggttacatatgtatacctgttgttttaaagctctttaagaaattgtgtgatagctaaatatacaattgtagtatttgtagtagtagtttgagttttctgaagtatgtaaccctgatgtattcattccttcatttgtttaaataaactttggcacattactagaaaaattgtattattgagatggaaacttacaaattacttatttgcagtctgagtttggtttagatatcagtagaattaacttcagaactcctattccatgttctcaactttgtcacttttttttttttgagatggagtctcactctgtcacccaggctggagtgcagtggtgcgatctcggatcactgcaacctctgcttcccgggtttaagtgattctccttcctcagcctcccgagtaggtgggattacaggcgcctgccaccacgtccggttaatttttgtatttttagtagagaaagggtttcaccatgttgaccaggctggtctcaaactcctgacctcaggtgatcctcccaccttggcctcccaaagtgctgggattacaagtgtgagccactgcacccacccagcctagggcttcctttttattacatcttttttgtagcatctgtttatactaatccaaaattcctggacaatataacctattatgtacaacttaagaaaattagtgtaatgccttacccatagtataaagagaaaattaatctatgataatgcataatttcaaaatgttaatgtccaggcatgagttcactgttaagatgaaaatgtttccaagggggggtagtaaagggtatttgatgataattgtctgtatatcccaactctgaaactttgacttttgagctcaaagtctgtatatccaactacaaatgaaacctatgtgcctgaataactcagtttgttatcttcccatccaatctgtttatctttctaaagtttctcttttagtgaatggtaccactcatttattcacccaagttggaatcttggaatcatcttaactcctttcttccttgccttctatatcaaataccaggtcttgttggtttttacctatttaatttctctggaatttgttttccatgccttagtttaggctttaatagtttttagtttgtattattgcaattgtctaatactggttttcctgcctctgccctctttttcttatgttttgctagagtgatttgtcactcttctgcttaaaattaccatttaggggttcattattgctctctggatgtaatattttctgtgagctagaaatcagtttcatttcttggacaaaaatcctttttaatggtgagtggctgcaacatcgcattaaggaagattctgaagtatctgcggggaagaatgcagtgataagggaatgacagcatgagtcctgctttggctagaccacaggatcctttacagtctgaacctgcctacattccagtaataatgaactgcttgtggtgtcctgcaacaggaactgttgttagtttgcttttggatactttttcacatggcgttttcttggtctggaatggcctttcctagccctattttcatattgtcctacaaaatatttcctgattctttgtttctcagacactccctgtccctaccaaaataatgactctcctgtctctctgctaatttatctaacagtcttttaatgtcttgattatactttactcttctacattaaagttgaattattttatttacatctgcaacatttagtatgaggatgccacctggaaaatacatgtttaatgtttattgaaaggtgaaattgcataagggtttgtgttagactgatagcatatctactgagtagcgccccgccgccccccgcccaccaccaagtttctgatcctttttcttttctctcagaatcatcggactcaggtacatctgtgagtgagaacaggtgtcaccttgaaggtgggagtgatcaaaaggtaatctaagtaaatttctcattctaatgtaatattatttgcaaattggaaaggttatttacaacaagttagcttactggttatgttaagtttgttgtattttatttttttcctaaatgcttaggaccttgtacaagagcttcaggaagagaaaccttcatcttcacatttggtttctagaccatctacctcatctagaaggagagcaattagtgagacaggtatatatgaatatttatttgacgcattcacacagctttttgatattctttctctaatgaaattagtgcttttagacttaattaaattgttccctttttttggttgagatgaattaacctctgagtttttttcattcgtgattttatttgatttacaaattgcttatttagcaatatttttctggctgactacagcaggcacagtttactgtgccccactggagtttatagttagccaactctctgttaagatagtaggaggtggctggggtgtggtggctcacgcctggctcacgcctgtaatcccggcactttgggaggccgaggctggcggatcacgaggtcaggagttcgagaccagcctgaccaacgtggtgaaaccccatctctactaaaaaaaatacaaaaagtagctgggcctggtggcgcacacttgtaatccagctactcaggaggttgaggaaggagaatcacttcaacccgggaggtagaagttacagtgagccgaaattgcgccactgcactccagcctgggtaaccgtgtgagacttcgtctaaaaagaaagataataggagacaggcatataaactctattttcaccattattcttagtcaccttaacagttaaatttttaaattgttatttttaataaatggtagtacatacctatgagttttaaaacagaaagtaaatagcattttagaaatgaagagataagggccgggcgcagtggctcacgcctgtaatcccagcactttgggaggccgaggcgggtggatcatgaggtcaggagatcgagaccatcctgtctaacatggtgaaaccccatctctactaaaaatacaaaaaattagctggatgtggtggcgggtgcctgtagtcccagctactcgggaggctgaggcaggagaatggcatgaactggggaggcagagcttacagtgagccgagatcacgccactgcactccgcctgggcgacacagtgagactgtctaaaaaaaagagagagagagaaaatagttgacagagagaaaatagttgagaacagttagtagacgtagtagacgagaaggctgttgcctgaggaagtcgcagtaactaagaccgtatgattcagatgaaagagaatgtcagatcagtgaaacagaataaatgaacccagaccagaatctcgtacatgcgggcagaagacaggaagggcagaggtgtctagggcagaggtggaactagaacaaatggtagttacttggggaaaaggtgaagttagatctgtaccttatgccaaaatgaatttcaaatgagtttaaaagttaaatgaaaaatagaatacaacatatttgaaagatagtcactttaaatttgactgttaatatctgtattacataaaaagtcttcccaaatcaataaggaaaacattaaaacttcaaatagcaaaaagggcagacagttcacaaaaatttctcacagtaaatacgaatgactaataaatatggggagagggtgaattttggtgatttttagctttacagatagtaaaaaatgccaaaagggtgtccttttgatctatcaaattagtaaaaataaaatttttactcatccttactcatcagtgctaataacttgtgtattagcactgataaactgttggtctgtaaattggtaaaagtgggtaaaaattgattaaatttttcggattataaaaaagcttagatggcctggtgcggtggctcacacctgtaatcccagcactttggaaggccgaagcgggtggatctcttgaggttaagagttcgagaccaacctggccaacatggtgaaaccccatctctattaaaaatacaaaaattagccaggtgtggtggcaggcgcctgtaatcccagctacttgggaggctgaggcaggagaatcgcttgaacctgggatgtggaggttgcagtgaaccaaggtcgcaccactgcactccagcctggggtacagagtgagactccatctcaaaaaaaaaaaaaaaagaaaagaaaaaaaagtcttagagttcttaacattatcctagtaactccatttctagtaatctatcctaaggatgtaataaaaaattcaaagatttatatgtagagatactaattacagcattatttataattgcagcccggccaagatcacctttttaaaaatagggaacacaaacatgattaagaactcacgtgcagaacttgtgatctcgataaaacgtaaaaatcccggccaggtccagtggctcacgcctgtaatcccagcaccttgggaggccgaggagggaggatcacgaggtcaggagattgagaccatcctggctaacacggtgaaaccccgtctctactaaaaatacaaaaaaaattagccgggcacagtggtgggcacctgtagtcccagctattcaggaggctgaggcaggagaattgcttgaacccaggaggtggaggttgcagtgtgccgagattgtgccattatactccagcctgggggacaagagtgagactttgtctcaagaaaatgataaaaaaagtcctttcagaaatctgtgatactatctcattttaatttttgtcattctcatgggtgaaaaatgatatcatttcactttgcatttctttgatccctaggaggtaagagtttttttttctattactcaagtacatgactcaagatttttcatatgtttattagtcatttgtatttcttctgtgacttgctttttcctgtttccttaaaagaaaatacagtctatcttgatttggtaggactttgtataatatgtatactatgggtaatttttactatatatgttgcagatattatcttcgaatttgacctttgccttttaacttttgtttggtattttattttgtcatgtaaaccttgacatggtctaatcttgatagtctttttattgaggactttgcagtattatgaaatacttctccaccccagcattataagaatattttgttataggtacttgaatggttttgttctttatatttagatctttaatccacctggaattcatttttatgtctagtataaggtagtattctcatttatgtctaacggatttgtctaacattctgacccattcagagataatttattatttaaaatgaaatggaaactttttactggttttgatttctgtttaaaatatagggtactgaagagccgggcttagtggcttaggcctgtaatcccagcactttgggaggctgaggcaggaggatcacttaaggccaggagtttgagaccagtgtggccaacatggtgaaaccctgtctctaccaaaaatacaaaaattatccaggcatggtggtgtgcacctttaatcccagctacttggaagctgaagtcacaagaatcacttgaacctgggaggcagaggttgcaatgagctgagaatgtaccactgcactccagcctgggtggtcgagtgtgactctgtctcaaaagaaaaagtgtagggtactgaagaaattgaaacattaagaataccatatgagtaaattaaacactttggctcttttcggaaaaaaacagatgagctcttatattttaaagtttggttttgacagaaaaaaattcctagattttttggttaataaaaactttattagatagattaaattgtgatgtatggagataaagttctgaaagaagaatagaaagctttttaaaaatagtattctcagcctaggcaacatggtgaaaccctgtctatgcaaaaaatacaaaatggtgcattcctatggtaccgttcctatggtaccagctactcgggaggctgaggttgaggtgggaggatcacttgagcccatgaggcagaggttgcagtgagccgagattgtgcctctgtactccagcctgggtgacagagcaagaccctttctcagacaataaataaataaacaaataaataaatacacacagatagtgttctgctgtaacagttggacagattcaataaaacagtgttaacttttgaactaattttattgaaactaagtttctgtacaaataggtactcaaaacagctcaattttctaaatcacagtacagcaatttattttttttccttacatatccagaagaaaattcagatgaattatctggtgaacgacaaagaaaacgccacaaatctgatagtatttccctttcctttgatgaaagcctggctctgtgtgtaataagggagatatgttgtgaaagaagcagtagcagtgaatctacagggacgccatcgaatccggtaatgttctcattttaagtaaggcaagactcttactgttcaaagtctagtcctggcagtcctaataaggatacggatagaatgtacatgtgtcttacgagattgatagaaaacacagtgctaaattttactttaaaataaaactactatattgatctccaccttcaacccaaggtattgtgagaaatgtggaaaatagtggagtaacaccggtattggtaaaattagtagtagtattagtaattatcaatgtcactgtatgtattagagaatatttgtggaccactgcaccaatagtacagtcaaataaattggagtatagagttgtttgagaatttgagagttacactttttaaaaaaggaacaaaaccaaaaatttggttcagttaaatattttagcattttaaggcaaatttgactatttagagtaaaaatatattttattacagccatcagcaaaaaagtcagcatagtctgaacttaacatttgccaaataggtctagacatcaggtaagttctatttacttatgctgtaaaatacaggtttatactgggctgggtgcggtggctcatgcctgtaatcagtactttcggaggctgaggcgggtggatcacctgaggtcaggagttcaagaccagcatggccaacaagatgaaaccatgtctttactgaaaatacaaaaattagccaggcgtggtggcgcatgcttgcagtcccagctacttgggggcctgaggcaggagaatcgctcgaacccaggagttggaggttgcagtgagctgagattgtgccactgcactctagcctgggtgacagagcgagactccatctcaaaaaaaaaaaaaaaaaatgcaggtttattattgcatggatgacgggagagtatcagtactttctcattactaatacagacttccaaaatattagtgagcagcatttcttaagagatgtcactgaaagaagtttggtaaaaaatttttttgttaacaagaatgcttgacaaatggaatattttgttttgtatgtctttaatcaagcttgtccaacccatgccctgtgggccatatgccaggatggctttgaatgtggcccaacacaaattcataaactttcttaaaatattatgatttttttttttacaattttttttctgctcatcagctattgttagtgtattttatgtgtggcccaagacaattcttccaatgtcgcccacggaaaccaaaggattggatacattttttggtaatatggcagtgtctcatggccattattctgggtattagtaatcattgtatagtactctagaagatgtaggaagtggaaccaattgtgatagtaatcctagtcttttacctattcttgttacttcctgtattatctttttttctcttccaaagcagtgattgtatgaacgcatacctgccctctagagttactgtacctaacggagctgttacttatgtagaccgctagatggcatgatgagctcctgctcagtctgagagcaggttcttcatttgtagatatttaagtttataccaaattccatacagttgagatggcactgcagatacagtggtagtcaaggtagatatggttcttgccttcattgggagagatagatcattaatgacaaaaatgaaaacatttaataaatccagtggaaaaaataggctcttgagcggaaatatatgtgataaaattgaatccaattaaaacttgatgagtatccaacctacaagtttggttaaaaagagaattattataccctatttatttatttattgagattgagtctctctgtctcccaggctggagtgcagtggtgcaatcttggctcactgcaacctccacctccccggttcaggcgattctcatgtctcagcctcctgagtagctgggattacaggctcccatcaccacacctggctaatttttgtatttttagtagagatggggtttcactatgttggccaggctggtcttgagctcctgacctcaagtgatctgcctgccttggcctcccaaagtgttgggattacagatgtgagccacctgcccggacccctatttaatgtatagtttttgttaaagttatatcagaattctagctgaatgatatttagagtccttgttcctgctttgtacctgggacactgccttgttactgatatggctttgaggagtagaggaacaccaggttttttgttttgagttgaattagataaaacgacacggacacacgtggagtggttttaaggagcagagcgtttaataggcaagaagggagaaggcagaaggaagaagctcccccttacacagacagagggaggggggctctaaagctgaaagaggagaccttacattctgacaatactagccagttttatgtgacggctggagggggtggtgtcttatttgcatagggctcagaggattggtttgaccaggcatgtcatttagccctcaagaaaactggccctcccaccccagtcctttaatacacaaatgcaggatgccatgacattttacacacggggttatgtgggggcggccatgctgttaggtacctgatggagcaagggcaagaggacaacggtgggaatcgccatgttgggtggaccctcttgcatttgcatcttaaaggttgccagcctttaagagccagggcttttatgctagacaagaaatttttctggagctacgaaaaaccttccaaggaccacttttcctctccatttgcctaaaataatttcttaataactcgtgtggagtagaggggtatttctttttttctttttgttagtcctgtcctgcattctcttaaaaaatcctatctataaaaaatctcagccgggcgtggtggctcatgcctgtaatcccagcactttgggaggcccaggcgggcggatcacctgaggtcaggagttcaggaccagcctcgccaacatgttgtgaaaacccatctctactaaaaataccaaaaattagctgggcatagtggcgggcacctgtaatctagctactcaggaggctgagacaggagaatcgcttgaacccgggaggcggaggttgcagtgagctgagatcacgccattgcactgcagcctgggcaacgagaacgaaattccatctcaaacaacaacaacaaaatctcgtttttcaggttaagtccctagttgtgaaagcttttggtagggccagtttttttttcttcttcgttttaatttccctcatttgagaatgttgtagtcatcattgggtgtcatcattcaccagtttgtgaagggagttaaaggaaagtgcattcctctcccatcttttctttctttggggtttaataaattgtgggaaactaagactgtgttctagactgtacaccatgcagtttatattatgatcttctgtcatctttgcagcctcagattccatttttagctaagactggggttttaaataacttgtttaaggttcctacaactaattgtcacaattggaattcaaacaattctaggtatttttgactacaaagatctaagatctttgcagagcaagcctatctgatgcttaaaaaaatatatattttttaaatttttgagacagtctctcactccgttgcccaggcgggagtgcagcgcatgatcatggcttactgcaacctcaacctcctgggttcaagcaatccttcctcctcagccttgagagttagctgggactacaggtgtgcaccaccacacctggctaattttttttactttttttttttcagagatgagatcttggcctgttgcccaggctggtctcaaaccgctgggcttatgtgattctcctgctttggctcccagagtattgggattacaggcatgagccaccacctccagcctgatgctttttaaatatatagtatttaggtctggtgcagtggctcatgcttgtaatcccagcactttgggaggctgaggcgggcggatcacaaggtcaggagatcgagaccatcctggctaacacggcgaaaccccgtctctactaaaaatacaaaaaattagccgggcgtggtggcgggcacctatagtcccagccactggggaggctgaggcaggagaatggcgtgaacccaggaggtggagcttgcagtgagccgagatggtgccactgcactccagcctgggtgacagagcgagactctgtctccaaaaaaaaaaaaaaaaaaaaaaaatatatatatatatatatttatatttaaataatgtataaatatataatatataattataaatctattatatattaatgtatattatatattacattgttatatatatttatataattatatatttatataaatataaatatatatatttatataaatataaaaatataattatataaatataaaaatatatatttatgtaaatataaatgggcaggcacctgtatatattatatatattactatttatataaatataaatatatattttaaatatttattttatatattttaaaaatatatatagagagagataatttaatagtttctggggcattcttttgcgaacattagccaaaactttaaaaaccactcccaatattgcattttttcatggtattttttatagtatttttatagtatcctaggacaggagttggcaaactttctgtaaagagccacatagttaattatttgggctctgccgggccatggtttctgtcacagctactcagccccgctcttgtaatgcaggagcaactgtagacaacaagtcaacaaataggcatggctgtgttcaataaaactttatttataaaagtcgatgggtgatgggccacagtttgcagacccctaccgtagagtatgttttctgagatttaatgtttcttgtgatttacccccttattctaaaattagtgcactaaagactttagttagttgaagtatttggtttgttgggttactttgttagtgttaattgtatcctaacttgacttgtgattctaatctgattggtagtagagcccttgttaggaatttgagctgcaacttgatgaatgttgcttttactctccttcctaacattactctaaaaaagtcttttgatgtcagaggctgtaaaataatatactttgtttctgtttttaaaactgatacagatatggaaatcatttaatctaagctccttttctagatgaagtagctacagcctttagaagttaaatgatatgggctgggcgaggtggctcacaggtgtaatcccagcattttgggaggccgaggtggcggatcactagaggtcaggatttcgagaccagcccagccaacatgacgaaaccccgtctccactaaaaacataaaaattagccgggtgtggtagtggacacctgtaatctcagctacttgggaggctgaggcaggagaatagcttgaaccccggaggcggaggttgcagtgagctgagatcatgccactgcatttcatcttgggtgacagagcaagactcttgtctcaaaaaaaaaaagggccgggcatggtggctcacacctgtaatcctaacactttgggaggccaaggcggttgaattgcttgaggtcaggagttcaagaccagcctggccaacatggtgaagccctgcctctactaaaaatacaaaaattagccaggcatggtggcatgcgcctgtagtcccagctacttgggaggctgaggcaggagaattgcttgaacttgggaggtgtaggttgcagtgagctgagatcaggccactgcactccagcctgggtgatggagcaagattccatctcaaaataaataaaataagttaaatgatgttgtttaaggttaaattagctacttagtggcaagtgtagaataagccatatcccgacttctagactttttccaattgtagccttctgcttatatatgctcctacccttagccactgacagcaaatattattgccctgaaggtcttactaggttcttatacaatttattgaagtcctgaaacgaagaatcagatgagcagctacagaattttttttaattgtctaaaggctctttaaaagaaaatctcaaagtttattaaaaaacataagtatctatgactcgagacatttttctaagaaaaaaaacccataagtattacaagtgttgtgtcttgttacgtgtattctaccaatttggacatagaaagatgagtgacaggttttagctcaaagtatatataattcagatgagaaacatgcctgcaaaattatgttttgcataatttatgtgtgagactatataattcattattatacaagtagtaaggataattaaaggtggaagagccttttcagttatggtattgacaaaggcttagtcaaagaaggatgaataggattttgaaactgaaattattctagttagagggggaaagtgtggaagttgaaatgccaagattagttgaggaagcaatctagatctggcgggattatccatatttagtaagggaggaggggtgtctagttgaagacagacgaagatgttaatacagtcacactgtaggtactttcgatgccaagaggctttggtgtttttcctttatgcagtggggttttgaacagggaaaataatgtagtaataaccttgaaaccttaatctagtttcagtatgcaggatggatctgaggaggaaatgtgcgtggcaaccggctccgggatggctggctggggggcctagtcttctgcccgccgatctccctcgggaagtcccggatcagagcagcaggcccatcccccaactgttacaccctgctggcagcagcagaggcacagggatgagttaggaaacagatacagaggtcaagaggtgatgtttattaagttatatatttttttcttgttttaggatcttgatgctggtgtaagtgaacattcaggtgattggttggatcaggattcagtttcagatcagtttagtgtagaatttgaagttgaatctctcgactcagaagattatagccttagtgaagaaggacaagaactctcagatgaagatgatgaggtagtattttttttcccctctaattatattggaaaattattaaatattttctatgttcattgactttgagattgaaataatattattcagatttcacttgaaatctttacctcttgatttgtttaaactaacacattggtttgtggacttgaggatttcatagttctttatcatctgatttatattattatattactactaattgccaagaagtcaatagacctcaatgaacatgcttattataatggtctgttcacttttaaaaacatataattcaactactgttttaatattaacttactttctataaaagtaaaacatgcatacagttaaagtcaagtagtacccttagagatctgtttcccagaagtgactgcctttaacatttctagctatttccctattatttaatatctccatattatttatttatgaagtaaaaccacctagctgaatgttttgttttattcatcctaaacatcctttgtattgacttttaccattgtgggtaaggatttctctctcctccattttttccccctttacactcacttactctatttgatattgtctaaggctttctcatatattgtagtacatgatatttgtttaggacttattactaggaagccttctgattgaaggaaatagggcgatgaattgatgctaatgaatgtgttttattaggtatatcaagttactgtgtatcaggcaggggagagtgatacagattcatttgaagaagatcctgaaatttccttagctgtaagtatacatctacttttttaagaaataaaaatttcattaaggtcaagattaggagactatatctagcttctttctgaaatgaactgatttttataaagttaaaatgtttttgtaaagtctgaataatttaaagcatttttcttttatttgttgtgatgagacctgtagctataatttttatttttaggtgctggaatttgaacttttttttttttttttttaaacagggtcttacccttctcccaagctggagtgcagtggtgcaatctcagtgcactgcagcctccacctcccaggttcaagtgattctcgtgcctcagtctcctgagtagctggaattacaggcatgcaccactataccccactaatttttttatttttagtagagatggggtttcaccatgttggccaggctggtcatgaactcctgacctcaagtgatctgcccaccttggtctctcaaagtgctgggattacaagcatgagtcactgcccagctgaatttgtacattttgatgttattttggaaaatttcagtgtatctccagtatactcatcacccagctttaactattaccaacattttgccaaccttgtcaaacgtaaacttttttttttttcaattgagatagggtcctgccctgtcttccaggctggagtgcagtgatgtgatcatggctcactgcagcccccacctcccaggctcaagtgatcctcccacctcagcctcctgagtagctggaataacaggtgcatgccatcacaccccagctaatttttgtattttttgtagaaatgtcaccatgttgcccaggatggtcttgaactcctgggctcaagtgatccacctgcctcagtctcccaaagtgcaaggattacaggtgtgagccatcacacccagccaaatgtaaacatttttattactgatttgtattatagaatgtggtaggatttgccattaaagaaattaacacttaaatgtttacatctcatgcatacttcactgagttcctgaggtattataggtttttttaaaactattgtgctttagtttttgttcttaatattgcctttattatatttgaataggaaataaattccattttttctgagttatagacagttactaattattcaagtgcaaaaaaggatgaaaattcaagagtttccaaaatttttactgtattagaaaataaataactaattgaatcatttgatgtcaagttgagtaaaatattttagatacttttaattttttaaatctattttaagactcaaattattttagatattcatcttggaatttattggactttttgatgcacttttactcccatattgcaagacctttttctttggttttatgagctgtgaaaaacccccttctataacttgaaaaaagaagaatgaatagtctatctttattgctcctgtcttaacatcatttgtgaggcaatctcaaaatggttacggaaatacctcttacttaagagttttcacttgttaaatgtcctcaggcaagaaccatgcttcagctaaggcaagaagataggttatgtaaaaaggctggggatgtgggagagtttgttatccaaattgcatggtggaaaggtttgtgggataaaacgttgggaaaaggaagaagcattgagcagttacaaagatgagaacacaggaaaggatagacaggtaaaggaaaggatattacggttagtgaccaaggatgataggttttagcagcaatacttgctgtgaaaaatgttttagcatttctcttgtggatggagttagggaatactcagttaagccatggttttagagtacttctaaggtagttctagtcactggtggattaggaagtctttctcgaggaggcaggtttcatctagattgatgggatggactcttggaatagcgcctagggttgagcctttaagggagtggatataggctgcatgacagagtaaaagatcccatagacttgcttcaactaaaggaagcaactgcatttgtatcctgaaacagataactttataggtacatgattaatatcacatcacagttaatatatttttagtttagaatttttcaggatggtaagggtgaaaaaaatgggtgtacttactctactttaggagagactgttacatattgacctttacatattgacctttaaaaatctgttttgtgtataattgagacatataacgtgatgttttgacacacatgtaaatagtgaaatgatcactacagtcaagcaaattaatgtaatccattatcttgaatagttaacctttcttgtgtgtatggttaaaatacctaaaatctattcttttagtaaatttccagtataccaatatataactaactatagtcctcatgctgtttacagtgactattttatataaaacatgaaacactgaatattgagccctatgatatactttaccttagacatagcaaagttgctagcattcctgtgactgagcagttaaagggttacagaaactgactgtgtgtcttatttcattgaaggactattggaaatgcacttcatgcaatgaaatgaatcccccccttccatcacattgcaacagatgttgggcccttcgtgagaattggcttcctgaagataaagggaaagataaaggggaaatctctgagaaagccaaactggaaaactcaacacaagctgaagagggctttgatgttcctgattgtaaaaaaactatagtgaatgattccagagagtcatgtgttgaggaaaatgatgataaaattacacaagcttcacaatcacaagaaagtgaagactattctcagccatcaacttctagtagcattatttatagcagccaagaagatgtgaaagagtttgaaagggaagaaacccaagacaaagaagagagtgtggaatctagtttgccccttaatgccattgaaccttgtgtgatttgtcaaggtcgacctaaaaatggttgcattgtccatggcaaaacaggacatcttatggcctgctttacatgtgcaaagaagctaaagaaaaggaataagccctgcccagtatgtagacaaccaattcaaatgattgtgctaacttatttcccctagttgacctgtctataagagaattatatatttctaactatataaccctaggaatttagacaacctgaaatttattcacatatatcaaagtgagaaaatgcctcaattcacatagatttcttctctttagtataattgacctactttggtagtggaatagtgaatacttactataatttgacttgaatatgtagctcatcctttacaccaactcctaattttaaataatttctactctgtcttaaatgagaagtacttggtttttttttttcttaaatatgtatatgacatttaaatgtaacttattattttttttgagaccgagtcttgctctgttacccaggctggagtgcagtggcgtgatcttggctcactgcaagctctgcctcccgggttcgcaccattctcctgcctcagcctcccaattagcttggcctacagtcat

SEQ ID NO: 23849 - DNA, 1970 bp, Homo Sapiens
ctctgtctcaaaaaaaaaataaaataaggaaatataaaagaatatggaggcattaatatagtcattgttcatgttggcattttgatgtctatattattttttaaaacatttaataattttataataatttctaatttatgatttggtaccgtgtcttgtacagtaagttgaacatcatgaatccagaacatttatctgcagttattcttatataatgttaataactaggtttttcattgaatgttagtcaactattttagtaacttagtaaaaggaatcttctaagagcattgtacaaatatagcacatacaatatagatttctttttattttacttatgccctcttttttatttctaaaagctgcacatgtaaacttaaatatttaaactgaaatgggatgtcttatagaatgatttgggggggtgttaatgttgtaaaataatatctgtacacaaaatattggttttatatattataggtatgcccaagaggacagagaacgaatgcacagaaatattgtcagccttgcacagaatctcctgaactttatgattggctctatcttggatttatggcaatgcttcctctggttttacattggttcttcattgaatggtactcggggaaaaagagttccagcgcacttttccaacacatcactgcattatttgaatgcagcatggcagctattatcaccttacttgtgagtgatccagttggtgttctttatattcgttcatgtcgagtattgatgctttctgactggtacacgatgctttacaacccaagtccagattacgttaccacagtacactgtactcatgaagccgtctacccactatataccattgtatttatctattacgcattctgcttggtattaatgatgctgctccgacctcttctggtgaagaagattgcatgtgggttagggaaatctgatcgatttaaaagtatttatgctgcactttacttcttcccaattttaaccgtgcttcaggcagttggtggaggccttttatattacgccttcccatacattatattagtgttatctttggttactctggctgtgtacatgtctgcttctgaaatagagaactgctatgatcttctggtcagaaagaaaagacttattgttctcttcagccactggttacttcatgcctatggaataatctccatttccagagtggataaacttgagcaagatttgccccttttggctttggtacctacaccagcccttttttacttgttcactgcaaaatttaccgaaccttcaaggatactctcagaaggagccaatggacactgagtgtagacatgtgaaatgccaaaaacctgagaagtgctcctaataaaaaagtaaatcaatcttaacagtgtatgagaactattctatcatatatgggaacaagattgtcagtatatcttaatgtttgggtttgtctttgttttgtttatggttagacttacagacttggaaaatgcaaaactctgtaatactctgttacacagggtaatattatctgctacactggaaggccgctaggaagcccttgcttctctcaacagttcagctgttctttagggcaaaatcatgtttctgtgtacctagcaatgtgttcccattttattaagaaaagctttaacacgtgtaatctgcagtccttaacagtggcgtaattgtacgtacctgttgtgtttcagtttgtttttcacctataatgaattgtaaaaacaaacatacttgtggggtctgatagcaaacatagaaatgatgtatattgttttttgttatctatttattttcatcaatacagtattttgatgtattgcaaaaatagataataatttatataacaggttttctgtttatagattggttcaagatttgtttggattattgttcctgtaaagaaaacaataataaaaagcttacctacataaaaaaaaaaaaaaaaa

SEQ ID NO: 23850 - DNA, 2739 bp, Homo Sapiens
atgtctgatgctcagggcagctacaaactggatgaagctcaggctgtcttgagagaaacaaaagccatcaaaaaggctattacctgtggggaaaaggaaaagcaagatctcattaagagccttgccatgttgaaggacggcttccgcactgacagggggtctcactcagacctgtggtccagcagcagctctctggagagttcgagtttcccgctaccgaaacagtacctggatgtgagctcccagacagacatctcgggaagcttcggcatcaacagcaacaatcagttggcagagaaggtcagattgcgccttcgatatgaagaggctaagagaaggatcgccaacctgaagatccagctggccaagcttgacagtgaggcctggcctggggtgctggactcagagagggaccggctgatccttatcaacgagaaggaggagctgctgaaggagatgcgcttcatcagcccccgcaagtggacccagggggaggtggagcagctggagatggcccggaagcggctggaaaaggacctgcaggcagcccgggacacccagagcaaggcgctgacggagaggttaaagttaaacagtaagaggaaccagcttgtgagagaactggaggaagccacccggcaggtggcaactctgcactcccagctgaaaagtctctcaagcagcatgcagtccctgtcctcaggcagcagccccggatccctcacgtccagccggggctccctggttgcatccagcctggactcctccacttcagccagcttcactgacctctactatgacccctttgagcagctggactcagagctgcagagcaaggtggagttcctgctcctggagggggccaccggcttccggccctcaggctgcatcaccaccatccacgaggatgaggtggccaagacccagaaggcagagggaggtggccgcctgcaggctctgcgttccctgtctggcaccccaaagtccatgacctccctatccccacgttcctctctctcctccccctccccaccctgttcccctctcatggctgaccccctcctggctggtgatgccttcctcaactccttggagtttgaagacccggagctgagtgccactctttgtgaactgagccttggtaacagcgcccaggaaagataccggctggaggaaccaggaacggagggcaagcagctgggccaagctgtgaatacggcccaggggtgtggcctgaaagtggcctgtgtctcagccgccgtatcggacgagtcagtggctggagacagtggtgtgtacgaggcttccgtgcagagactgggtgcttcagaagctgctgcatttgacagtgacgaatcggaagcagtgggtgcgacccgaattcagattgccctgaagtatgatgagaagaataagcaatttgcaatattaatcatccagctgagtaacctttctgctctgttgcagcaacaagaccagaaagtgaatatccgcgtggctgtccttccttgctctgaaagcacaacctgcctgttccggacccggcctctggacgcctcagacactctagtgttcaatgaggtgttctgggtatccatgtcctatccagcccttcaccagaagaccttaagagtcgatgtctgtaccaccgacaggagccatctggaagagtgcctgggaggcgcccagatcagcctggcggaggtctgccggtctggggagaggtcgactcgctggtacaaccttctcagctacaaatacttgaagaaacagagcagggagctcaagccagtgggagtcatggcccctgcctcagggcctgccagcacggacgctgtgtctgctctgttggaacagacagcagtggagctggagaagaggcaggagggcaggagcagcacacagacactggaagacagctggaggtatgaggagaccagtgagaatgaggcagtagccgaggaagaggaggaggaggtggaggaggaggagggagaagaggatgttttcaccgagaaagcctcacctgatatggatgggtacccagcattaaaggtggacaaagagaccaacacggagaccccggccccatcccccacagtggtgcgacctaaggaccggagagtgggcaccccgtcccaggggccatttcttcgagggagcaccatcatccgctctaagaccttctccccaggaccccagagccagtacgtgtgccggctgaatcggagtgatagtgacagctccactctgtccaaaaagccaccttttgttcgaaactccctggagcgacgcagcgtccggatgaagcggccttcctcggtcaagtcgctgcgctccgagcgtctgatccgtacctcgctggacctggagttagacctgcaggcgacaagaacctggcacagccaattgacccaggagatctcggtgctgaaggagctcaaggagcagctggaacaagccaagagccacggggagaaggagctgccacagtggttgcgtgaggacgagcgtttccgcctgctgctgaggatgctggagaagcggcagatggaccgagcggagcacaagggtgagcttcagacagacaagatgatgagggcagctgccaaggatgtgcacaggctccgaggccagagctgtaaggaacccccagaagttcagtctttcagggagaagatggcatttttcacccggcctcggatgaatatcccagctctctctgcagatgacgtctaa

SEQ ID NO: 23851 - DNA, 2131 bp, Homo Sapiens
gtgagctcactcccgcctccatgttcccggagtcgcctggaagcgtccgcccaaggtcgcgggccgcttggggagtcagcagcgcgccaggccccttcgggccccacacgcattaggtgccttcttgatgggtacggagtgaacgcgggcggcggcgggaccgaggcagcgcccagtttgtaaccgccgcgccgcccgtgcccgcgcgcgccacaccccagcgcgcttccggccgggccacgtgaccgcgcgtgcacgtgttccggcctctccgcttcgccgctccgaacctcctcctggtcgtcccggcattcgtccacgcggagccggcttgggcggggcccgggaggcggcggccggagaagccgcggagacgcgagcgccgagcgtcgcgagggagcaggcccgggcaggcaagcggcggcctccgccatgaaccccaggggcctgttccaggacttcaaccccagtaagtttctcatctacacctgcctgctgctcttctcggtgctgctgcccctccgcctggacggcatcatccaatggagctactgggccgtctttgcccccatatggctgtggaagcttctagtcgtcgcaggcgcctccgtgggcgcgggcgtttgggcccgcaaccctcgctaccgcaccgagggagaggcctgtgtggagttcaaagccatgctgatcgctgtgggcatccacctgctgctgctcatgttcgaagtcctggtctgcgacagggtggagaggggcacccacttctggctgctggtcttcatgcctctcttcttcgtgtcccccgtgtccgtggctgcctgcgtctggggctttcgacacgataggtcgctggagctggagatcctgtgctcggtcaacatcctgcagttcatcttcatcgccctaaagctggacaggattattcactggccgtggctggtggtgtttgtgcccctgtggatcctcatgtcgttcctttgcctggtcgtcctctattacatcgtctggtccctcctgttcctgcggtccctggatgtggttgccgagcagcggagaacacacgtgaccatggctatcagttggataacgattgtcgtgcctctgctcacttttgaggtcctgctggttcacagattggatggccacaatacattctcctacgtctccatatttgtccccctttggctttccttactaactttaatggccacaacatttaggcgaaaggggggcaatcattggtggtttggcattcgcagagacttctgtcagtttctgcttgaaattttcccatttttaagagaatatgggaacatttcatatgatctccatcacgaagatagtgaagatgctgaagaaacatcagttccagaagctccgaaaattgctccaatatttggaaagaaggccagagtagttataacccagagccctgggaaatacgttcccccccctcccaagttaaatattgatatgccagattaaactcctagagaggacccaggcacacacagactccacttggccttcgcctcttgttcattcatcccaaacctggaaatggaaacaggcttcaaacactcgtctcacgccgtgtttgagatcaccgcctcatcagtatgcatcatagatggaggtggtttcagtatgtgggtgtgtgtgatgtgtacctgggtaagagacttgctttccaggttcgcactttcaggtgtagctgggggcagtaagtcgaattgttttagtaggtcctcaaaaggaataaccacacagctgtttgtttaaatgctactgtacctatcaaaactattgtttaaaaagtatttttatacactgctaatctaaaattgtatttcagattgtgcctgtcataacaatagcaaatgtaaaaagttctctttcccaccacttgtttataaacctcatagttgatatttttagtgttcctactgttaaaatactctctccttgggctttgctgatactggtctttaatattctgataggtgaatttttctaatggaatgaacccatgcatatatagtatttatatgaatattttagcagtgtaatatgttgaattctagttctctgcattaccattattacgttaaagtattttttaaagcttagg

SEQ ID NO: 23852 - DNA, 27864 bp, Homo Sapiens
ctgttcactatataattcccagcagctgctttcatatctggggcatactcacaggggtcagtcaggagggcactgtcctaggactgggagcgggaggatgtgggggtctcccctttgagtttctgctatgatgtgattccaattgatgggccaacacacctctgataccttgtgttatgctgtgtactgcctcaaagtgaataatagcttgggatttagtttgtgtagtctaaggaaaatactttgtgttgaactagtcaggctgttttattgatggccattaaaaggccttgtgcttaggtcttacaagcttttcaaaggcccaaagaaatgattcagacaaaaaaaaaaattagactccaaaatactaaaagaaaactgcaaaaacaggtgaattaatggtgaaagatctgtaggacatagcagtaaggctaccacaacccagctttttgaggttgtcttaaattaatgtgatatggggtgtaggtatgttaacatgcttgataatggaagagtgaggatacctgcttcttaaacagggcctgctcatttttttctggcctctagtacatttctttctggcaaaactcaagctctgttttcacggagatgatgcactgagccatggcatccctaggtggtttgattcatttctgcaccccggtgtctagcaaagtgccacgtgcatgtgtttaatcaaaatagcttgtggttgtcaagctctttgtattcttccctccctccctgtgatttgatttcctgaaagtatcctttccccaaggattatggaacatacacttgttaaacactggacccattttcatgatcatttaaatgtcatgacctttctgacaccttgatatggtttggctctgtgtccccacccaaatctcatctaaattataatccccatgtgtccagggagggatctggtgggaggtgattagatcatgggggcagtttttcctatgctgttctcatgatagtgagtgaattctcatgagatctgatggtttaaaagtgtttggcacttccccccttgctctctctcctgctgtcatgtaagacgtgcctacttccacttccaccatgattgtaagtttcctgaggcttccccagccatgcggagctgtaagtcaattaaatcctctttcctttataaattacccagtctcagatatttctttatagcagcgtgaaaatagactaatacatgcctcttgagatcctcacagcaattggtgcctttagacctcttcattcacacttcactcatgtgttcttccttccccaggtagacgcaccctctgaagatggtgactccctcctgagaagctggaccccttggtaaaagacaaggccttctccaaggtaacagggctgagtcaccccagggtcccaaggccggccttttctcacaaatagctgaactcctccactctcagatccaggggccctggactatctcccattgtatgcaaaaatattttatttccgttgacacattactctttggggcagcttgatggttttattaaattttggaaggaggcttcagccccagtaacagccaatgcctgtttgctttcccaggtcaccttgactgtgctacagtagagacctgggaaatggtgggttccagtgctgtggccaagctctccccagtttcaaccccttccaggccttgctgtccatttttactccactgtcaccacatgttcaaattcttgctttctgctcgagtcagtactgctcacctcgttccaagagatctgggtctatgacactgtgggtgacaccctctgagcatcttttccgagctgtctgtgggtacctgaacctgccccccaacctggcccttgccctacctgccccgacctcagcgagtctggcccagtctgtccctgcttctcccctctggccccaagtgttctcaaatatgcccccgcctgcctgtctgtcactgcagctggcccagccctcatcctctctcccatgaacctctgtggtggcctgctctccctggctcccctgtctccagtttatgttccacacaggtgccaaaatgtctgcaaaaaatggagatttaacatacactagcccttggcttaaaacctgtacatgcttctctgccacctgcaaatgacagtcccatttcctcagcaaacctctgcatgttgtgggaacttatggcttctcagcctcccactcggaacccacctctggtttatgctccagaacatgatgttgttggaccctcccctccacctcctccaggctgagttagcctctgtctcccctcctgccctgggcatggctcttccagtagacacccccacatcacagtctaactctgtgtccacattccctgcaactgctgagctcctggagccaggccctgggaaccttgttcctgtttttgttcccagagccaaatagatatttgatgtatgattgttgaatgcagcagtgagtgaataaagacatgaatggttaactgaaaacattttatcaaaactgttatttgtcatcagagcatgggccggtttccaacagctaacatttaggagtgaccatttgccaggcactgttctaagccctttgcatgtggccattcatttcacccacatagcgccatcaatgacatgctgtcactgcattgcttgtcaaaagggggaactgaggcacggaggctgagcttttactcaacatgccatctatgttgagggacttctgacttggatagccattcaactgcgagcactatggaggccagtcaggcctggccctgccttggaatttctgtgttattcagggacataatggggtttgtgttgatttttgttgggagtgtgtgggttaatctaggtgcaaccctcacctccttcccttctgatgtcctcactcccattggtcatgtgacccttaacgcccatcccaagctcagtgccaattccttgccccagggtcctggggattgacatggatcccaaaagcccgctgctgagaggacagggccactcccacccccctgactgtttcccagagcagctctggggcagaagtaaacttggacccagggggcataaccctttgcccttttatagtctattagaggaggatgaggtctgacatcagctggttcattgccccttgtgccccttgagcacactggggcccagggagagtcacatccctgccttgtggtacaggccaccggccctggacctgtgattaaacattgtccacaattaatttggaattattatctcgtgatacactccataaagttcagtcacacatcttctttttcttctcccctgcctaatgatcagacaagccaggtcttgtgactaaatgaaccgacagctggcagtgttcatctgattttgcaatgcccttattttgttgttgataaactaatgcaaatagctggttggcctggaactggtgattgggaaacattttaacccttctttccttcctctctatcctaaagacttaaaacacacttcacgcagtcacagaaagagctcatagaccagactgcggggcttcaaaggcttctatcttatttaatcatctgtaaatagtttaaaggtaaatatggtaataatactagtattctagactattttgggaagccagctgatgtgaataaagggtcagagttaaaagatattgaaggaatgcagttttactgctctgaggtaggtttcaaggcttgagccaggcttagagatctttgtcctgatactggggataaagtgaagagaatatgaatgggtatgtctcgcatggttagaaaatctttttttttcctgtatttgtttaaaaagcattttgtaacttaaaaaaatacctatacaccttttttttttttgagatggagtctcactctgtcactcaggctggagtgcagtggcaccatcttggctcactgcaacccccgcctcctgggttcaagcaattctcctacctcagcctccccagtggctgggattacaggcatgcaccaccacacccagctaatttttgtactttttggtagagatggagtttcatcatgttggccaggcttgtcttgaagtcctggcctcaagtgatctgcctgccttgggctcccaaagtactgggattacaggggtaaaccaccacacctgaccataatacatcttaaatagaacattttccagctaatatttaaatgactgcatgtcattagaatctgaatgagtgttgtgttaaaatattttgtgttttcatatttatttacttacttatagctacggataagaatataggcaaatttaatctcccgtaaaaattaaaaggcagatgttttcaaagcacagaattacatggtctactctagacattgctcctaaggttgagcagaggggataagagctttttctcttttttcctttcctctttttttcatacaaagttcgttgtagatattttagaaagtatagaaagccccgacaaggggaaacccactcaacccaattttaatgttgttgtcatttcttttagtttttttgggtgcatttctatgtagctatatcctattgtacaagcaatttaggatcttgcaatataaaatgaaggcatgacctttgagctggccaaaagtatgggctgatttttgcaaatgggtcctggcagcaggggacataagtggggaaccaatccccacacaagcagaggtgagctggcttaggggcgagtgcatagctgactttggatgtagactagatttggggaaatttaaatggggtccaagactggaaatgtgtaatgggacagaaggtagaaatgtttaaaatcttaagttgttgagtttgttctcaattttgtgaaaactctttatccctttttgttccccaccccattttctaaccagaagtcaaatatgacaacattcatgatgtagaaaaaccagttcatcagtgtgacttgtgggtgagggtggggacagggccggtgttggtatatttagttttagagatttgctggaaaagtaacatttttgcttttgtctttctttcgttcctccatttctccagaagaatatgaaagtgttactcagacttatttgtttcatagctctactgatttcttctctggaggctggtaagttaagtatttctttgtgttcttgtctgctaagaaaatctgttatttagaatacatgaagtaccttccctaacagagtcatttctcatactcgtctctgttgaatctctgggcacagagcctcctggtcatagacctgtactgctggaagttcctctcagcatcttcgtctcattctctcccatatagagtgggaaactgaggcctagtgaggctgagagcccaaggtcatgtagctagttttggaacaaaagctaaaatctaggtctccaatctaggtccaggcctctttccacttggctgctggttgaaagtgtgatatgggaaattctgactttcatttggaggagatattatgtatagtctttatgaacccacagctggaagtcatcaagatacactactttttctgtttctttccatttcttcattttctctaatcttttctctttttgccaggtgctagctactggggatacagcagggaacagtgcacacagaaatacctgcctgcatagggtttatattcttgtagaagagagagataacagataagtagacatatattgtgtcatatgatggcaagtatagggaggaaaaaagagtataaggttttggcattacagtgggcagaaggttaattttttgaatgtggccagaaaaaaacctccctgagaagctgacttttgagttgaccttaaggaaggggaaaagagagctatttggatatcagattggggtgtggaaatattccagtcagcatgtgcaaaggcccagaggccaagagtatttggcaggctttcagaataaaaatatcagcatgtctggagcatagtgagagatgagggaagtcataagggaccaggctgtctgggtaatggggggatggcagagggttgattatatagaatgttgcgcccttttttagggtcttggcttgtagtctggctgggatgggaagacttcagggttctttgtttaagaccagagaggtgatctgacttaacgttttgattcctgttttgagaatagatccgagggagccaaagagagaaatagagaagccagtgaagaggcaagccatgatgatggctttctctaggcaagaaatgttgatggcttgtcaaagggtggcaaggagaagtgagaagtagacaaattttgaaatattttgggaacagaaccaagagggatttggagttgggtcagatgtgagatgtgagggaaagagaagaatcaagaattatctcagggaattttggcctgcgcaaacgcaaggtgaaattgccattgatgagatggggaagatcaggttttcagactggatgtgttaagtttagctgtccattagatgtttaaaaggtgactttgactaggcagtctacagcctgagggaaaggtctgggttgaatatataaaattggagacctcagcaagcggctggtatgagaaccatgagactgaatgggatcatggagtgtagttaggaaagataagaactttaaggactgagccagagattgacttaaattccttggtccagtgagttttctcccctttgctgaggggctccatgtgtgttggagcataccttcaacattaaggctgtttaaggccttagccttcacttcctgcttgtgtatgacctcagagtcatccagaaatgagagcctggtgccttctatgcaatttcctgggcatgcacacagccctgcatacatgcccacccttctgggttccccaggaatgtgtcagagcttttcaaagccctctggaggttatggctctggtattgcagctttaggcagttgtaaaaaacaattaacactgagtttttccagcaaacgccttggggatagtgcttttgctgtggagctcttggtgaggtcaataacaccaccaccctatgaatgtgactttgaggacctgccagtcaagtcaaagagtggcagtgctctggaaatgggacttttcgaggagctccaaaccctctctcttcttgcaagcctgctggttttcaaagcctttgtgtctgcaaagctcttgatattcatggctgttttagagctgggaagagtaggatggaagtcatttaagttataaagctacaaaccctgctgatccgtgatttggcatgtttctgtttgtttccttattttctagtaaatgctcttctggttactgcaagcctttgatttttgaaattttttgccagtctttttgttgcctttatggaggaatgatttatgagacccccactccaccatattggaaatcttgcaaattcaatttctttgaatagaaaatagtattaatagatatagggcaatccaggctatctacttcttctcaagggagctttaatagtctggaaaatttgctcatttcatttacgttattaaatttattggcataacattgtttataatattccctcactaccctttacaaattatttaaaaaagagatgtcatctcttttttttcctgattagtctggctaaagatttatcaattttattgattttgtgaaagaatctgcttttggtatctttgatttttcttcattgttcttctgttttctatttcattgatttcctctctgatctatattactattttcttcttacttctgttatattaattatgttttttattttctgtatcttaccatattttgacattctggaagatgtttcatatctagggagagactgctccaccaggggctaagcagttcctaggtgtgttgtggacagcttacagcttgcccttcatgtgagactgcttgacccaagatggtaccccactcacctccttatccaactctcacacacccaaaccaatgttaccccagcctcaatcaacacagggctaggtaccagagaactagggacagcctctatgcccaaagcctgcaaaaatggttcaaatgggccaatctgaaactgtttatgctgccctgccttgcctttcccatgggaaccccagtaaagatgctggcctaggctttccttttgtttctgcttctgcctcctaacccaatctggtgattctccctgtggttttgcgtggtatggcacaccccttctgtccgaaccactaagtaatacaaatctttcaattgcattagtctctgttttgtcactcagtcaccttcgtaaatgaagacccaggcatagaatctctgcttgctgcttactttggaattactttgttctttttctagtttcttaaggtagaagctcaagtcatcaatttgaaatttttaaaaaatatataggcatttaaggctagcagtttccctctaagtactgctttcattgaatgccataagttttgatatgttatgttttccttatcattcagatacaaatactttatattctttttgatttctttgactcatgagttatttaggagtatgttaattttcaaatatatagggattccttggatatctttctattattgatttctaatctaattccattgtcaccagagaataagttttgtctaatttgaatccttttaaatttactgagtcttgggttatggggaagaatatggaaaatttgctaagttttatgtgtgcactttaaaaagaatgtaatgttctactgttgttggttggaattttctgcaaatatcaattatgtcaaattggttgatagtgttgttcaaatcttctatgttgttactgattatccgtttaattttattgcttgttctatcggtccttgtgagtggggtttctctagtttcttgcagaaccagtttctctagttcttgcagttctgtcagtttttgcttcatgtattttgaagcactgttagcagctacataaacatttggtattattgtgttcctgttgattaatgacttctttatttttttaaaatttatttatttatttattcattcatttttgggacaaaagtctctctgtgtcacccaggctggagtgcagtggtgcgatctcggctcacagcaacctctgcctactgggttcaagtgattcttgtgcctcagcctcccaagtagctaggattatgggtgcccaccaccacacctggctgattttttttgtattttagtagaggtggagtttcaccatgttggccaggctggtctcaaactcctgacctcaggtgactcacccgcctcagccttgcaaagtgctgggattacaggcatgagccaccacgcctggccgacttctttatttttatgaaatgccccttttttcttgtaatatttttactgtaaaatctactttgataataatagtcactcaagctttaactaattaatttttattaaggtatagttgacaaaatcgtgtatatttacagtgtacaatgtgatgttttggtatatgtatacattgtgaaatggttaaccctagctaattaatcaaactttcttttcatgagtgttagcctggcaaatatttttcttttctttttaatctatttttacctttatttataaaatgtctgtatgtaggtgtatgtgtttatgttaggcaccacatagttgggcctttctttagccaatctgatcatttccgcctttcaatgagagtgtttagactatttgaaattttagtgtgattattcatatattagggtttaattctgggatcttgctatttgtttttctatttgtcccatcaattctgttatttttttctctttttttgctgccttttagattaattggcatttttaggattcattttattttgctttttggctttttagtcataactgtttgttgtgtatgtgtttttttaatgactgctctggggcttaaatagccatctctaagttatctctgtctgccttcaggtaacactatacagtttcacatatagtatacaaagttaagagtatatacccatttctcctttcttgaactttgccctattatttccatatatgttacttctttatttgttttaaactttatagcattttattattttttatttaaacactcagttttctttaaagagatttaaataataagaaagatgatcttataattacccatttttgttgctattcattcttttgcgtagattcattttcatcttataatattgtgctttttgaaggaattaaatatttcttgtaatgcaggtctactggtgatgacattttacagctttggcaaatctgaaaaagtcagtattttttcctaaattttaaatatattttcatgggatatggaattctaggtagactttttctttcagtactttaacgatattgttttgctctcttctggcttgtattgtttttggaaagaaagctgcatcattttttgtctttgtcctctgcaataattgtgtcatttctcccgggctacatagaagattttatctttgtcactggttttaaacaattttattattatgtgtttgtagtttgctttatgtttcttttgcttggggttcattgtgatttgggggcctatgtatacatcatttttgtcacatcttgaaaaacttcaaatatgttttctgttttccacatttttcttcttcagtgattcatattacatgtattgaagttgtcctaagtaaaataattccctgcccattttattctgttatttttgtctctgtgcttaattttggataatttctaatgctgtgtcttcaagttcactcatctttttttttcctgcagtatcaaatctgccgtgaatcccatccattgttttttgtaactcaacattattgttttcatctctaaaagttttttaaaatctctttcatgtcttcactaatcatgtttgatctttcctgtagcatcttgaataaatggaatacaatagtaataaactattttaatttttaaatttattaggcctattgtctgtgtcatttctgggtcagttttgactgatcgatttttttcctccttatcgttggttgtatgttactgcttctttgcatgcctaattatttttttggatgttagacattgtggattttaccatgttgggtgctggatattttcgtattccccagaatgttcttgagctttgttctgccacatgattgttacttggaaatggtttaatcctttcgggtcttgcttttaagcttaattaggatcaggaaaaagtttattcttggcctaattttccctaatgactgagtcagaacccttctgggtactctgcctgatgccttatcattaatgaggctttccaccctggctgttgggaacagcaactgtttccagcattgggtgtgctccatgtgttactccctccagttcgtttggtagtcctccctctagccttgggtcattttcttatatgcttacactgactgatactcagctgaaaacttgggggagactctcagttatcccaagactctttctgcttgtcgttatgcagctctaagtacttgggtactctgccctgcaaacttttctacccaggttctcagctccatctcctcaactcactgggctttgcctgtgttttttctcggcaatgtcatggcctagctgtaattttggacacctcctttcttctccgtctttctgggatttctctcctttgttttctgatgttcaatgtcttgaatactgttgtttcatatattttgtccattttttagttgttcatgtgggaaggtaaatccagtttctattactccatcttgtactgaaaggcatgtctctcctcctacattgtccccactttttagatgagtgaaaagggggtgaaggatgttaaataacttgccaggggtacagcacacaggcagtaagtgatgcagctggacttgaatatgcttctcagactccccagataatgatcttatcacaaggctgtaaagcttttatatgtaatgtgaattgatgtatttaataatcaatgtgtttcttcgtagatattaaatcaagacacactggcagatttttatgtaaattgcttccacccttcttccttttaaagataaatgcaaggaacgtgaagaaaaaataattttagtgtcatctgcaaatgaaattgatgttcgtccctgtcctcttaacccaaatgaacacaaaggcactataacttggtataaagatgacagcaagacacctgtatctacagaacaagcctccaggattcatcaacacaaagagaaactttggtttgttcctgctaaggtggaggattcaggacattactattgcgtggtaaggtaagagaggaattagtatgttacaaacatgttctagtttcctgcagttgttaaggacagaaatacttttaataatgcttaacttacctattttattttattttagaaattcatcttactgcctcagaattaaaataagtgcaaaatttgtggagaatgagcctaacttatgttataatgcacaagccatatttaagcagaaactacccgttgcaggagacggaggacttgtgtgcccttatatggagttttttaaaaatgaaaataatgagttacctaaattacagtggtataaggtaattttattttaaatatgacatttcacttttccagaaaataaaatagttccctggacaatagaatgtatctgcaaagtacctttttattttgtatattgttttctctttaatggtgaaacttgatagggaacctaaaaagaattgtaagactgcattcacttaatttgaagcttaactagaaatttgtttgctgttgtttttatttaatttaataagatgtaattgagaaaagtactagaaatagatgtttaaagagaaggctgattataagcttaaggtattgaagatgtaactatttattacaaaacatactatgtgtgttttattgaagatatggtcttcaaataacctgctagtttccataactgtctgaaaagtgggttgactagctttccatggaacaccccatgttttggtaactttaatctacctagtctgatggaacttaaatggggaatcatcttgtagagcttaagacgtactaaatacgtaatatcaatgaagtgcagtattgttaagaaactatatagtgttaacatttttttcaaacatgtttttcttgcaaaataaattggccttcacttcatagtacaagtctcatagacttgaaaacttaatgtcataggaatatagttaactgtttccaaaaagccagtattaaaacttactatatgtaaggaacttttccagtcactttctaaaaatataacatttgctaaggtgaaaaaaatggagctcctttggcggtagattggggaaagttattggttattggttttcaatgcttctctctccctttatctaggattgcaaacctctacttcttgacaatatacactttagtggagtcaaagataggctcatcgtgatgaatgtggctgaaaagcatagagggaactatacttgtcatgcatcctacacatacttgggcaagcaatatcctattacccgggtaatagaatttattactctaggtgagtcatagctccagccctaaaaggtttagatctgggaaggtccagagactgtgattctaatactactttcattatccatgaagaaaccaaatccaagacgacctcaatgataccacaaaagtcacatggctttagttttgtttttttgttactaaatactatgtaatgtttttccattcctgcttcagatgtagttctaattaaatagagacattatgagctgtgttttccaactgatttaagagggttgttctttggcatggctaaaaatggttcttactgaaagctctggggctccctctggctggtatatgggaatgttctgagagcctgcacctggggaatctcagtgagtgtcagtgtctagcagcaagcatcggtgtggacactaatgagctttggaataagtcacatttccagaatctacctcctgttcattctgtgttaggtgttaacctctctaaccctgtttcctcttctgtaacaagatgatgcaatctcccaaggttattgggaagattagagatatggggtacacgaaacttgtgtacctggtgcaaagaaatgcttggtgcaaaacagctatgcaattaataggtgtaggatgattgttcttgttaattttcttgtgtctttcaattctgcgttaaccatgtttcatattgaaaactatatcacagcaaaatgaaacaaaatgcacaaattgccaggggatagtcagaatgctcaaactttttgtaaatattgagattttgtaagatttatgtaataaaataagagttattccaatcagaacttttttgcaggttataggggtgactattagtagttatgctgggacaacaggtataaattgggactatcccaagcaaactcagaatatgatcaccctataaatagcttcacttttccagttatataatactttattttcctaaaaatatttttattaaataaaagttaattccttgccatggtcccacaggcatcagtgaatcccaattttcaatggtctttgtatcaaaccatgttcttgagtttttagcagcctgtcattgggtagctctggtctgtctttcctgaaacatagtaacctaaccagcaagtagaacttgagagagaactgggcactggggactatttaagctaggttaagtgtttttttttttttttttttttttgagatggagtctcgctctgtcacccaggctggagtgcagtggtgcgatctccgctcactgcaagctctgcctcccgggttcatgccattcttctgcctcagcctcccgagtagctggaactacaggcgcccgccaccacgcccggctaatttttttgtatttttagtagagatggggtttcaccgtgttagccaggatggtctcgatctcctgacctcgtgatccgcccacctctgcctccttaagtgctgggattacaggtgtgagccaccgcgcccggccaggttaagtgtgtttttgatattctctgtttccttttctgatcccatttgtagaaacaatatactctactcggagtgaggtaatattttgttttctttccaaggcccacaccaatgatgcctagcactttttgttcactcaaggattcaaaaatatttattgagcatttactatgtttcaggaactgtaataggtatacattagggaaaaaaacagagaatatcctaccttcatggtgttcactttttttttgattgggggaataccgagtgctcaattttatagtttctcatagtttcttcatggccacagataaacccctgaaaccaatcttttcataaataagtcagattaatttctggggctccttgatacttttttgcctattttaataaattacagcattattccataaccctgtagttctcactattgggtcattaacacagtcattaaatgcaagcaggtctagtattgactagcccttctggccaataacacccaattcaaggaagtgactttccactactctcgcctttgctgacatgctttcacttaagagaggcatttgtctggggacccagggtcctggtgatgtgtgtgtttttcagtagcaccccactctatgaattcggaaggtctagctctaccccgggattcacagtgtgctgtggcctctgcctcagctttcttccttcactttctgcctcctgtctcctggcatatgtgctttgaacacttgatggaatatctggccagaagtcatttagtatgttttgctaagtgttgtcgtcacttgagattctgatctataagagactgacaaaccttatggatgtttttctttcagaggaaaacaaacccacaaggcctgtgattgtgagcccagctaatgagacaatggaagtagacttgggtaagtgggcttcagtgagggtatgctggaatcggttttttttttttaaaacataagagtaagataaattgtatctttactatatataatctaagccatttactgtataaatctatcaatggagggaaagtgagacaaattatatcttaattttttgtatttcttgcctctatggcaaacatcttgccatgtctgatatctccagccctacttttctgtgaacacttattaccatgaaaacaccaaccagacaccaaggtcaaaaggcctaggaaccagcaatgccattgactggtacaggattggatttctttctttttttttttttcacagagttaaaatatttaatgacaaaaatagggtttgctgtaaaagtgaatcaatacagtaggtgttacttatctctgaattaaacaaaaattatatttgacatcttaaagaacttctgaagaattgatcattgtacgacagacatcagcagtgttacaatttcaggactggatttctcatgaccagatccaagctttgagtcggaagagtaaggctacaggccccaaagatggtagtcattctagaaaagtatttttccaagttagtgaacattttttattcaagagtaaagaaagaaccccacaagcatctagctctgcactgtttagtgcagtagttactaggcgcatggagttatggacatgtacaattaaattaagtcaattgattcatttagttaaattaaaaattagttcctctgtcacattagccatatttcaagggcttaatagccacatgtgacaagtgactactgtacagacaagcacaaatatagaacatttccaacatcactgaaagttctattggaaaccactgatcaagagagaaaaagtggttctttgtgtcagaggacccaaaataggttggccttggaattgtcctctgtaatagtaactgcatgacagcagtcaagaaccatacagaggttagaaggtatatgcttgtgatctgtgaattctgtacttggccaattctgtacttgttatttatggtggaaggtggtagaaagacattcttagacagaaacaaaaatgtcaaaactcaaaattaaatatgggccaataggctctagaacaatgtttctcaaccatctttttttgttttaaattgttcccctttagagtctaaaaagtcttcttccacctaattctctttcctgtctttaaatttcagtaccacagttatcttttatatttgctgatatactgtggccctttggagtaccacaaaccatgtaatatctaaggttttcttgcctcttccccaagaaccagtttttgccctgctggccacagcccctgttgaaaatgcctgccctagaagtgtgtaattgagagctctgatgcctaggctgcattgatctctcaatctacaaaaaaaagcttcaaattaggaaataattattttaatgtattatattgacagtggatcagaagcatatagtaccctgtcataggattatcctgaagggtgttaaacaggcaataagatccaataccattactcctaaaatgacttagaaaaatagggattgagagatatttccttaacttaataaataacatcagtgcaagccaatagtcactaatattcttcatggtgaaatactatagaccttctcactaaagccaagagcaagacaaagatgcccatgtaaccactattactgagcacagtctagaagtgcctactaatgcaattgaaggaaaaaaacaaggtatgcttaccacaagggaaaaaagacatttttattattgtttcctgatcataccaatcccaagaaaattcccgggaaaaactagaattaattctgtataaattagtcagataataaattaacatttagaattaatgttctaaaatataagacttgtttagcaataaccagctagaaaacataataggaaacaaatgccatttgcaccagtaaatgtcttagaagtgtccataaaatatgttagaaaaactttgaaaatatgtggaatttataagagaggaaaaaactaaaaaaaccaaaaccctgaatattaatctcagaaaaactgaaatttaaagcatgcatccagccaggcgtggtggctcaagcctgtaattccagcactttggtaggccaaggtggacagatcacttgaggccaggtgtttgagaccagcctggccaagatgttgaaacaccatctctactaaaaatacaaaaattagctgggtgtggtggtgcacacctgtagttccagctgctcaagaggctgaggcatgagagtcacttgaacccaggaggagaaggttacagtgagccgagattgtgccactgcacttccagcctgagtgacagagcgagactgtgtctcatttttaaaaatggaattaaataatggatagagggataacagtttttaaaaaggaaggccgatgagcaccaagctaatgaaaagcatgttgattcaccgtgaattcaagaaatgtagatgaaaacttaagtgacattttcttctctcaaaaggcaatgtctaaccaaaaacacttgttatctggtggttttggggaaaatcgtgctcacatacactattggagagagggtagactgacacagcctcactaaagagagggggttagcttttaaaatatgtttctttaattcaatcttgcttctagattttaatacttcaggatgtgtacaaataaggctattcattaaaatattaatcataatagtgaaaaattaggaaattgtgttcatcaataggaaatagttaatcatagtgtatatgtattatggaatgctaagcagccatgacagagtctattttggaagacaaatcatgtgggcccaaattcccaatccacagtaattacaaaatagtaggcaaaaagaccccatttcaaaaactgcacatgttcacagagaagataaggaatgagacgcataaggttactaatggtggttttctctgggtggtgggtttagggtaattttcctttttctttgtgcatttctatatctaaaattttaattcaatagccatttattaatctagatagatcagaaaaaatcaattaatgttaagattaaaaatacattctttgcaggatcccagatacaattgatctgtaatgtcaccggccagttgagtgacattgcttactggaagtggaatgggtcagtaattgatgaagatgacccagtgctaggggaagactattacaggtatgtatgctaagagttattcacattttgatgttaaatcccacgtgatattttatataaccttgtcggttcagtttaaaagcaagtgttagttgctcctaacctttgctgcctttttttttttttttttttttttttgctaagctaagtagaatttataagatcttgtacatttaaggtaaaaaatacttgtcattgtggtgcaaattacagaccacttagaagcctttctcttacgttatacatgttgcaacatttcaacgaagcaattatctttcattattcttcatattcctcaagtagcttagaagagactcattaatgagctcaagaatcaggcaatccactgctctcgaaagcctctactggtttcctactgctcatctatgggacaaggatctcctggcttcccatgacctctccttcacaacacctgcaaagcactttgtcatctgccccaatctcctcttgtttagtgtctcctctgtgccccatggagaacacaatgcatttgtctacatttttcttcttggaagtggtaatttttttgctttctctgctactgagcctgttactgacagtggtcttggggttataaaatctcagattagtgttgccagcagtctgaatgttgtgactgtgattgggcagggtgattatttcagtggcaattttgtcacaaataaggaaatacacagggtatacaggtcttatttgtagttgatgcaattaacttacacaagtttatttactctctctctcgaatagtgtggaaaatcctgcaaacaaaagaaggagtaccctcatcacagtgcttaatatatcggaaattgaaagtagattttataaacatccatttacctgttttgccaagaatacacatggtatagatgcagcatatatccagttaatatatccaggtaaacaacaaactaattgaaatgcagttttgttttactgtagtaagattccatgactttgaagtttgaaatgccatttcctctgcttagaacacgcttcacttcctcattacttgggtaacttctatttctcttttactcttctgctgaactctctcttcttggaagcttttctgtcctgctgcctgcccttaacccagctctcggcccaaagagaggaggttagggcctctgtatgtacttctgtagcaccatatgtcacaggatctatggtacttcgttttctgtacttaactataaattctgtgatggtggcaaccatttatcttagtaatcattctatttccacagctaatggcaagttaggtctggtacattgtgggtacccaatgaactacattgatgatgcatagggtaagactaaatatccactttcaaagaggacatcagaagtcactgggtttcatgaattggtataataaaacataatattgaaagtatttgtgaaacattttaaggtaatttgtggtttaattaaacataggctattataattgcgtgcatggaagaatatctgaaagactctataaattaacttctatgtatgtttaaatactggcagcatacaaatagaaattacatttaaaagataacatttatggtagcatcaaaaatcatcaaatacttaagaataaatctagcaaaagctgttcaaaacctctgtaatacaaactaaaaaatattgagataaattagagaagaactaaatggaaggatatacaatgttcatagattgaaagactcgatattatgaagatatcagttcttccccaaatgaatctatggattccaaaaaatttcaatcaaaatctcagcagtatttgtacaagtgagagtcagtgtttgtatgggtgtgtttttgtggacacctgtaaaagtcatagggaactgtaaaggaccaagtatagtcatggtggtcttaaataagaaaaataaatctggaggattattactacagacatcatgatcttgtatgaagcgacagtacttaagaccgtaagtgtgaactatcatttgggccagctggatatttgtctggaaaatggtataacttgatttctgttttatatccaaatcatttaaattggaaaagtaaataaagcttttagattcccttttctggatgcttttacatggttcctgatatttagagggtactttctttttcttccctctttcttcttctctagccccctccccatcacctactccatctgctccccagcttcctctttaattattggataactaagtagagaaggaggccaggagaatgtggaaatgtgaaacttccctaagcctccaccttattcgctttccaccagtctttaactttacccaatggactctctgacctcagggaacttttgtaggcttttgagtgattttaacttttccctgttttactgtggaatgctctatcctgtggtcttcggtattatttcccatgttattgtatattatgctatttaggtagaaacttcatagaatgcaccttagttttatcattgctttgtacattagtatccattacaaagtgataataatgaatgagttaatattgtctgaatgcaggccattcccagatatgggctctctgagacgaagatatttaatttgctgtgctcaaagttttaattctttttggttctaatattttttctcctttttttttctttttgctatagtcactaatttccagaagcacatgattggtatatgtgtcacgttgacagtcataattgtgtgttctgttttcatctataaaatcttcaagattgacattgtgctttggtacagggattcctgctatgattttctcccaataaaaggtataattttgtattccatgcagtatttcttgttggagataagggatagttaggagatgtagaagatgactaagagggtttttactaagagggtttctaaaatgaaaagtggcatatacaagaatactagttattcttacacagaattatagttttagaactcattaggctgaatatcattgttttctaagttcctgcctcaacattcatattggtagaataaacaggtatttagagcatctgtttataaattcagttatgcacaagccattggtaggccttgctctgtgatgaataggacagacagagatcataccttaatgaaagaaatgaaatgactagatcttcatgcatcagggaggttctctctctctcctttgtttaaactttgcgaaaaaaaaaaaaggaataccacaatatctaaaaaaaaatgaatggatagaattcagggctgagacctctggggaagaagatgaggacagggagactttaaggatggctctatactaagagtatacgaggcagcctccaaatagaagaacaaatttgcagtaaaacacaagaaatagaaaccttgtaagagatgaacactttttaaagggattatatttttggtattgctgcttcagtcatgccattgtataaaaaaagatgaatagttcattatgtaatgaatgtttgtgatactgactttatcaaatctcttatttttgccttgtggttctaaatacattatgtttttcctttagcttcagatggaaagacctatgacgcatatatactgtatccaaagactgttggggaagggtctacctctgactgtgatatttttgtgtttaaagtcttgcctgaggtcttggaaaaacagtgtggatataagctgttcatttatggaagggatgactacgttggggaaggtatgtgtgtaatggaacagagtaaaggcttattgttgtaaaactacttagtaaaatgtggattccatctttctagaagatcgtggcataggggtatatgtttcacaattttaagaacctcttcagaagtgtatgatgatttttacatttattaaatgcatttacttctctcatattttgtcagagcaataattaagtgattttcatttagttttgaaaaacttaatgactagttaaacccaacagttgctttacaactgatacaattaaacaggagtggtagagatcaaatgattgaataataagtttttaaaattccaacaaagttttctgagttctaaatgaaatatttgtcttttgagggccaatttttgagttagtctataaaatgggaggtttgcagtggctcatgccttttatctcagtacaaccctgggaggccagggtgagagggtcacttgagcctaggagtttgaggctgcagtgatccaagatcacgccactgcgctccagtgtgagcaacagaacaagagactgtctcttaaaattaattaattaaaaacatgggaaactcctttaattttaagtaagacaagaaaaaggcattaggagccatacggttgtgaaaagccttgtgtggctttggttcaggagagaatgatgataaatagaattttacttactatattgtgcttcctgtttttcagacattgttgaggtcattaatgaaaacgtaaagaaaagcagaagactgattatcattttagtcagagaaacatcaggcttcagctggctgggtggttcatctgaagagcaaatagccatgtataatgctcttgttcaggatggaattaaagttgtcctgcttgagctggagaaaatccaagactatgagaaaatgccagaatcgattaaattcattaagcagaaacatggggctatccgctggtcaggggactttacacagggaccacagtctgcaaagacaaggttctggaagaatgtcaggtaccacatgccagtccagcgacggtcaccttcatctaaacaccagttactgtcaccagccactaaggagaaactgcaaagagaggctcacgtgcctctcgggtagcatggagaagttgccaagagttctttaggtgcctcctgtcttatggcgttgcaggccaggttatgcctcatgctgacttgcagagttcatggaatgtaactatatcatcctttatccctgaggtcacctggaatcagattattaagggaataagccatgacgtcaatagcagcccagggcacttcagagtagagggcttgggaagatcttttaaaaaggcagtaggcccggtgtggtggctcacgcctataatcccagcactttgggaggctgaagtgggtggatcaccagaggtcaggagttcgagaccagcccagccaacatggcaaaaccccatctctactaaaaatacaaaaatgagctaggcatggtggcacacgcctgtaatcccagctacacctgaggctgaggcaggagaattgcttgaaccggggagacggaggttgcagtgagccgagtttgggccactgcactctagcctggcaacagagcaagactccgtctcaaaaaaagggcaataaatgccctctctgaatgtttgaactgccaagaaaaggcatggagacagcgaactagaagaaagggcaagaaggaaatagccaccgtctacagatggcttagttaagtcatccacagcccaagggcggggctatgccttgtctggggaccctgtagagtcactgaccctggagcggctctcctgagaggtgctgcaggcaaagtgagactgacacctcactgaggaagggagacatattcttggagaactttccatctgcttgtattttccatacacatccccagccagaagttagtgtccgaagaccgaattttattttacagagcttgaaaactcacttcaatgaacaaagggattctccaggattccaaagttttgaagtcatcttagctttccacaggagggagagaacttaaaaaagcaacagtagcagggaattgatccacttcttaatgctttcctccctggcatgaccatcctgtcctttgttattatcctgcattttacgtctttggaggaacagctccctagtggcttcctccgtctgcaatgtcccttgcacagcccacacatgaaccatccttcccatgatgccgctcttctgtcatcccgctcctgctgaaacacctcccaggggctccacctgttcaggagctgaagcccatgctttcccaccagcatgtcactcccagaccacctccctgccctgtcctccagcttcccctcgctgtcctgctgtgtgaattcccaggttggcctggtggccatgtcgcctgcccccagcactcctctgtctctgctcttgcctgcacccttcctcctcctttgcctaggaggccttctcgcattttctctagctgatcagaattttaccaaaattcagaacatcctccaattccacagtctctgggagactttccctaagaggcgacttcctctccagccttctctctctggtcaggcccactgcagagatggtggtgagcacatctgggaggctggtctccctccagctggaattgctgctctctgagggagaggctgtggtggctgtctctgtccctcactgccttccaggagcaatttgcacatgtaacatagatttatgtaatgctttatgtttaaaaacattccccaattatcttatttaatttttgcaattattctaattttatatatagagaaagtgacctattttttaaaaaaatcacactctaagttctattgaacctaggacttgagcctccatttctggcttctagtctggtgttctgagtacttgatttcaggtcaataacggtcccccctcactccacactggcacgtttgtgagaagaaatgacattttgctaggaagtgaccgagtctaggaatgcttttattcaagacaccaaattccaaacttctaaatgttggaattttcaaaaattgtgtttagattttatgaaaaactcttctactttcatctattctttccctagaggcaaacatttcttaaaatgtttcattttcattaaaaatgaaagccaaatttatatgccaccgattgcaggacacaagcacagttttaagagttgtatgaacatggagaggacttttggtttttatatttctcgtatttaatatgggtgaacaccaacttttatttggaataataattttcctcctaaacaaaaacacattgagtttaagtctctgactcttgcctttccacctgctttctcctgggcccgctttgcctgcttgaaggaacagtgctgttctggagctgctgttccaacagacagggcctagctttcatttgacacacagactacagccagaagcccatggagcagggatgtcacgtcttgaaaagcctattagatgttttacaaatttaattttgcagattattttagtctgtcatccagaaaatgtgtcagcatgcatagtgctaagaaagcaagccaatttggaaacttaggttagtgacaaaattggccagagagtgggggtgatgatgaccaagaattacaagtagaatggcagctggaatttaaggagggacaagaatcaatggataagcgtgggtggaggaagatccaaacagaaaagtgcaaagttattccccatcttccaagggttgaattctggaggaagaagacacattcctagttccccgtgaacttcctttgacttattgtccccactaaaacaaaacaaaaaacttttaatgccttccacattaattagattttcttgcagtttttttatggcatttttttaaagatgccctaagtgttgaagaagagtttgcaaatgcaacaaaatatttaattaccggttgttaaaactggtttagcacaatttatattttccctctcttgcctttcttatttgcaataaaaggtattgagccattttttaaatgacatttttgataaattatgtttgtactagttgatgaaggagttttttttaacctgtttatataattttgcagcagaagccaaattttttgtatattaaagcaccaaattcatgtacagcatgcatcacggatcaatagactgtacttattttccaataaaattttcaaactttgtactgttatcctgagaatctgttctttgtccagtccacagcttacctgcacatttgcacattcccaggcctcaacaaggtgaggagaccttctgcagagagttcttcctgttgtggggaagcaggtggggaggagctggaggaggggaggggagtggaggtcagaggctattggcttaacagtgagccctaactcccttcttctagctaaactctactccctctgctcatttgcttctaaaatggattaaaatgtgagccttgtcaataactgtttattaacttcttatcaatttactattaacttatcactttacctgtccaaaaaatgataaagggaatatttgtatagacttttacattttacaaagcgcttttattttttcctttgacccagaaggtgggcaaaattggtgaacttgctgtccaaaatgcatgctctaaagcttgttaactctgatggtcagagatgacacccagtcagtgcctccttcttacctcacagcaatgctaaggggcaggtgactctctcagtacctggggagaaggggcaggtggcaggttggcttagagtctgagtccagtatgagcactgcctccaccagctacctggagtgaaaccttaggcaaagtatttgagcc

SEQ ID NO: 23853 - DNA, 1884 bp, Homo Sapiens
agaaccggaagttgttgcacagctggcagttccccggtttctccccgacggcgtcgggaggagtgtccatcaggacagcttcacctccttgaggattaaagcctaacagtactgagctatttgtctgtcaaaatgtctgcaaaattgggaaagtcatcatcactcctaacacaaacttcagaggagtgtaatgggattctgacagagaagatggaagaggaagagcagacctgtgatccagactctagcctccactggagcagcagctacagcccagagaccttccgccagcaattcaggcagtttggctaccaggattcacctgggccccatgaggctctgagccggctctgggaactttgtcatctctggctgaggccggaagtgcacaccaaggagcagatcctggagctgctggtgctggagcagttcctggccatcctcccaaaagagcttcaggcctgggtgcagaagcatcatccagagaatggagaggaaactgtgactatgctggaggatgtggagagagagcttgatggaccaaagcagatcttttttggacgaaggaaggacatgattgcagagaagctagcaccttcagaaatcactgaggaattgccaagtagccagctcatgcccgtgaagaagcagctccagggagcatcatgggagcttcagtccttaagaccacatgatgaagacatcaaaactacaaatgtgaaatctgcttcaaggcaaaagacttctttaggcatagaactgcattgcaatgtttccaatatccttcatatgaatggctcccagagttccacatatagaggaacctatgaacaagatggtaggtttgaaaagagacaaggaaacccttcttggaaaaaacaacagaaatgtgatgaatgtggcaaaatctttagtcagagctcagcccttattttacatcagagaatccacagtggaaagaaaccttatgcatgtgacgagtgtgcaaaggcattcagccgaagcgcaattctgattcagcatcgacgaacccatactggtgagaagccctacaagtgtcatgactgtggcaaagcctttagtcagagctcaaatctttttagacataggaaaagacacattagaaaaaaagtcccataagtatcatgagggaatcaaagcatttactcagagctatttcagcacaagggaagacaccagatgcaaacgctccttagtacaaatcagtggtcttagtaagcaccagtctcctttcaagactcatgaaagccacaggagagaaggttgaagatctcaggtcagcattatttgcttttctgcttatcaatgcagtctcaattctgacgtttgcaattccaaagcttaattcagatttccatccctatgcaggccttgaaaaggcattctcagacatgttctactattttcattattaacacatataatgaattagtatatatctttttagacaagtatgttttttccctcattgagaaggaatgtgtgagttactcagtgtaaaaatagacattctcctccatttcataacttgagcactagaattctaaagaccaaaaattaaagcactcaaaaagaattcctggctgggtgcggttggctcatgcctgtaatcctagcactttgggaggccgaggcaggcagattgcctgaactcaggagttcaagaccagcctggacaacacggcgaaaccccgtctctactaaaattcaaaaaattagccaggcatggcaacgtgtacctgtaatcccagctactagggaggctgaggcaggaaaattgcttgaaccgctcagacagagcaagactccgtctttaaaataaataaataaataaataaataaataaataaaaataaaaataaa

SEQ ID NO: 23854 - DNA, 3370 bp, Homo Sapiens
atgaaagtttttatggaccagaaaagggccacaacatattatctcatccagagaccctaagccaaaactcagctgacaggaatgtttcaaaggacacaaagagagatgtggactcaaagtcaccggggatgcctttatttgaagcagaggaaggagttctatcacgaacccagatatttcctaccactattaaagtcattgatccagaatttctggaggagccacctgcacttgcatttttatataaggatctgtatgaagaagcagttggagagaaaaagaaggaagaggagacagcttctgaaggtgacagtgtgaattctgaggcatcatttcccagcagaaattctgacactgatgatggaacaggaatatattttgagaagtacatactcaaagatgacattctccatgacacatctctaactcaaaaggaccagggccaaggtctggaagaaaaacgagttggtaaggatgattcataccaaccgatagctgcagaaggggaaatttggggaaagtttggaactatttgcagggagaagagtctggaagaacagaaaggtgtttatggggaaggagaatcagtagaccatgtggagaccgttggtaacgtagcgatgcagaagaaagctcccatcacagaggacgtcagagtggctacccagaaaataagttatgcggttccatttgaagacacccatcatgttctggagcgtgcagatgaagcaggcagtcacggtaatgaagtcggaaatgcaagtccagaggtcaatctgaatgtcccagtacaagtgtccttcccggaggaagaatttgcatctggtgcaactcatgttcaagaaacatcactagaagaacctaaaatcctggtcccacctgagccaagtgaagagaggctccgtaatagccctgttcaggatgagtatgaatttacagaatccctgcataatgaagtggttcctcaagacatattatcagaagaactgtcttcagaatccacacctgaagatgtcttatctcaaggaaaggaatcctttgagcacatcagtgaaaatgaatttgcgagtgaggcagaacaaagtacacctgctgaacaaaaagagttgggcagcgagaggaaagaagaagaccaattatcatctgaggtagtaactgaaaaggcacaaaaagagctgaaaaagtcccagattgacacatactgttacacctgcaaatgtccaatttctgccactgacaaggtgtttggcacccacaaagaccatgaagtttcaacgcttgacacagctataagtgctgtaaaggttcaattagcagaatttctagaaaatttacaagaaaagtccttgaggattgaagcctttgttagtgagatagaatccttttttaataccattgaggaaaactgtagtaaaaatgagaaaaggctagaagaacagaatgaggaaatgatgaagaaggttttagcacagtatgatgagaaagcccagagctttgaggaagtgaagaagaagaagatggagttcctgcatgagcagatggtccactttctgcagagcatggacactgccaaagacaccctggagaccatcgtgagagaagcagaggagcttgatgaggccgtcttcctgacttcgtttgaggaaatcaatgaaaggttgctttctgcaatggagagcactgcttctttagagaaaatgcctgctgcgttttccctttttgaacattatgatgacagctcggcaagaagtgaccagatgttaaaacaagtggctgttccacagcctcctagattagaacctcaggaaccaaattctgccaccagcacaacaattgcagtttactggagcatgaacaaggaagatgtcattgattcatttcaggtttactgcatggaggagccacaagatgatcaagaagtaaatgagttggtagaagaatacagactgacagtgaaagaaagctactgcatttttgaagatctggaacctgaccgatgctatcaagtgtgggtgatggctgtgaacttcactggatgtagcctgcccagtgaaagggccatctttaggacagcaccctccacccctgtgatccgcgctgaggactgtactgtgtgttggaacacagccactatccgatggcggcccaccaccccagaggccacggagacctacactctggagtactgcagacagcactctcctgagggagagggcctcagatctttctctggaatcaaaggactccagctgaaagttaacctccaacccaatgataactactttttctatgtgagggccatcaatgcatttgggacaagtgaacagagtgaagctgctctcatctccaccagaggaaccagatttctcttgttgagagaaacagctcatcctgctctacacatttcctcaagtgggacagtgatcagctttggtgagaggagacagctgacggaaatcccgtcagtgctgggtgaggagctgccttcctgtggccagcattactgggaaaccacagtcacagactgcccagcatatcgactcggcatctgctccagctcggctgtgcaggcaggtgccctaggacaaggggagacctcatggtacatgcactgctctgagccacagagatacacatttttctacagtggtattgtgagtgatgttcatgtgactgagcgtccagccagagtgggcatcctgctggactacaacaaccagagacttatcttcatcaacgcagagagcgagcagttgctcttcatcatcaggcacaggtttaatgagggtgtccaccctgcctttgccctggagaaacctggaaaatgtactttgcacctggggatagagcccccggattctgtaaggcacaagtgatccttggctttcagaatttgcaagaacagcgatttgaattttgggggggtctgctgttcattcctttaggtgctatacattattcaaaaagtctcccgcgcatttgcactaatgatggctgcatgcatagcaatcagcatgtgagcaaaatcgacaagaaaaccttgactttacagagcagtgtgtgagtaaacagaatgaaaacaacaacctccactctttagtttatataagtttgagttctttcctaaattaaaagatctacacttgagttgggaaccgaaagagaaaaatggacttccatctgttttactggtaaaggaaatcctctgatggacaggtcagagtgaaggaaggttgtgctggtaagacatctctgacgaagagccatggatgctttccacaaaatgtcacctcgctgcactaaaggatgatgaatcctaatcattaaaggaattgtttcagctgaaaaaaaaaaaaaaaaaaaaaaaaaa

SEQ ID NO: 23855 - DNA, 3999 bp, Homo Sapiens
agcggaggaacccgaaggcccgaggatctgggcacgacagcggttaagcaagcgcagagcaagtcgctggccgcgcaatgcccggtgggtcttgcagtttcttggctgggcatggccggaagggaggagagaaggacgcattgcatggcgggagatatagtctttgccggaagtccctcctccctcggacgcctggcggcgccggcgcacactgctcttccaagggcgggagtttctcggtatgtggtggcttcgctgaggcagtggtggccgcactataccgttagaaactcaatttcccggaggttgtgaggccctttgaggcgaaatcgctctgggcgtgaaaggagcaggcgttggcaatggaaggaccaccgcgacctcaggctgaccgtagggagggatcttgagggccctccgagtcccctgggcttgcgctttctttctttgcagccaccgtgcctaccgcgaggatgagctcggcctcggtcaccgctttcgagaaggagcatctctggatgtatctgcaggcgctcggcttcgagccaggcccggcaaccattgcctgcggaaagatcgtgtcgcacacgcacctcggagtgaacatgtttgacaagctgaaccgtgatgcctttcatataatttcttattttttgtttcaagttctggaccagtctctcaccaaagaagttttcaaattttgttggcccccatttgagcaaaaaagtgacactgaattccgaaaacattgctgtgaatggataaaaaggatttctggtgaatgtggaagtagctttcctcaagttgttggttcactatttctttctcctggtggtcctaagtttattcatctgatgtatcattttgcaagatttgttgcaatgaaatatattaaatccaattctaaaaattcttctcatcattttgtagagacatttaacataaaaccacaggacttgcacaaatgcattgccagatgccatttcgcacgtagcagatttttacaaattttgcaaagacaagattgtgttacccaaaaatatcaggaaaatgcacaattatcagttaagcaggtacgaaacttgagatctgaatgtataggattggaaaaccaaataaagaaaatggaaccctatgatgaccacagtaatatggaagaaaaaattcaaaaggttcggtctttgtgggcttcagtgaatgaaacgctcatgtttttggaaaaagagagagaagttgttagttcggtccttagtcttgttaaccaatatgctttagatggaactaatgttgctattaatattccaaggctcttacttgacaaaattgagaaacaaatgtttcagttgcacataggaaatgtttatgaggctggaaaactgaacctcttaacagttattcagttattaaatgaagtcttgaaggtgatgaaatatgaacgttgtcaggctgatcaagcaagattgacggtagaccttcactaccttgaaaaagagaccaaatttcagaaggaaagattatcagatctgaaacatatgaggtatagaataaaagatgatctcacaactataagacattctgttgttgaaaagcaaggagaatggcataaaaagtggaaagaatttcttggtttgtctcctttcagtctaattaaaggttggactccatctgtagatcttttaccaccaatgtctcccctttcgtttgatcctgcctcagaagaagtgtatgcaaagagtattctttgtcagtatcctgcttcacttccagatgcacataagcaacataaccaagaaaatggttgcagaggagacagtgataccttgggagcgctacatgatctagccaacagccctgcctctttcttgtcgcagtcagtttcatcatcagatagaaacagtgttacagtacttgaaaaggacacaaagatgggaactcccaaagaaaaaaatgaagcaatttctaagaaaataccagaatttgaagtggaaaattctccattgtcagatgttgcaaagaatacagagagtagtgcatttggagggtctttgccagctaaaaaaagtgatccatttcaaaaagagcaagatcatctggtagaagaggttgccagagcagttttatctgattcaccacagctctctgaaggaaaagaaataaaattagaggaactaattgactctctgggttctaaccccttcttaacaaggaatcagattccccgtactccagaaaacttgataactgaaattaggagctcatggagaaaagctattgaaatggaagaaaacagaactaaagaaccaattcaaatggatgctgaacatagagaagtattgccagaatcattacctgtgttgcacaatcaaagagaatttagcatggctgattttctcttagaaaccactgtatcagattttggccagtctcatttgactgaagagaaagttatttcagattgcgagtgtgtgcctcagaaacatgtgctgaccagtcacatagatgaaccaccaacacaaaatcagtcagatttgttaaataagaaagtaatttgcaagcaagatttggaatgtttagccttcaccaagctttcagaaactagccgaatggagacattctcccctgctgtcggcaataggatagatgtgatgggtggcagtgaagaggagtttatgaaaatattggaccacttagaagtttcttgtaacaaaccttccacaaataaaactatgttgtggaattcttttcagatatcaagtggaattagttctaagagttttaaagataatgattttggcatattacacgaaactctcccggaagaagttggtcatctaagttttaatagttccagtagttcagaggccaattttaaactggagccaaatagtcctatgcatggtggcactcttctagaagatgttgtgggagggagacagactactccagaatcagactttaatttacaggctcttcgcagtagatacgaggctctgaagaaatctctttccaagaaaagggaagaatcttacctctcgaattcccaaacacccgaaagacacaaaccagaattgagccctactccccaaaatgtacaaacagatgatacgcttaactttttggacacctgtgatttgcatactgagcatataaagccatctttacgcacgtccatcggtgaaagaaaacggtctctttcaccactaattaagttttctccagtggaacaaagattgagaaccacaatagcatgtagtcttggagaactacctaatttaaaggaagaagacattttgaataagagccttgatgcaaaagaaccaccgtctgacttgacaagatgaagacgtacccatttaatataactatgatgcacttaaattgaagctatgccacaggatagaaaatgaattacaacttaaatacatgttggaagtgtaacactgtttttcaaggtttaaaaaaattcctaatgccttttagccttctttaatatttttaggtaaggaaagtatgtttggattttttcctctttgtaggtatatgagattgaaatgtgaagtatttggacaacaaacgtcaagcaatgggaagccattttgatttcttgagtaatcttgtaagcattaagtgaatgacaaagtagtagtgtaacttatttcttatgttataacttcagtcaattaatataaggatagtttttgttgtatgttcactaagtggttaatataatagccattgaatatactaatctttcatcttagagaactatacaacttttattgtttcttaatggaacattctggctaaccagaaaaagtgagaaaagtagtaccttgggatgtgtagtcaagatgacaaattttaagactggaaaagctctaaacaggcttaatgattcttcaggtagaatgatcctgagaagtgatgtttgatggaataaagtgcatgtgatgattaagtgaagactggggcagaatgatttaaaaaaaaaaaaaaaaa

SEQ ID NO: 23856 - DNA, 3042 bp, Homo Sapiens
gcggctgtccgcggtgccggctgggggcggagaggcggcggtgggctccctggggtgtgtgagcccggtgatggagccgggcccgacagccgcgcagcggaggtgttcgttgccgccgtggctgccgctggggctgctgctgtggtcggggctggccctgggcgcgctccccttcggcagcagtccgcacagggtcttccacgacctcctgtcggagcagcagttgctggaggtggaggacttgtccctgtccctcctgcagggtggagggctggggcctctgtcgctgcccccggacctgccggatctggatcctgagtgccgggagctcctgctggacttcgccaacagcagcgcagagctgacagggtgtctggtgcgcagcgcccggcccgtgcgcctctgtcagacctgctaccccctcttccaacaggtcgtcagcaagatggacaacatcagccgagccgcggggaatacttcagagagtcagagttgtgccagaagtctcttaatggcagatagaatgcaaatagttgtgattctctcagaattttttaataccacatggcaggaggcaaattgtgcaaattgtttaacaaacaacagtgaagaattatcaaacagcacagtatatttccttaatctatttaatcacaccctgacctgctttgaacataaccttcaggggaatgcacatagtcttttacagacaaaaaattattcagaagtatgcaaaaactgccgtgaagcatacaaaactctgagtagtctgtacagtgaaatgcaaaaaatgaatgaacttgagaataaggctgaacctggaacacatttatgcattgatgtggaagatgcaatgaacatcactcgaaaactatggagtcgaactttcaactgttcagtcccttgcagtgacacagtgcctgtaattgctgtttctgtgttcattctctttctacctgttgtcttctaccttagtagctttcttcactcagagcaaaagaaacgcaaactcattctgcccaaacgtctcaagtccagtaccagttttgcaaatattcaggaaaattcaaactgagacctacaaaatggagaattgacatatcacgtgaatgaatggtggaagacacaacttggtttcagaaagaagataaactgtgatttgacaagtcaagctcttaagaaatacaaggacttcagatccatttttaaataagaattttcgatttttctttccttttccacttctttctaacagatttggatatttttaatttccaggcatagcaatgttatctattttaatgtgtatttgtcacaataacagaacatgcaagaacaatcattattttattttataggcatttgattactattctagacttctggtatcttcttactaacataaatatctcaagtagaaaagtttttgaaaactaacatttaaaaattaatcagttacagtaaagactttgaaaaagaaatgtacttgttaggaagtagcttaattaccccccattgcagtattattgttatatatatagttaatatgttgtacatcacaataatatataattcagtctctagtttccctagagtcatttttgaaaccactgattgcaaacctccctgacaatttttaaaagtagtaagccacattacatttatctttgtaaaaagatttatggtaactggtttcttacttgacttttataaatagtattttacatcttatttttgcctttatttcataagtaatttaaaaatcactggattgctttattatattcagggcaatatggattatttttataccaaggatttgcatcgtgaattacattaagttatttggcaatttataatttattactactttaaatcaaatgtagcattatcacactgtatttaaattgtcattttttaaaggaatattttcttcttaagatatatagaggattttggagaagagagacaggaggggtaaaaccagcttaaggttcagcgagcagaaagggacctgagaggatgctcactgtaagactgttggacagtggtgtgtattgaggggatgaatcggaacgatagtctcatgcagaaaatagtgagattaagatcatccttattgtttctaaattatttcaatcagatgaaagtgatacgattgaaatgaaatcacatagttcgtgctcagaaattctattttggtatgtttgtattagcctttagaaaaaacactccgtttcagaattgttcacagttttatttcttaggtttttagagttcaggatttcatttattaatttcttcttgcttttttggtggaaataggctttgttgtaaacattaagaatataaaatctcctctatatagaaacaagaattttgttaaaaagagaatttgaatcccttcctatactataaaatgctctatagggagacaaagtgtttcttttttcttttatgtttactgtttatgtggagtgaaatataaggctcttggatgtataacatactcaaaagctgttacactttctctgatctgctgtgatccactgaaaatgtgctggggtttgttctgctgtcactgtttatgctgctggaacttagcactgtcttgatttgaagcatatgattgagagccatttgaagcaatcttcattaatgcagataaaacaagtttacatgtgcagagttagaaaatgacatgttcaattctgtaagtggtgactttttgagcacctttcagtattatgtatttgtaaaaaccattgtttttggatataaagctaataagcactttaaaaaggaaaaggcagcctttactattttttctggttgagtcattgctctttagacctagcatcagcaatagatttcaaagataagtattaagcgctaccctaaagtgtgtaagtttttcattttgtcatattgaaaaatgatttgcatagtactgaatgttgacacacagcttatatgtatttacaagaatatctttaagtgtttttttgacacattaaaataaaggaaataaggaaattgtaa

SEQ ID NO: 23857 - DNA, 4654 bp, Homo Sapiens
cagtgcaaaaactttcatgccttttttttttttaagtagaaaaattgtttccaaagtgcatgtcacatgccacaaccacggtcacacctcactgtcatctgccaggacgtttgttgaacaaaactgaccttgactactcagtccagcgctcaggaatatcgtaaccagttttttcacctccatgtcatccgagcaaggtggacatcttcacgaacagcgtttttaacaaaatttcagcttggtagagctgacaaagcagataaaatctactccaaattattttcaagagagtgtgactcatcaggcagcccaaaagtttattggacttggggtttctattcctttttatttgtttgcaatattttcagaagaaaggcattgcacagagtgaacttaatggacgaagcaacaaatatgtcaagaacaggacatagcacgaatctgttaccagtaggaggaggatgagccacagaaattgcataattttctaatttcaagtcttcctgatacatgactgaatagtgtggttcagtgagctgcactgacctctacattttgtatgatatgtaaaacagattttttgtagagcttacttttattattaaatgtattgaggtattatatttaaaaaaaactatgttcagaacttcatctgccactggttatttttttctaaggagtaacttgcaagttttcagtacaaatctgtgctacactggataaaaatctaatttatgaattttacttgcaccttatagttcatagcaattaactgatttgtagtgattcattgtttgttttatataccaatgacttccatattttaaaagagaaaaacaactttatgttgcaggaaaccctttttgtaagtctttattattcactttgcattttgtttcactctttccagataagcagagttgctcttcaccagtgtttttcttcatgtgcaaagtgactatttgttctataatacttttatgtgtgttatatcaaatgtgtcttaagcttcatgcaaactcagtcatcagttcgtgttgtctgaagcaagtgggaaatatataaatacccagtagctaaaatggtcagtcttttttagatgttttcctacttagtatctcctaataacgttttgctgtgtcactagatgttcatttcacaagtgcatgtctttctaataatccacacatttcatgctctaataatccacacatttcatgctcatttttattgtttttacagccagttatagcaagaaaaaggtttttccccttgtgctgctttataatttagcgtgtgtctgaaccttatccatgtttgctagatgaggtcttgtcaaatatatcactaccattgtcaccggtgaaaagaaacaggtagttaagttagggttaacattcatttcaaccacgaggttgtatatcatgactagcttttactcttggtttacagagaaaagttaaacaaccaactaggcagtttttaagaatattaacaatatattaacaaacaccaatacaactaatcctatttggttttaatgatttcaccatgggattaagaactatatcaggaacatccctgagaaacggctttaagtgtagcaactactcttccttaatggacagccacataacgtgtaggaagtcctttatcacttatcctcgatccataagcatatcttgcagaggggaactacttctttaaacacatggagggaaagaagatgatgccactggcaccagagggttagtactgtgatgcatcctaaaatatttattatattggtaaaaattctggttaaataaaaaattagagatcactcttggctgatttcagcaccaggaactgtattacagttttagagattaattcctagtgtttacctgattatagcagttggcatcatggggcatttaattctgactttatccccacgtcagccttaataaagtcttctttaccttctctatgaagactttaaagcccaaataatcatttttcacattgatattcaagaattgagatagatagaagccaaagtgggtatctgacaagtggaaaatcaaacgtttaagaagaattacaactctgaaaagcatttatatgtggaacttctcaaggagcctcctggggactggaaagtaagtcatcagccaggcaaatgactcatgctgaagagagtccccatttcagtcccctgagatctagctgatgcttagatcctttgaaataaaaattatgtctttataactctgatcttttacataaagcagaagaggaatcaactagttaattgcaaggtttctactctgtttcctctgtaaagatcagatggtaatctttcaaataagaaaaaaataaagacgtatgtttgaccaagtagtttcacaagaatatttgggaacttgtttcttttaattttatttgtccctgagtgaagtctagaaagaaaggtaaagagtctagagtttattcctctttccaaaacattctcattcctctcctccctacacttagtatttcccccacagagtgcctagaatcttaataatgaataaaataaaaagcagcaatatgtcattaacaaatccagacctgaaagggtaaagggtttataactgcactaataaagagaggctctttttttttcttccagtttgttggtttttaatggtaccgtgttgtaaagatacccactaatggacaatcaaattgcagaaaaggctcaatatccaagagacagggactaatgcactgtacaatctgcttatccttgcccttctctcttgccaaagtgtgcttcagaaatatatactgctttaaaaaagaataaaagaatatccttttacaagtggctttacatttcctaaaatgccataagaaaatgcaatatctgggtactgtatggggaaaaaaatgtccaagtttgtgtaaaaccagtgcatttcagcttgcaagttactgaacacaataatgctgttttaattttgttttatatcagttaaaattcacaataatgtagatagaacaaattacagacaaggaaagaaaaaacttgaatgaaatggattttacagaaagctttatgataatttttgaatgcattatttattttttgtgccatgcattttttttctcaccaaatgaccttacctgtaatacagtcttgtttgtctgtttacaaccatgtatttattgcaatgtacatactgtaatgttaattgtaaattatctgttcttattaaaacatcatcccatgatggggtggtgttgatatatttggaaactcttggtgagagaatgaatggtgtgtatacatactctgtacatttttcttttctcctgtaatatagtcttgtcaccttagagcttgtttatggaagattcaagaaaactataaaatacttaaagatatataaatttaaaaaaacatagctgcaggtctttggtcccagggctgtgccttaactttaaccaatattttcttctgttttgctgcatttgaaaggtaacagtggagctagggctgggcattttacatccaggcttttaattgattagaattctgccaataggtggattttacaaaaccacagacaacctctgaaagattctgagacccttttgagacagaagctcttaagtacttcttgccagggagcagcactgcatgtgtgatggttgtttgccatctgttgatcaggaactacttcagctacttgcatttgattatttcctttttttttttttttaactcggaaacacaactggggaaatatattctttcccagtgattataaacaatctttttcttttttttaagtccttttggcttctagagctcataggaaaatggacttgatttgaaattggagccagagtttactcgtgttggttatctattcatcagcttcctgacatgttaagagaatacattaaagagaaaatactgttttttaatcctaaaatttttcttccactaagataaaccaaatgtgcttacatatatgtaaacccatctatttaaacgcaaaggtgggttgatgtcagtttacatagcagaaagcattcactatcctctaagatttgtttctgcaaaactttcattgctttagaattttaaaatttcaccttgtacaatggccagcccctaaagcaggaaacatttataatggattatatggaaacatcctcccagtacttgcccagcccttgaatcatgtggcttttcagtgaaaggaaagattctttttctaggaaaaatgagcctattttattttattttattttattttttgacacaaactgtagattttagcagccctggcccaaaggaatttgattacttttgttttaaacagtacaaaggggacactataattacaaaaacatccttaactgatttgagttgtttttatttctttggatatattttcagagtggtaaattgtgtgtgagaattacaaatgattattcttttagtggtttcttagcctctcttacagcccacggggatagtactgtacatcaataccttcatatgaaatttttatatgcaatgaaaataaaagcatgggttgattctgcctatttatgactcaatcttttacaaataaaagattattcattttaaaaaaaaaaaaaaaaaaaa

SEQ ID NO: 23858 - DNA, 6334 bp, Homo Sapiens
cttaagggcgggagtctcggtttgtggtggcttcgctgaggcagtggtggccgcactataccgttagaaactcaatttcccggaggttgtgaggccctttgaggcgaaatcgctctgggcgtgaaaggagcaggcgttggcaatggaaggaccaccgcgacctcaggctgaccgtagggagggatcttgagggccctccgagtcccctgggcttgcgctttctttctttgcagccaccgtgcctaccgcgaggatgagctcggcctcggtcaccgctttcgagaaggagcatctctggatgtatctgcaggcgctcggcttcgagccaggcccggcaaccattgcctgcggaaagatcgtgtcgcacacgcacctcggagtgaacatgtttgacaagctgaaccgtgatgcctttcatataatttcttattttttgtttcaagttctggaccagtctctcaccaaagaagttttcaaattttgttggcccccatttgaccaaaaaagtgacactgaattccgaaaacattgctgtgaatggataaaaaggatttctggtgaatgtggaagtagctttcctcaagttgttggttcactatttctttctcctggtggtcctaagtttattcatctgatgtatcattttgcaagatttgttgcaatgaaatatattaaatccaattctaaaaattcttctcatcattttgtagagacatttaacataaaaccacaggacttgcacaaatgcattgccagatgccatttcgcacgtagcagatttttacaaattttgcaaagacaagattgtgttacccaaaaatatcaggaaaatgcacaattatcagttaagcaggtacgaaacttgagatctgaatgtataggattggaaaaccaaataaagaaaatggaaccctatgatgaccacagtaatatggaagaaaaaattcaaaaggttcggtctttgtgggcttcagtgaatgaaacgctcatgtttttggaaaaagagagagaagttgttagttcggtccttagtcttgttaaccaatatgctttagatggaactaatgttgctattaatattccaaggctcttacttgacaaaattgagaaacaaatgtttcagttgcacataggaaatgtttatgaggctggaaaactgaacctcttaacagttattcagttattaaatgaagtcttgaaggtgatgaaatatgaacgttgtcaggctgatcaagcaagattgacggtagaccttcactaccttgaaaaagagaccaaatttcagaaggaaagattatcagatctgaaacatatgaggtatagaataaaagatgatctcacaactataagacattctgttgttgaaaagcaaggagaatggcataaaaagtggaaagaatttcttggtttgtctcctttcagtctaattaaaggttggactccatctgtagatcttttaccaccaatgtctccgctttcgtttgatcctgcctcagaagaagtgtatgcaaagagtattctttgtcagtatcctgcttcacttccagatgcacataagcaacataaccaagaaaatggttgcagaggagacagtgataccttgggagcgctacatgatctagccaacagccctgcctctttcttgtcgcagtcagtttcatcatcagatagaaacagtgttacagtacttgaaaaggacacaaagatgggaactcccaaagaaaaaaatgaagcaatttctaagaaaataccagaatttgaagtggaaaattctccattgtcagatgttgcaaagaatacagagagtagtgcatttggagggtctttgccagctaaaaaaagtgatccatttcaaaaagagcaagatcatctggtagaagaggttgccagagcagttttatctgattcaccacagctctctgaaggaaaagaaataaaattagaggaactaattgactctctgggttctaaccccttcttaacaaggaatcagattccccgtactccagaaaacttgataactgaaattaggagctcatggagaaaagctattgaaatggaagaaaacagaactaaagaaccaattcaaatggatgctgaacatagagaagtattgccagaatcattacctgtgttgcacaatcaaagagaatttagcatggctgattttctcttagaaaccactgtatcagattttggccagtctcatttgactgaagagaaagttatttcagattgcgagtgtgtgcctcagaaacatgtgctgaccagtcacatagatgaaccaccaacacaaaatcagtcagatttgttaaataagaaagtaatttgcaagcaagatttggaatgtttagccttcaccaagctttcagaaactagccgaatggagacattctcccctgctgtcggcaataggatagatgtgatgggtggcagtgaagaggagtttatgaaaatattggaccacttagaagtttcttgtaacaaaccttccacaaataaaactatgttgtggaattcttttcagatatcaagtggaattagttctaagagttttaaagataatgattttggcatattacacgaaactctcccggaagaagttggtcatctaagttttaatagttccagtagttcagaggccaattttaaactggagccaaatagtcctatgcatggtggcactcttctagaagatgttgtgggagggagacagactactccagaatcagactttaatttacaggctcttcgcagtagatacgaggctctgaagaaatctctttccaagaaaagggaagaatcttacctctcgaattcccaaacacccgaaagacacaaaccagaattgagccctactccccaaaatgtacaaacagatgatacgcttaactttttggacacctgtgatttgcatactgagcatataaagccatctttacgcacgtccatcggtgaaagaaaacggtctctttcaccactaattaagttttctccagtggaacaaagattgagaaccacaatagcatgtagtcttggagaactacctaatttaaaggaagaagacattttgaataagagccttgatgcaaaagaaccaccgtctgacttgacaagatgaagacgtacccatttaatataactatgatgcacttaaattgaagctatgccacaggatagaaaatgaattacaacttaaatacatgttggaagtgtaacactgtttttcaaggtttaaaaaaattcctaatgccttttagccttctttaatatttttaggtaaggaaagtatgtttggattttttcctctttgtaggtatatgagattgaaatgtgaagtatttggacaacaaacgtcaagcaatgggaagccattttgatttcttgagtaatcttgtaagcattaagtgaatgacaaagtagtagtgtaacttatttcttatgttataacttcagtcaattaatataaggatagtttttgttgtatgttcactaaatggttaatataatagccattgaatatactaatctttcatcttagagaactatacaacttttattgtttcttaatggaacattctggctaaccagaaaaagtgagaaaagtagtaccttgggatgtgtagtcaagatgacaaattttaagactggaaaagctctaaacaggcttaatgattcttcaggtagaatgatcctgagaagtgatgtttgatggaataaagtgcatgtgatgattaagtgaagactggggcagaatgatttaaaaaaaggaaaaagatggaagatgagtagacacttgcaaggaacactgtcaaactataaatccattcagtgggttgtataacatttatatttagtctaatttagactttgataatttaatgctacttttatattttaacaaaaatataaattaaaattttcattagtctgttttgttgttgggtttttttgtgaggtactccctgttgggggaaaggaacaaggaacaaccatcagaatcccccagtccctacagaatagcctcacagtaacttgagaaaactgaacttggggttaaataacttgtcacacttgcagtctcctgcctcactccttcaggtgccctgcctagaaaaagacttgtgtctagcatccaagtgaacacatactattgccctctgtgaaccaggaggaatggaacaggcaatggaagggtgatagtacctacaataccctttgtagaccccatctcactaccatcaaaatcttgtccactagcccccaaaaaactggcaaggaaagaaggtggaggggaaatttatggaagtagatggcttaatagttatttcttttatcttgggctgcctttctctaagttggttgtcctgtcccagtgtgaagacccatctttttgtgagaaaagacaaaagaaagcacatgtaactaccttctttgcaatggaaaaggagaaagaaaaaatcttctcctaagttgctgttttcttttattagttaataaaacaaatcagggactatgcaggtctatggggaaacctttagtctgctttaagaaaactcagtatctgaaaatcttaacttagcatgtgatactgtcttatcagcatctgcagaagtgccaaagccactgctagacacttaatgtgtattatttcatttaattatattttaaatgtgcttccttggtaattcttaagctcgagaaagagtttgagaactgctgctaggaaatagagattcacatttaaccctgtggtacttttaagaagcaggtacgttgttgcatatatacttgggtagagattggtaactatctgatagggaagctcaagttggccacccaagtctgagaaacccttaattactgagaatcaaaagagcagaatgtctgtagacattttggatttgtaaaaatcacattgttgagttatacctgtgatgggctgaaagtttttggcattctttcctgttcttcatatgccagtaccataaacaaaaagtatctcagatctgtcactttcttctcctaaaccaatgtgattgcagctttttgccttcagccttttccctatccagtatctcctacatagttaccttttgatcttaaggaactgttttgattgggtcacttccttgcctaaaattccattgattgttcattgttaattctaaaatagagttcaaatttaaaggcatgtaagttcccctgtaacggatttcctctactcccccttccgctgtaatctcccatttttttactgaaatgcttcagtgagcatgggtctttagaggtcttgatatacaattttcctgaagcaggaataccttgctttcctctactagtttaccacaattacagctctcttttaagcctcagaaaaaaatctcacttccgtcttgaagtcttaatccacgctttttatatccatgtgcctactccttctctgaaatctcctatggtttatctttttattcatttaatatcccacgaattgattttattatatattttttatggttgcatgtggtctttctagttatagcaatatacacatacatgcataaatacatatacacctatgtaaatgtgtgttgggagtatgtattcacacacatacatataccccaaggccatgtgtcatctttatcaatatttaagttttggaattgttttgtttgcctcctatatcatggaataaatggtaaagagggctaatttattactctaagtggatttcttattacattaatatcagacatatagaatgtactttgttttactatttgtaagatacaaaggtatataaactgacatacatcagcttgaaacctgagataatgctaaaatgttctaattattttaaatgtttaaagaggacaaccatgtaatgttgctaaacatgaaaaatgtcatcaagtggaataaagaatagctgaagttaacatttgggggaaattgagctgaaaacaaaaatatgagtattttgataccttttctttaccatgagactcttgactatgaagtcaaatttatctaaaggaaaaacaggaattctggagacctgtgtaaaagcagactattatcttcctactgtgagagtactaaaattaaaatacgtttaatgacgttttcctcaatgtaaaagcattgaagtaaatgtttcttttatgttgcagatacatagttgctctagagatcacctttttctttatgcattgtgaatagcagtctgcatcctaagtttaaaatatttgagaatcctctatgggactctctgtaaatgttttaaatactgttgttttcaataaatattttatactaaaaaaaaaaaaaa

SEQ ID NO: 23859 - DNA, 2980 bp, Homo Sapiens
gcggggcctctaccggcccgatggagcgcgcgggcgctactagccgcgggggccaagcccctggcttcttactgcggcttcatactgagggccgagccgaggcggcgcgggtgcaggagcaggacttacggcagtgggggctgacagggattcacctacgctcttaccagctggagggagtaaactggctcgcccagcgcttccattgtcagaatggctgtatcctgggagatgagatgggcctggggaagacctgccagactattgctctcttcatttatttggcaggaagattaaatgatgaagggccatttctgattctttgtcccttgtctgttttgagcaactggaaagaagaaatgcagagatttgctccaggtctttcctgtgtaacatatgcaggcgacaaggaggaaagagcctgccttcagcaagacctgaaacaggagtcacgttttcatgtgctactgactacctatgagatttgcttgaaagatgcatcatttctaaaatcattcccttggagtgttcttgttgtggatgaagctcacaggttgaaaaaccaaagctccctgctgcataagaccttgtcagagttctcagtagtcttcagtctcctgttgaccggaactcccatccagaacagcctccaagagctctactccctcctcagttttgtggagcctgatctcttttccaaggaagaggtgggagattttattcaacgctaccaggatattgagaaagaatctgagtcagcaagtgaactgcacaaactcttgcagccatttctgctgaggcgagtgaaagctgaggtagctacagagcttcccaagaagacagaagtagtgatataccatggcatgtcagcattgcagaagaaatactacaaggccattttgatgaaagacctagatgcatttgaaaatgagacggcaaagaaggttaaactacagaacattttgtcccagcttcgaaagtgtgtggatcacccatatttgtttgatggtgtggagccggagccttttgaagttggagaccacctgactgaggctagtgggaagcttcacctgctggataagctactagcattcctgtattctgggggccatcgggttttacttttctcccaaatgacccagatgttggatattctccaagactatatggattacagaggctacagctatgagcgtgtggatggttctgtgagaggagaagagagacacttggccattaagaactttggacagcagcccattttcgtttttctcctgagtactagggcaggtggagttggcatgaacttaacagcagcagatactgtgatttttgttgacagtgactttaatcctcagaatgacttgcaagcagctgccagggctcatcgcattggccaaaacaagtctgttaaagttattcggctgattggtcgagacactgtggaagaaatagtctataggaaagcagcctccaaactgcagctcaccaacatgatcatagaaggaggccattttactctgggagcccagaaacccgctgccgatgctgacctccagttgagtgagatactcaaatttggtttggataaactgctggcctctgaggggagcaccatggatgaaatagacctggagtccatcctgggagaaacaaaagatggccagtgggtctctgatgccttgcctgcagcagaaggagggagcagagatcaagaggaaggaaaaaatcatatgtacttatttgaaggtaaagattattctaaagagcccagtaaggaagacagaaaatcatttgaacaactggtaaaccttcagaaaacccttttggagaaagctagtcaagagggccgatcactccgaaataaaggcagtgttctcatcccaggccttgtggagggatctaccaaaaggaagcgggttctgagtccagaagagctggaggacagacagaagaaaagacaagaagcagctgccaagagaaggagactcatagaggagaagaagaggcaaaaggaagaggctgaacataagaaaaagatggcctggtgggaatccaacaattaccagtccttctgcctgccctctgaggagagcgagccagaggaccttgagaatggggaagagagctctgctgagctggattaccaagacccagatgctacttccctcaagtacgttagtggtgatgtcacccaccctcaggctggggccgaggatgctctcattgtgcactgcgtagatgactctggccactggggcagaggtggtttatttacagctctggaaaagcgatccgctgagccaagaaaaatatatgagctggctgggaaaatgaaagacctgagtttgggaggtgtccttttatttcctgttgatgataaagaatcaagaaacaaagggcaagatttgttggccttgattgtggctcagcatcgtgatcgttccaatgtcctgtctggcattaagatggcagccctagaagagggcctgaagaagatatttttagcagcaaaaaagaagaaagcaagtgttcatcttccacgtattggacatgccacgaaaggttttaactggtatggtactgagcgacttattcggaaacatctggctgcaagaggcatcccaacttacatatattattttcctagaagcaagtctgctgtccttcattcacagtcttcatcttcctcctcaagacagctggtgccttaagaattggcccagcctcagatcctgtctttagcaaccagctaatatttacccagaggtactgcaatagagtatttcaaaatggaatcaggatctggtgggcctcagaaattgtctcttttctgagtttcagtttggttctcctggatgttttgctctgttttgatacctgtaatatagggaaacacaactttttttgggaaagccctttgaccccagcttgctagttgcataataataaattttctgttcctaaaaaaaaaaaaaaa

SEQ ID NO: 23860 - DNA, 4115 bp, Homo Sapiens
gaagccgaggaagagcgttttggggacgggggctggtgaggctcacgttggagggcttcgcgtctgcttcggagaccgtaaggatattgatgaccatgagatccctgctcagaacccccttcctgtgtggcctgctctgggccttttgtgccccaggcgccagggctgaggagcctgcagccagcttctcccaacccggcagcatgggcctggataagaacacagtgcacgaccaagagcatatcatggagcatctagaaggtgtcatcaacaaaccagaggcggagatgtcgccacaagaattgcagctccattacttcaaaatgcatgattatgatggcaataatttgcttgatggcttagaactctccacagccatcactcatgtccataaggaggaagggagtgaacaggcaccactaatgagtgaagatgaactgattaacataatagatggtgttttgagagatgatgacaagaacaatgatggatacattgactatgctgaatttgcaaaatcactgcagtagatgttatttggccatctcctggttatatacaaatgtgacccgtgataatgtgattgaacactttagtaatgcaaaataactcatttccaactactgctgcagcattttggtaaaaacctgtagcgattcgttacactggggtgagaagagataagagaaatgaaagagaagagaaatgggacatctaatagtccctaagtgctattaaataccttattggacaagggcttgcttcaagcatctgtattagtctgtattaatgctgctgataaagacgtacccgagactgggaagaaaaagaggtttacttggacttacagttccacatggctggggaggcctcagaatcatggcgggaggtgaaaggcacttcttacatggcagcaagagaaaatgaggaagaagcaaaagtggaaacccctgataagccatcagatcttgtgaaacttattcactatcacaagaatagcatgggaaagactggcccccatgattcaattacctccccttgggtctctcccacaacacgtgggaattctggtagatacaatttcaagttgagatttgggtggggacatagccaaaccatatcattctacccctggcccctccaaatctcatgtcctcactattcaaaaccaatcatgccttcctaacagtcccccaaagtcttaactcttttcagcattaacgcaaaaatccacagtccaaagtctcatctgagacaaggcaagtcccttccacctatgagcctgtaaaatcaaaagcaagctagttacttcctagataccaacaggggtacaggtattgattaaagacggctgttccaaatgggagaaattggccaaaataaaggggttacagggcccatgcaagtccgaaatccagcagggctgtcaaattttaaagttccagaataatctcctttgactccaggtctcacatccaggtcatactgatgcaagaagtgggttcccatggtcttgggcagctctgcccctgtggctttgtagggtacagcctccctcctggctgctttcacggctgttgttcagtgcctgcggcttttccaggtgcacggtgcaagctgttggtggatctaccattctggggtctggaggacggtggccctcttctcacagctccactaggcagtgccccagtagggactctgtgtgggggctcccacaccacatttcccttctgcactgccctagcagaggttctctcccctgccgctgagagggcctctcccctgcagcaaacgtttgcctgggcattgaggcatttccatacatcttctgaaaactaggcggaggtttccaaatctcaattcttgacttctgtgcacctgcaggcttaacagcacatagaagctgccaaggcttggggcttccactctgaagccacagcccgagctgtatgttggcccctttcagccatggctggagtggctgggacacaagacaccaagtccctaggctgcacacacatgtcaggggctgccctgacatggcctggagacattttccccatggtgttggggattaacattaggctccttgctacttatgcaaatttctgcagctggcttgaatttctccccagaaaatgggtttttcttttctattgcatagtcaggctgcaaatttccaaacttttatgctttgcttcccttatttataagggaatgcctttaaaagcacccaagtcacctgttgaacactttgctgcttagaaatttcttccgctagttaacctaaatcatctctctcaagttcaaagttccacaaatccctatggaaggggcaaaatgctgccagtctctttgctaaaacataacaagagtcacctttactccagttcccaacaagttcctcatcttcatctgaggccacctcagcctggactttgttgtccatattgctatcagcatttggggcaaagccattcaacaagtctgtaggaagttccaaactttcccacattttcctgttttcttctgagccctccaaactgttccagcctctgcctgttacccagttccaaagtcacttccacattttgggtatttcttcagcaggtcccaatctactggtaccaatttactgtattagtccgttttcacgctgctgataaagacatacccgagactgggaagaaaaagtggtttaattggacttaaagttccacatggctggggaggcctcagaatcatggtgggaggcaaaagacacttcttacattgtggcaagaaaaaatgaggaagaagcaaaagcagaaacccctgataaactgatcagatctcatgagacttattcactgtcacgagaatagcacgggaaagactggcccccatgattcaattacctccccctgggtctgtcccacaacacgtgggaattctgggagatacaattcaagttgagatttgtggggggacacaaccaaaccatatcagcatcctttcaagaatattagataattggagctgagtactcaggaacttgactgtagtagaatactgctagtttcttaattttaattcacatcacctgaaaagtaaaacaacaggctttgccaagtggatgcttttcagtaacagtgaagtggagtgaataccaaatgtttgccctggtggttcctatctcttcaggcaaacatggtcagtattctgtaaagttcccctggcctaaatgattacttgctctgggcaagtggatatttattaggctatttcaaagccacagcataagaatgtcagcctagccacagagtctgagattctgagttcagcctagccacagagtctaagattctgtatcctctgacattttggaaatgatacactactggcttaagtgatgactctttcagattttcagtattttatacaactactgccacatccttatactttattgcttttctgtcttcttcaacctgggagagaccctgaatttgagtgtgttctctaatcaatagtggtttagctttcttttctatttcactcgtttctagggttttttatttgcagtttaggaactattaggaatgtcaggactttatcagcaggggtaaaactaccacctggcctagcctaagtaggaagtgaaaagataattcaccaaacaatgattaatcagatagaagttctagtcaagagggatattgttgaagttacctcttttagcctagatacatggattcttttcaaatcaggaaagattagaaaaggaacccaaaaaaccctttaacagtgtgaatctttatagtatttgaaaatgagaagaagcagcagattgtaatttggtttattggatgtgatggacgttctgtaatagaaaacctgaaacgatgattgaatgggaaaaagagactacaaaatttgtcgtaggatgtatacagacttattttctttattacagtattataagaaaacatatgtatttgtaaaaatggtttcctgtgtcaagtatttgtgcagtcagagctgacttgtaaactattcttgtaatagctcattattttgaaagatttatatatgatgaattctggatatatgaccaataaaactgatgaagc

SEQ ID NO: 23861 - DNA, 10881 bp, Homo Sapiens
atttctatcgcctatactttatttgggtaaatggtttggctaaggttgtctggtagtaaggccgccggccctcaggtataatacttctccacgtctgcttcaggaaaaaagtgcctgccattcttataatttctaagcaggttcatgccagcccagaacaaagaatcagctggagcccaaatttcaagttttgagtaaaataccttcaagcgaatgggccctattgtgctcacacattcaaaacctgttacccaaggaattccctaaagaattagaagtgcgtctcaccaaccagccaagatgaacatggtgaagaggatcatggggcggccgaggcaggaggagtgcagcccacaagacaacgccttaggactgatgcacctccgccggctcttcacggagttgtgccatcctccccggcacatgactcagaaggaacaagaagagaaactgtatatgatgctgccagtgtttaacagggtttttggaaatgctccgccgaatacaatgacagaaaaattttctgatcttctgcagttcacaacacaagtctcacgactaatggtgacagaaattcgaaggagagcatcaaacaaatccacagaggctgcaagtcgggccatagttcagttcctagagattaatcagagtgaagaagccagtagaggctggatgcttctaacgacaattaatttgttagcttcctctggtcagaaaaccgtggactgcatgacaacaatgtcagtgccttccaccctggttaaatgtttatatctgttttttgaccttccacatgtgcctgaggcagttggaggtgcacagaatgagctacctctagcagaacgtcgaggactactccagaaagtttttgtacagatcttagtgaaactgtgcagttttgtttcccctgcggaggagctggctcagaaagatgatctccagcttctattcagtgcaataacctcttggtgccctccctataacctgccttggagaaagagtgctggagaagtcctcatgaccatatctcgtcatggtcttagtgtcaatgtagtgaagtatattcatgagaaagagtgtttatctacatgtgttcagaatatgcagcaatcagatgacctgtctcccctagaaattgtcgaaatgtttgctgggctttcttgtttcctcaaagattccagcgatgtttcccaaacacttctggatgattttcggatatggcaaggatataattttctttgtgatctcttgcttagattggaacaagcaaaagaggcagaatccaaagatgccttgaaagatctggttaatctgataacttccctaacaacatatggtgtcagtgaactaaaaccagctggtattaccacaggggcaccctttttattgcctggatttgcagtacctcagcctgcaggcaaaggtcacagtgtgagaaacgtccaggcctttgcagttcttcagaatgcatttttaaaagcaaaaaccagcttccttgcccaaatcatccttgatgctatcacaaatatttacatggctgacaatgccaattacttcatcctagagtcacagcacacattgtcacagtttgcagagaagatttctaaactcccagaagtacaaaacaaatactttgagatgctggagtttgttgtttttagcttaaattatataccttgtaaagaacttattagtgtcagtatcctcttaaaatctagctcttcttatcactgtagcattattgcaatgaaaacacttcttaagtttacaagacatgactacatatttaaagacgtgttcagggaggttggccttttggaggtcatggtaaaccttttgcataaatatgctgccctgttgaaggatccaactcaggcactaaatgaacaaggggactcaagaaataatagttcagttgaagaccaaaaacacctggctttattggttatggagaccttgacagtgcttcttcaaggatcaaacacaaatgcaggaatttttcgagaatttggaggtgcaagatgtgcacataatatagtaaagtaccctcaatgccggcagcatgccttgatgactatccaacagctggtgctctccccaaatggggacgatgacatgggcactctcctggggctaatgcattcagccccaccgacggaattgcagttgaagactgatattttaagggccctcctgtcggtccttcgagaaagccatcgttcaagaacagtttttaggaaagttggaggatttgtgtacattacatccttgctcgttgctatggaaagatctttgagctgtccacccaagaatggctgggagaaagtgaaccagaatcaagtgtttgaacttcttcacactgtgttctgcacgttgactgcagcaatgcgctatgagccagccaactctcatttcttcaaaacagagattcagtatgagaagttggcagatgctgttcgatttcttggctgcttctcagacctaagaaaaataagcgccatgaatgtcttcccctcaaatacacagccatttcaaagacttttagaggaagatgtaatctcaatagaatcagtgtcacccacgttacggcactgcagtaaactttttatttatctttacaaagtagccacagattcttttgacagtcgtgcagaacagatccctccttgcctgacaagtgagtcttctctcccctctccttggggtacaccagctttgtccaggaaaaggcatgcatatcattctgtttcaactccccctgtttaccctcctaaaaatgttgccgacctgaaactacatgtgacaacttcatctctgcagagttctgatgcagtcatcattcatcctggagccatgcttgccatgctggacctactggcctctgttgggtcagtgacacagccagaacatgctttggatcttcaacttgccgtggcaaatattttacaatccctggtgcacacagaaaggaaccagcaagtcatgtgtgaagctggtcttcatgcacgactgctgcagaggtgcagtgctgcattggctgatgaggaccactcactgcacccgcccctgcagcggatgtttgaacgattagcctctcaggctctggaacccatggtgttgagggagtttttacgtttggcaagtcctttaaattgtggtgcctgggacaaaaaactgctaaaacaatatagggtccacaaaccaagttcactgagttatgaaccagaaatgagaagtagtatgatcacatctctggaaggtctgggtactgataatgtttttagcttacatgaagataaccattaccggataagcaagagcctggtaaaatctgcggaaggaagtactgtacccctgaccagggtgaagtgtctggtctccatgacaaccccacatgacatcagacttcatgggtcatcagttactccagcttttgttgaatttgacacatcacttgaagggtttggatgtctttttttgcccagtttggcccctcataatgctcctacaaataataccgtcacaacaggtcttattgatggggctgtggtcagtggcattggttctggtgaaagattcttccctcctccctccggcttaagttactctagctggttttgtattgaacattttagttctcctccaaataaccaccctgtcagacttcttactgttgtgcgccgagcaaattcttctgagcaacattacgtgtgccttgcaatagttctatcagcaaaagaccgatctctgattgtttccaccaaagaggaactcctccaaaattatgttgatgattttagtgaagagtcctcattttatgaaattctcccatgctgtgctcgctttcgatgtggagagcttatcattgagggacagtggcatcatttggtcctggtaatgagcaaaggcatgttgaaaaacagtactgcagccctttatattgatggacagcttgttaacactgtaaagcttcattatgtccacagtactccagggggttcaggttcggcaaatccaccagtggtgagcacggtctatgcctacattggtactccacctgcccaacgccaaattgcctcattggtttggcgcctgggacccacacattttctagaagaagttttaccttcttcaaatgttactaccatttatgaacttggaccaaattatgttggaagctttcaggctgtatgtatgccatgtaaagatgcaaaatccgaaggggtggtgccatcccctgtgtcattagtaccagaggagaaagtgtcatttggcctctatgcactctctgtgtcgtctctaacagtggcaagaatccggaaagtgtataacaaattggatagcaaagccattgctaagcagttaggcatttcctcacatgagaatgccactcctgtgaagttgatacacaattcagcaggacatcttaatggatctgcacggacaattggggccgctctgattggatacttgggagtaagaacatttgtccctaagcctgttgccactactttgcagtacgttggtggagctgcagccatcctgggcctggtggccatggcctctgatgtggaagggttatatgcagcagtcaaggccctggtttgtgtggtcaagagtaacccactagccagcaaagaaatggaaagaatcaagggctaccagttgctggcaatgttgcttaagaagaaacgttcccttcttaacagccacatcctccatctaactttttctttggtgggaactgttgatagtggacatgagacctccattattccaaattcaactgctttccaggacctcctctgtgattttgaagtctggctccatgcaccatatgaacttcatctttccttatttgaacactttattgaactgctcacagagtccagtgaagcctcaaagaatgccaaattaatgagagaattccagttaatcccaaagctgctcctgactcttcgagatatgtctttatcccagcctactattgctgctattagtaatgtcctgagcttcttactgcaaggttttcctagcagcaatgatctgctcagatttgggcagtttatttcttctactttgccaacctttgcggtttgtgagaaatttgtagtaatggaaataaataatgaagagaagcttgacactggaactgaagaggagtttggaggtcttgtatcagctaatcttatacttttgaggaacagacttctggatatcttgctaaaactaatttatacatctaaagaaaagacaagcattaatttgcaagcttgtgaagaactggtgaagacactgggttttgactggatcatgatgtttatggaggaacacttacattccaccacagttacagcagccatgaggattcttgttgtcctactaagtaatcagtctattctcatcaagtttaaagaaggactcagtggtggaggatggcttgaacagacagattctgtcttaactaataagattggaactgtattaggattcaacgtgggcagaagtgctggtgggagatcgacggtcagggagattaaccgagatgcttgtcattttcctggttttccagtccttcagtcattccttcctaaacacactaatgtccctgccctctattttctcctcatggccttgtttctgcagcagccagttagtgagctgcctgagaacctgcaggtcagtgtgcctgtcatcagctgccggagtaagcagggttgccagtttgatttggattccatttggacattcatctttggagttcctgcctccagcggaactgtggtctcttctatccataacgtatgcacagaagctgtttttttattattgggaatgctccgcagcatgctgacttcaccttggcaatcagaagaagagggatcttggctccgagaatatcctgtgaccctgatgcagttcttcagatatttgtatcacaacgtgccagaccttgcctccatgtggatgagccctgacttcctgtgtgcattagcagccaccgtcttccccttcaatattcgcccttactcagagatggtgactgaccttgatgatgaagttggatctccagcagaagagtttaaagcgtttgcagcagacacagggatgaacaggagccaatcagagtactgcaatgtgggcaccaagacatatctgaccaatcacccggctaaaaagttcgtttttgacttcatgcgggtcttaatcatagacaacctctgtctcactcctgccagcaagcaaactccactaattgatcttttgttggaggcttcccctgaaaggtctacaagaactcagcaaaaagaatttcaaacttacattttggatagcgtgatggaccatttgcttgcagctgatgtgttattaggggaagatgcatctctgcctattaccagtggaggaagctaccaggtattggtgaacaatgtgttttatttcacacagcgtgtggtggacaagctttggcaaggcatgttcaacaaagaatctaaacttcttatagattttataattcaactaattgcacagtcaaagagaagatcacagggattgtcactggatgcagtgtatcattgcctcaataggaccatcttgtaccagttctcacgggcacacaaaaccgttcctcagcaagtagctctgcttgattcactcagggtcctcactgtaaacagaaacttgatcctgggacctgggaaccatgaccaagaattcattagctgtctggcccactgcttgataaatctacatgttggaagcaacgtggatggatttggactggaagcagaagcccgcatgaccacatggcacattatgatcccctcggacattgaaccagatggtagttacagccaagatattagtgaagggcgtcagcttctcataaaagctgtcaacagagtttggactgaactgatacatagtaagaaacaagtcttagaggaacttttcaaagtaactctacctgtgaatgaaaggggccacgtggacatagctacagcaaggccactcattgaagaagctgccctgaagtgctggcagaatcatttggcccatgaaaagaaatgcataagtcgaggagaagctttagcgcccaccacacagtccaaattatcccgtgtcagcagtggctttggtctttccaagttaacaggatcaagaaggaatcgaaaagaaagtggtcttaataaacacagtctttccacccaggagatttcgcagtggatgtttactcacattgctgttgttcgtgacttagtagatacacaatataaagaatatcaggagcgtcagcagaatgccctgaagtacgtgacagaagagtggtgtcagatcgagtgcgagctgttgagggagcgggggctgtggggccctcccatcggctcccacctcgacaagtggatgctggagatgacagaagggccctgcaggatgaggaaaaagatggtgcgaaatgatatgttttataaccattacccttacgtgccagaaactgagcaagagacaaatgtggcgtctgagatcccaagtaaacagcctgagacacccgatgatattcctcaaaagaaacctgctcgatatagaagagccgtaagttatgacagtaaagagtactacatgcgactggcctctggcaatcccgccattgtccaagacgccattgtggagagttcagaaggtgaagctgctcagcaagaaccagagcatggggaagacactattgctaaagtcaaaggtttggtcaagcctcctctaaaacgctcccgatctgcacctgatggaggagatgaggagaaccaggagcagctacaagaccagattgctgagggcagctccatagaagaggaggagaaaacagataatgctaccttactgcgcctgttagaggaaggagaaaagatccaacacatgtaccgctgtgctcgagtccagggcctagataccagtgaggggctccttctttttggtaaagagcatttttatgtgattgatggatttaccatgacagcaaccagggaaataagagatattgaaaccttacctccaaatatgcatgagcctattattcctagaggagccaggcaaggccctagtcaactcaagagaacatgcagcatttttgcatatgaagatatcaaggaagttcataaaaggagatatctcctgcagcctattgctgtggaagttttctctggagatggacggaattacctccttgcttttcagaaaggaatcagaaacaaagtctatcaaaggtttttggctgtagtgccatctctaacggacagttcagaatctgtatctgggcaacgaccaaacacgagtgtggagcagggatctgggttacttagcactttggttggagagaagtctgtgactcagagatgggagagaggtgaaatcagcaacttccaatatttgatgcatttgaacactttggctggcagatcatataatgatctcatgcagtatcctgtcttcccctggatccttgcagattatgactcagaggaggtggatcttactaatcccaagacgtttagaaacctggctaagccaatgggagcacaaacagatgaacgattagctcagtataagaagcggtataaagactgggaggatcctaatggagaaactcctgcataccactatgggacccactattcatctgcaatgattgtggcctcataccttgtaaggatggagcctttcacacagatattcttaaggctacagggtggccactttgacctggctgaccggatgtttcacagtgtgcgcgaggcctggtattcagcgtcaaagcacaatatggcagatgtaaaagaacttatcccagagttcttttatttaccagaattcctgttcaattccaacaactttgatctaggctgtaaacaaaatggcaccaagcttggagatgttatccttccaccctgggcaaaaggggacccacgagaattcatcagagtccatcgtgaggctttggagtgtgattacgtgagtgcccatctacatgagtggattgacttaatcttcggttataaacagcaaggccctgctgcagtagaagctgtaaatgtcttccatcatcttttttatgagggtcaagtggatatctacaccatcaatgacccactaaaggagacagccacaattgggttcattaataacttcggtcagatccctaaacagttatttaaaaaacctcatccaccaaagcgagtgagaagtcgactcaatggagacaatgcaggaatctctgtcctaccaggatctacaagtgacaagatcttttttcatcatctagacaacttgaggccttctctaacacctgtaaaagaactcaaagaacctgtaggacaaatcgtatgtacagataaaggtattcttgcggtggaacagaataaggttcttatcccaccaacctggaataaaacttttgcttggggctatgcagacctcagttgcagactgggaacctatgagtcagacaaggccatgactgtttatgaatgcttgtctgagtggggccagattctctgtgcaatctgccccaaccccaagctggtcatcacgggtggaacaagcacggttgtgtgtgtgtgggagatgggcacctccaaagaaaaggccaagaccgtcaccctcaaacaggccttactgggccacactgataccgtcacctgcgccacagcatcattagcctatcacataattgtcagtgggtcccgtgatcgaacctgtatcatttgggatttgaacaaactgtcatttctaacccagcttcgagggcatcgagctccagtttctgctctttgtatcaatgaattaacaggggacattgtgtcctgcgctggcacatatatccatgtgtggagcatcaatgggaaccctatcgtgagtgtcaacacgttcacaggtaggagccagcagatcatctgctgctgcatgtcggagatgaacgaatgggacacgcagaacgtcatagtgacaggacactcagatggagtggttcggttttggagaatggaatttttgcaagttcctgaaacaccagctcctgagcctgctgaagtcctagaaatgcaggaagactgtccagaagcacaaatagggcaggaagcccaagacgaggacagcagtgattcagaagcagatgagcagagcatcagccaggaccctaaggacactccaagccaacccagcagcaccagccacaggccccgggcagcctcctgccgcgcaacagccgcctggtgtactgacagtggctctgacgactccagacgctggtccgaccagctcagtctagatgagaaagacggcttcatatttgtgaactattcagagggccagaccagagcccatctgcagggcccccttagccacccccaccccaatcccattgaggtgcggaattacagcagattgaaacctgggtaccgatgggaacggcagctggtgttcaggagtaagctgactatgcacacagcctttgatcgaaaggacaatgcacacccagctgaggtcactgccttgggcatctccaaggatcacagtaggatcctcgttggtgacagtcgaggccgagttttcagctggtctgtgagtgaccagccaggccgttctgctgctgatcactgggtgaaggatgaaggtggtgacagctgctcaggctgctcggtgaggttttcactcacagaaagacgacaccattgcaggaactgtggtcagctcttctgccagaagtgcagtcgctttcaatctgaaatcaaacgcttgaaaatctcatccccggtgcgtgtttgtcagaactgttattataacttacagcatgagagaggttcagaagatgggcctcgaaattgttga

SEQ ID NO: 23862 - DNA, 4575 bp, Homo Sapiens
tgccgggatccaggtctccggggtccgctttggccagaggcgcggaaggaagcagtgcccggcgacactgcacccatcccggctgcttttgctgcgccctctcagcttcccaagaaaggcatcgtcatgtgatcatcacctaagaactagaacatcagcaggccctagaagcctcactcttgcccctccctttaatatctcaaaggatgacacttctgtggtgtgtagtgagtctctacttttatggaatcctgcaaagtgatgcctcagaacgctgcgatgactggggactagacaccatgaggcaaatccaagtgtttgaagatgagccagctcgcatcaagtgcccactctttgaacacttcttgaaattcaactacagcacagcccattcagctggccttactctgatctggtattggactaggcaggaccgggaccttgaggagccaattaacttccgcctccccgagaaccgcattagtaaggagaaagatgtgctgtggttccggcccactctcctcaatgacactggcaactatacctgcatgttaaggaacactacatattgcagcaaagttgcatttcccttggaagttgttcaaaaagacagctgtttcaattcccccatgaaactcccagtgcataaactgtatatagaatatggcattcagaggatcacttgtccaaatgtagatggatattttccttccagtgtcaaaccgactatcacttggtatatgggctgttataaaatacagaattttaataatgtaatacccgaaggtatgaacttgagtttcctcattgccttaatttcaaataatggaaattacacatgtgttgttacatatccagaaaatggacgtacgtttcatctcaccaggactctgactgtaaaggtagtaggctctccaaaaaatgcagtgccccctgtgatccattcacctaatgatcatgtggtctatgagaaagaaccaggagaggagctactcattccctgtacggtctattttagttttctgatggattctcgcaatgaggtttggtggaccattgatggaaaaaaacctgatgacatcactattgatgtcaccattaacgaaagtgccagctccaagatacacagtggaactggcttgtggttttggagccacagtcctgctagtggtgattctcattgttgtttaccatgtttactggctagagatggtcctattttaccgggctcattttggaacagatgaaaccattttagatggaaaagagtatgatatttatgtatcctatgcaaggaatgcggaagaagaagaatttgtattactgaccctccgtggagttttggagaatgaatttggatacaagctgtgcatctttgaccgagacagtctgcctgggggaattgtcacagatgagactttgagcttcattcagaaaagcagacgcctcctggttgttctaagccccaactacgtgctccagggaacccaagccctcctggagctcaaggctggcctagaaaatatggcctctcggggcaacatcaacgtcattttagtacagtacaaagctgtgaaggaaacgaaggtgaaagagctgaagagggctaagacggtgctcacggtcattaaatggaaaggggaaaaatccaagtatccacagggcaggttctggaagcagctgcaggtggccatgccagtgaagaaaagtcccaggcggtctagcagtgatgagcagggcctctcgtattcatctttgaaaaatgtatgaaaggaataatgaaaagggtaaaaagaacaaggggtgctccaggaagaaagagtccccccagtcttcattcgcagtttatggtttcataggcaaaaataatggtctaagcctcccaatagggataaatttagggtgactgtgtggctgactattctgcttcctcaggcaacactaaagtttagaaagatatcatcaacgttctgtcaccagtctctgatgccactatgttctttgcaggcaaagacttgttcaatgcgaatttccccttctacattgtctatccctgtttttatatgtctccattctttttaaaatcttaacatatggagcagcctttcctatgaatttaaatatgcctttaaaataagtcactgttgacagggtcatgagtttccgagtatagttttctttttatcttttttactcgtccgttgaaaagataatcaaggcctacattttagctgaggataatgaacttttttcctcattcggctgtataatacataaccacagcaagactgacatccacttaggatgatacaaagcagtgtaactgaaaatgtttcttttaattgatttaaaggacttgtcttctataccacccttgtcctcatctcaggtaatttatgaaatctatgtaaacttgaaaaatatttcttaatttttgtttttgctccagtcaattcctgattatccacaggtcaacccacattttttcattccttctccctatctgcttatatcgcattgctcatttagagtttgcaggaggctccatactaggttcagtctgaaagaaatctcctaatggtgctatagagagggaggtaacagaaagactcttttagggcatttttctgactcatgaaaagagcacagaaaaggatgtttggcaatttgtcttttaagtcttaaccttgctaatgtgaatactgggaaagtgattttttctcactcgtttttgttgctccattgtaaagggcggaggtcagtcttagtggccttgagagttgcttttggcattaatattctaagagaattaactgtatttcctgtcacctattcactagtgcaggaaatatacttgctccaaataagtcagtatgagaagtcactgtcaatgaaagttgttttgtttgttttcagtaatattttgctgtttttaagacttggaaaactaagtgcagagtttacagagtggtaaatatctatgttacatgtagattatacatatatatacacacgtgtatatgagatatatatcttatatctccacaaacacaaattatatatatacatatccacacacatacattacatatatctgtgtatataaatccacatgcacatgaaatatatatatatatataatttgtgtgtgtgtatgtgtatgtatatgactttaaatagctatgggtacaatattaaaaaccactggaactcttgtccagtttttaaattatgtttttactggaatgtttttgtgtcagtgttttctgtacatattatttgttaattcacagctcacagagtgatagttgtcatagttcttgccttccctaagtttatataaataacttaagtattgctacagtttatctaggttgcagtggcatctgctgtgcacagagcttccatggtcactgctaagcagtagccagccatcgggcattaattgatttcctactatattcccagcagacacatttagaaactaagctatgttaacctcagtgctcaactatttgaactgttgagtgataaaggaaacaaatataactgtaaatgaatcttggtatcctgtgaaacagaataattcgtaatttaagaaagcccttatcccggtaacatgaatgttgatgaacaaatgtaaaattatatcctatatttaagtacccataataaatcatttccctctataagtgttattgattattttaaattgaaaaaagtttcacttggatgaaaaaagtagaaaagtaggtcattcttggatctacttttttttagccttattaatatttttccctattagaaaccacaattactccctctattaacccttcacttactagaccagaaaagaacttattccagataagctttgaatatcaattcttacataaactttaggcaaacagggaatagtctagtcaccaaaggaccattctcttgccaatgctgcattccttttgcacttttggattccatatttatcccaaatgctgttgggcacccctagaaataccttgatgttttttctatttatatgcctgcctttggtacttaattttacaaatgctgtaatataaagcatatcaagtttatgtgatacgtatcattgcaagagaatttgtttcaagatttttttttaatgttccagaagatggccaatagagaacattcaagggaaatggggaaacataatttagagaacaagaacaaaccatgtctcaaatttttttaaaaaaaattaatggttttaaatatatgctatagggacgttccatgcccaggttaacaaagaactgtgatatatagagtgtctaattacaaaatcatatacgatttatttaattctcttctgtattgtaacttagatgattcccaaggactctaataaaaaatcacttcattgtatttggaaacaaaaacatcattcattaattacttattttctttccataggttttaatattttgagagtgtcttttttatttcattcatgaacttttgtatttttcatttttcatttgatttgtaaatttacttatgttaaaaataaaccatttattttcagctttg

SEQ ID NO: 23863 - DNA, 2744 bp, Homo Sapiens
gccggacagacccagttgcctggtgctgcggcccggcgtgggcctcgtgggcagagccagagccagagccatggacagcctcttcgtggaggaggtggccgcctccttggtcagggagttcctcagcagaaagggcttaaagaagacatgtgtgaccatggaccaggaacgcccacgctctgacctcagcataaacaacagaaatgatcttcgaaaggttttgcatcttgaatttctctataaggagaacaaggcaaaggaaaatcctctaaaaacaagccttgaactcatcaccagatactttctggatcactttggaaatacggctaacaatttcactcaagataccccaatccctgcactctcagttccaaagaaaaataacaaagtgccatcaagatgctcagagactacactggtaaatatatatgacctttcagatgaagatgcaggatggagaacatcattgtcagaaacaagcaaagccagacatgacaatcttgatggagatgtacttggtaattttgtatcatctaaaaggcccccgcacaaaagtaagcccatgcagacggtcccgggtgaaactcctgtgttgacttctgcatgggagaagatagacaagcttcactcggagccttccttggatgtgaagaggatgggagagaattccaggccaaagtctggtctgattgtgcgaggaatgatgtctgggcccatcgccagctccccacaggattcttttcacagacactatctgagacggtcctcaccgtcaagcagctccacccaaccccaagaagagagcgggaaggtccctgagctctttgtctgcacccaacaggacattctggcttcgagcaacagctccccctccaggrcctccctgggtcagcttagtgaactgaccgtagaaaggcagaaaaccactgccagcagccctccccatctgcccagcaaacggctgcccccatgggacagggccaggccgagggatccctccgaggacaccccagcagtggacggcagcacagacacggacaggatgcccttgaagctctacttgcctggtggtaattccaggatgacccaggagaggctggaaagagcgttcaaacggcagggcagccagcccgcacctgtcaggaaaaatcagttgctgccgtctgacaaggtggatggtgagctgggtgccctgcggctcgaggatgtggaggatgagttgataagggaagaggtcatcctgtcgccagtcccatcagtgctcaagttgcagacagcatcaaaaccaattgacctctcagtagcaaaggaaataaagacccttctgtttggttccagcttttgctgtttcaatgaagaatggaaacttcagagtttttcctttagtaacacagcctcattaaaatacggcatagtgcagaacaagggtggtccttgcggagtcctggcagctgtccaaggctgtgtcctacagaaactcctgtttgaaggagatagcaaagccgactgtgctcaggcactgcagccttcagatgcccaccggacccgctgcctcgtcctggccctcgcagacattgtgtggcgggcagggggccgagagagagccgttgttgcactggcttcgagaacacagcagttcagtccaacagggaaatacaaagcagatggagtcttagaaacacttacgcttcacagtttgacctgctatgaggacctggtgacttttcttcaacaaagcattcatcagtttgaagtgggcccctatggctgcatcctgctcaccctttctgccatcctgtccaggtctacagagctcatccgccaggactttgatgtccccaccagccacctgattggagcacatggctactgtacacaggaacttgtcaatctgctcctaactgggaaagctgtgtccaaacgttttcaacgatgtggttgagctggattctggggatgggaacttcacacttctcagaggcattgctgcacgcagtgatattggcttcttttctctctttgagcattacaacatgtgccaggttggctgcttcctgaagaccccgaggttccccatctgggtggtttgcagtgagagccacttcagcatcctctttagcctgcagccggggctcctgcgtgactggaggactgagaggctctttkacttgtactactacgatggcctggccaaccagcaggagcagatccggctgaccattgacaccacccaaaccatctctgaggacacagacaacgaccttgtcccacccctcgagctctgcatcagaaccaagtggaagggggcatcagtgaactggaacggctcagaccccatcctgtgaccgttggatgtgggtaaaccctgtggtccaccactcatcacctcatcaccgaggatgacagctgaaccccaagcctctggggcaggtctcatgtaccccaacctgggtcagcatgactgcagaagcatccagagcctccctgccccttccatgaagggcccacccaagactgtgctggggacccagtgtgttgctgggtcccctcccagctgagctgtgactgctgagtactggaaggaggttgccagggtctctgctacctttgtctgcatccctcccttgctccctgctgggtggtccctcacccaggcctccaatgtggttggccctggggactcattacttctggtagctggctttctataaaaatgggtcaaacccaaaaaaaaaaaaaaaaaa

SEQ ID NO: 23864 - DNA, 1008 bp, Homo Sapiens
agagacaaggactgtggtagcagcagcttctctttaaagctggaaggggccccaggttccttcttggattgaaatagaaacacacgtggccacaactcaattctccatgcgtgtctcctttcagctacaccgaggtctccactgaggtcaaccagatatgtcccctggaaactggaagaccacaatggtggtccggggtatcctgttgatcctgtatggattgcttctgcagccggagccaggaacaggtatgggggaccctcatcttgctgcagaggctggagcctgcacaccctcagctgcagggcatgagccaagaacagctggcgcaggtggccacccatgccgccaaggagttcactgaggccttcctaggatgcccagccatccacccacgttgccgctggggcgcggcaccataccggggtagcccaaagccactgaagctgccacttgggttcttgtatatacatcacacatatgtgcccgcccgaccctgcacggacttcgcgctctgcgccgccaacatgcgctctatgcagcgcttccacctggatacgcaaggctgggacgacattggctacagtttcgtggtgggctcagatggctacgtgtacgagggccgtggctggcactgggtgggcgcgcacacacgtgaccacaactcccgcggtttcggcgtggccttgataggcaactacactgcggagctgccttctgaggccgcgctgcgcgcggtgcgagatgagctcccgcactgcgctgtgcgcgccggcctcctgcagccagactatgcgctgctcggccaccgccagctcgtgcgcactgactgccctggcgacgcgctcttcaacatgctgcgcacctggccacgcttcaacatgaatgtgaaaccaagaactgccaggagggcctcagggagatccaaaaggaggctacctctaatgatcccactagccacagacctccaataaagaaagtttgtgtccatgaattaaaaaaaaaaaa

SEQ ID NO: 23865 - DNA, 3863 bp, Homo Sapiens
gcaagatgctgcccgtgtaccaggaggtgaagcccaacccgctgcaggacgcgaacctctgctcacgcgtgttcttctggtggctcaatcccttgtttaaaattggccataaacggagattagaggaagatgatatgtattcagtgctgccagaagaccgctcacagcaccttggagaggagttgcaagggttctgggataaagaagttttaagagctgagaatgacgcacagaagccttctttaacaagagcaatcataaagtgttactggaaatcttatttagttttgggaatttttacgttaattgaggaaagtgccaaagtaatccagcccatatttttgggaaaaattattaattattttgaaaattatgatcccatggattctgtggctttgaacacagcgtacgcctatgccacggtgctgactttttgcacgctcattttggctatactgcatcacttatatttttatcacgttcagtgtgctgggatgaggttacgagtagccatgtgccatatgatttatcggaaggcacttcgtcttagtaacatggccatggggaagacaaccacaggccagatagtcaatctgctgtccaatgatgtgaacaagtttgatcaggtgacagtgttcttacacttcctgtgggcaggaccactgcaggcgatcgcagtgactgccctactctggatggagataggaatatcgtgccttgctgggatggcagttctaatcattctcctgcccttgcaaagctgttttgggaagttgttctcatcactgaggagtaaaactgcaactttcacggatgccaggatcaggaccatgaatgaagttataactggtataaggataataaaaatgtacgcctgggaaaagtcattttcaaatcttattaccaatttgagaaagaaggagatttccaagattctgagaagttcctgcctcagagggatgaatttggcttcatttttcagtgcaagcaaaatcatcgtgtttgtgaccttcaccacctacgtgctcctcggcagtgtgatcacagccagccgcgtgttcgtggcagtgacgctgtatggggctgtgcggctgacggttaccctcttcttcccctcagccattgagagggtgtcagaggcaatcgtcagcatccgaagaatccagacctttttgctacttgatgagatatcacagcgcaaccgtcagctgccgtcagatggtaaaaagatggtgcatgtgcaggattttactgctttttgggataaggcatcagagaccccaactctacaaggcctttcctttactgtcagacctggcgaattgttagctgtggtcggccccgtgggagcagggaagtcatcactgttaagtgccgtgctcggggaattggccccaagtcacgggctggtcagcgtgcatggaagaattgcctatgtgtctcagcagccctgggtgttctcgggaactctgaggagtaatattttatttgggaagaaatacgaaaaggaacgatatgaaaaagtcataaaggcttgtgctctgaaaaaggatttacagctgttggaggatggtgatctgactgtgataggagatcggggaaccacgctgagtggagggcagaaagcacgggtaaaccttgcaagagcagtgtatcaagatgctgacatctatctcctggacgatcctctcagtgcagtagatgcggaagttagcagacacttgttcgaactgtgtatttgtcaaattttgcatgagaagatcacaattttagtgactcatcagttgcagtacctcaaagctgcaagtcagattctgatattgaaagatggtaaaatggtgcagaaggggacttacactgagttcctaaaatctggtatagattttggctcccttttaaagaaggataatgaggaaagtgaacaacctccagttccaggaactcccacactaaggaatcgtaccttctcagagtcttcggtttggtctcaacaatcttctagaccctccttgaaagatggtgctctggagagccaagatgttgcctatgtgcttcaagattggtggctttcatactgggcaaacaaacaaagtatgctaaatgtcactgtaaatggaggaggaaatgtaaccgagaagctagatcttaactggtacttaggaatttattcaggtttaactgtagctaccgttctttttggcatagcaagatctctattggtattctacgtccttgttaactcttcacaaactttgcacaacaaaatgtttgagtcaattctgaaagctccggtattattctttgatagaaatccaataggaagaattttaaatcgtttctccaaagacattggacacttggatgatttgctgccgctgacgtttttagatttcatccagacattgctacaagtggttggtgtggtctctgtggctgtggccgtgattccttggatcgcaatacccttggttccccttggaatcattttcatttttcttcggcgatattttttggaaacgtcaagagatgtgaagcgcctggaatctacaactcggagtccagtgttttcccacttgtcatcttctctccaggggctctggaccatccgggcatacaaagcagaagagaggtgtcaggaactgtttgatgcacaccaggatttacattcagaggcttggttcttgtttttgacaacgtcccgctggttcgccgtccgtctggatgccatctgtgccatgtttgtcatcatcgttgcctttgggtccctgattctggcaaaaactctggatgccgggcaggttggtttggcactgtcctatgccctcacgctcatggggatgtttcagtggtgtgttcgacaaagtgctgaagttgagaatatgatgatctcagtagaaagggtcattgaatacacagaccttgaaaaagaagcaccttgggaatatcagaaacgcccaccaccagcctggccccatgaaggagtgataatctttgacaatgtgaacttcatgtacagtccaggtgggcctctggtactgaagcatctgacagcactcattaaatcacaagaaaaggttggcattgtgggaagaaccggagctggaaaaagttccctcatctcagccctttttagattgtcagaacccgaaggtaaaatttggattgataagatcttgacaactgaaattggacttcacgatttaaggaagaaaatgtcaatcatacctcaggaacctgttttgttcactggaacaatgaggaaaaacctggatccctttaatgagcacacggatgaggaactgtggaatgccttacaagaggtacaacttaaagaaaccattgaagatcttcctggtaaaatggatactgaattagcagaatcaggatccaattttagtgttggacaaagacaactggtgtgccttgccagggcaattctcaggaaaaatcagatattgattattgatgaagcgacggcaaatgtggatccaagaactgatgagttaatacaaaaaaaaatccgggagaaatttgcccactgcaccgtgctaaccattgcacacagattgaacaccattattgacagcgacaagataatggttttagattcaggaagactgaaagaatatgatgagccgtatgttttgctgcaaaataaagagagcctattttacaagatggtgcaacaactgggcaaggcagaagccgctgccctcactgaaacagcaaaacaggtatacttcaaaagaaattatccacatattggtcacactgaccacatggttacaaacacttccaatggacagccctcgaccttaactattttcgagacagcactgtgaatccaaccaaaatgtcaagtc

SEQ ID NO: 23866 - DNA, 999 bp, Homo Sapiens
acaaggagagagttgtctcctgacgcccaaaatggcagctaaaatggagataactttaagctccaacactgaagcttcctccaagcaagagagacacataatagccaaactagaagagaaacggggccctcctctgcaaaaaaactgcccagatcctgagctctgccgccagagcttcagacgcttttgttatcaagaggtgtctggaccccaagaggcgctctcccagctccgacagctctgccgtcagtggttgcaacccgagctgcacaccaaggagcagattttggagcttctggtgatggagcagttcctgaccatcctgcccccggagatccaggctcgggtcaggcatcgatgtccaatgagcagcaaggagattgtgaccctcgtggaagattttcacagagcatccaagaaaccaaagcagtgggtggccgtttgtatgcaggggcaaaaggtgctcttggagaaaactggatctcagcttggagaacaggaactgccagactttcaaccgcagactcctaggagagatctcagggagagctctccagcagagccttcccaggcaggagcttatgaccggctgagcccccatcattgggagaaatccccactcctccaagaaccaacccccaaattggtggacaggtaaacactctgccttttctctccctctcatcagccctttatctccatcaatgtatctcatggttctgcaaaggcatagaccacatgtgtgtgtttttttaaatgttatatataatagtagatgattattcactaaacaaaattcactaattaggatggtggtgatactacaagtaagtatgtttttatcgttttctgttaatgaaaatttaagaatccagtgcatgacagggttgacctacttttctgtccgtttcagaacttcttatagaaaagacagatccaaatatggccacagatgaacttccatgcaagctatggctgagtttcaatgcttaaaatgct

SEQ ID NO: 23867 - DNA, 2821 bp, Homo Sapiens
gaaggagtggacccaacctggccgcgccgcagaagtggctcccgaggaagccggcgccggggccgccgcctcgtgtcccctcggggcgcagtgctcgggggtcggcgggccagagccgaggcgcggccggggagccgggggctgcggggccgagcgggcagccgcgcgagggggcgggcgctcggcgacccgggggccggccgggctgagccccgcgccccgggacgcgggctggaagcgacggaggagtgctgccgcgggctgcggaccagcgccgtcccctcacggagcggggattctgctatgacagttgggctccccggagggttaacctgggtgtcctcggcaaagttgtcgccgagccgggagcccgtgtaggggccgcggcgccgcggctcggggggcggccgggcggccggcggcggtcgtggctcggcggggcccgcgcggccggggggctcctgggggtgtgcgcccccagccggctgccctcgtggatgcctcccggcggcggcgggcccatgaaagactgcgagtacagccagatcagcacccacagctcctcccccatggagtcgccccacaagaagaagaaaatcgcggcccggaggaaatgggaggtgttcccgggaagaaacaagttcttctgtaacgggaggatcatgatggcccggcagacgggcgtcttctacctgacgctcgtcctcatcctggtcactagcggactcttcttcgccttcgactgtccgtacctggcggtgaaaatcacccctgccatccctgcagtcgctggcatcctgttcttctttgtgatggggaccctgctccgcaccagcttcagcgaccccggagtcctcccacgagccacgcctgatgaagccgccgatctggaaaggcaaatagatatcgcaaacggcaccagttcaggggggtaccgcccgcctcccagaaccaaagaagtcatcatcaatggccagaccgtgaaacttaaatactgtttcacctgcaagattttccggccccctcgcgcctcccattgcagcctttgtgataactgcgtagaacggtttgatcaccactgtccctgggtaggcaactgtgtggggaaaagaaactacagatttttttatatgtttattttatctctgtcttttctgacagtctttatatttgcattcgttatcacccacgtcattcttcgttcacagcaaacaggattcctaaatgcccttaaggacagtcctgcaagcgtcctggaggctgtggtgtgcttcttctctgtctggtccatcgttggcctctcaggattccacacctacttgatcagctccaaccagacaacaaatgaggacattaaaggatcctggtcaaataaaagaggtaaagaaaattacaatccctacagctacggaaatatctttaccaactgctgtgttgccctgtgtgggcccatctcaccaagcctgatcgacagaagagggtacatccagcccgacacgccgcagccagcagcaccctccaatggcatcaccatgtacggggccacgcagtcacagagtgacatgtgcgaccaagaccagtgcattcagagcaccaaattcgttttgcaggctgcagccacgcccctgctgcagagcgagcccagcctcaccagcgacgagctgcacctgcccgggaagcctggcctgggcacgccctgcgccagcctcacactgggcccgcccacaccgcccgcctccatgcccaacctcgccgaggccacgctcgcggacgtgatgccccggaaagatgagcacatgggccaccagttcctgacgcccgatgaggcgccctcgccccccaggctactggcggcgggcagccccctggcgcacagccgcaccatgcacgtgctgggcctggccagccaggactccctgcatgaggactctgtgcgcggcctggtgaagctcagctccgtgtgacccacatggccccaggccgggggacaccagaggctcctccatgggcagcaggagtgagcggaggggtgtgtcccacagcgactttcccagccaatgccacggtggagatgacagccccaggtctggggtacagagaccacttaggatggcacagggtggctggccccggatgctgagagcttggtttcatttgaattttcttccccaacctgagtgctttgacaacaatggaaatagagaagtggctgctttcttttggtgaccctccaggggtggaatcggagtgtgtctgcccgcccttgtgacagacacacggaaggcttctgacgcttgtggccagactgcaattgcacttatgtgttatgctactaatatttgaaacagacctgccattccatttgttaattaaaaaaaaaaaaaatcctaaagggaaaaaaccgaccaggtgtggatctgcatgccacgctgccgtctgtgttacagtggtgttgctatttccaaggaagtgctgctttctttttctttttttaattttgtgaattttcaagtgctgttttgttggaagacagtgcaacgaactgagactaatggacagtgtcatcactcagcttactgggctgaggcgtctgtggagaggtggcaccggggctgcagagggcggctggggttccgtcgtgtcgggtgtcacttcaccttctgtttggccgctcgatgaggtctcgtgttgagatattgtgtgccacaacccccacagtcttcacctccgtgtgtgatgaaacttcccgtggacagccaataaaatgacgtcctctgttattttggaaaaaaaaaaaaaaaaaaaaaaaaaaaaaaaaaaa

SEQ ID NO: 23868 - DNA, 779 bp, Homo Sapiens
gctcgcacccccgtcctccggccgcgacccccgcccgggaaccctagcccctggccgcggtcgcttcccggacctcgccccgcgcctccccctgcagcccgccccggccgcaccccctagcgtccccgcccccggccgcgccccctcatgggggccccctcggcggtccgggaggcggcgggcgcgccatgggcagcggcagcagccggagcagccggactctgaggcggcggcgcagccccgagagcctccccgcggggcccggagcggcagccctggagggcgggacccgccggcgggtgccggtggcggcggccgaggtcccgggggcagccgcggaggaggcgcccggccgcgaccccagccccgtggcgccccccgacggcagggacgagacgctgcgcctgctggacgagctgctggccgagtcggcggcctggggccccccggagcccgccccgcgccgcccagcccggctccgacccaccgcggtcgcggggagcgcggtgtgcgcagagcagagcacagagggccacccggggagcggcaatgtctctgaagccccaggcagcggtcgcaagaagcccgagaggccggcagccatctcctacgaccactcggaagaggggctgatggcgagcatcgagcgggagtactgccgctgaggacagcatgctccacccccgccaggcctcggaggcacctgctggctggggcaccctctgcttgcacagagctctagcaggagctgaaccacctccaaaacgcagtcactcccg

SEQ ID NO: 23869 - DNA, 2108 bp, Homo Sapiens
attggtgggactgaggatcagttttgtcattgctgggatcctgtcaggcactttgaggtgtccctcaggccttggccctgaagtgtctaggtgtgtggagatgggtagaaaattaggtacacccaatggtgtagaacgttgattctcaaatttttttattttatacaaatggggtctcactatgttgtccaggctggtcttgaactcctgggctcaagccatccgcccatctcagcccctcaaagtgttgggattacaagcaagaactgccatgcctgacccagttctcagttttttgtttgtttgtttgtttgtttgttttgagacggagtcttgctctgtcgcccaggctggagtgcagtggcgcagtctcggcttactacaacctctgcctccggggttcacatccttctcctgcctcagcctcccgagtagctgggactacaggtgcccgccacaactcctggctaattttttgtatttttagtagagacggggtttcactgggttagccaggttggtctcgatctcctgaccttgtgatccattcgccttggcctcccagaatgctggtattacaggcgtgagccagcacgcctggcccagttactcagttttgaatctgaggccgtgacatcactcatggtctgcagtcagtgctctgcccctgagctgtaccctctcctatgataatcactcttaagaagggcaacccttggtgttttccccttaaggtcacccaggctggaatgcagtggtgtggtcatggctccctgtaccctggaactcaggcttgggtgatcctctctcctttgcctccgaagtagccaggactacaggtgtgcacccaccaccacactcagataattgctttggtgtttttaaagcttgtaatgatcagtaggctgaggtgggcaaatcataaggtcaagagttttttagatggggtgagcacagaccaattcctgttttatttactgatttaaaattttgagacagtctcactgtcacccaggttggggtgcagtggtaggatcatagcttgctgcagccttgatctcccaggatcttgcctcagcctcccgagtagctgggactgcatgcttgtgccaccacactcggttaatattttgtagagatggggtcttgctatgttgcccaggctggcttcaaactcctgaacttaaaagcctcctgtttagttttggttttttatcactttttttttttttttttgagatggagccttgctcccatcgtgcaggctggagtgcggtggcgcagtctcggctcactgcagcttctgcctctcgggttcaagcgattctcctttctcagcctcttgagtagctggaattaccagtgtgcgccaccaccaccacgcctggctagtttttctgtttttagtagagacagggttttgctatgttggccaggctggtcttgaactactgacctcttgtgatctacctgtcttggccttccaaagtgctaggattacaagcgtaagccacagcgcctggccttgctacatttttttttttttttttttttttacagacatggtctcgctatgttgcccagaatggttttgcactgggtccaagcagttctgccgcagcctcccaaagtgctgggattacaggggtgaggcaccttgctggcccctgttttgattagggtgcagtgctggtgaagccggtgcacgaggccagtgatgcatcctaatgaggggtggagttggcgggacttcctgggccagtttggggactttcacaaaagacccccatgactcagggttttgagttcttaactgatcgaatgaaggattcaaaattaaccactccaaggggggattgaaggaagaaccactcttaatggacaaaaagaaagaaaggggagggagtaacagggatatgagctctagccgcccaagctagcaatggcaacccttctgggtccccttccagcatgtggaagctttcctttcgcttcattcaataaacagctgctgctcactctcctggtccgtggactctttttgaactgttaacactccccgcaaaggtccgcagcttcattcttcaaagttagcgagaccaggaacc

SEQ ID NO: 23870 - DNA, 1674 bp, Homo Sapiens
ctttgtttcagtttctgctgcatggactcatactcagccaagattcgggcaaacctggtttgcaggaggtctactgacccctccattcgagtaaccttctcttcaagatctttaggatcactgccagcatttgcaatgtttagatccagtagaccatctttcattaaaatctgcttccctttctcttccagcatagttttggcatctgggtactcagttagagcttccatgaggtcatcttttgagagacagaacaggtctgagtagccaatacttttaatattggccgttcttcgattgccagctttgctccctttaatgttaagaatgctgatctcaccgaagtagctgccatcgctcaataccacaaactgagtgactccatcatctgccaccacagcgagtttgccttccttgataatgtacatctctcgtccgatatcccctttcttgcaaatataatctccaggactgtagacttggggttgcaatttcaagaccaactccaccaacagaccagcttcacaatcagcaaaaatgcgtaccttttttaatgtgtctaagtgaacgttgatggcaatttctgctcttagtttatcaggtagatactttaagacttctttctcatcaactgtttttttgttggtccacaggtagtcaaaccatttaataaccctcttttccatatctttgcttacatttcgaaaatgcatatattgcttgatagcatcaattcttgcttgaaattctgctctggctgcattcatgttggaaatcatagaacctatgttaccaacgatggtagcaaaaattaacactccaattaggaaatcaaccaccacaaagacatactcagaatccctcacgggagggggtgtttcaccaatggtagtcaaagtcagtgtagaccagtaaaggctgtatacgtattttctagccaaacggccaaattcaggatcattaatatcagggtagacccatgtatcatttccaaatccaatagctttagaaatagagtagaacacacatgcattccagtggataatgatgacgatatacataacaaggttggaaatcctgaagatgtttggatagtttgtccttgtttctgttctctggaagaactcaaacatacgagagaaccgtaacaacctgtttaatctaatttctggatagttccaccctaacttaaaatacagcaaatcagttggtatcagtgacagaacatcaagtttaaattgcaagttggatttatatttatttatgagtttaagttcttcctttaccagcagtccttgttctaggtaacctaaaatagaaaataaaatcaaattccagtgtttctcctttttatgtcattgtggaatttttgtgaataactgtcaaattaactttgttgaggtcaacagaaaattcattttcaataaatatgcctttaacaatgtaataaaatacaaatactaataaacctatggctgtagaaaatattctgctgtagaaataaaaggtaaaattttggccagacagctcacatctgtaatcccagtgctttgggaggctgagacccaatatcacttgagcctgggagtttgaggctgcagtgagccatgatggcactactgcattccagcctgggcaacagcgagaccctgtctcaaaaaaaaaaaaaaaaaa

SEQ ID NO: 23871 - DNA, 1815 bp, Homo Sapiens
ttgccactcggctgccggaggccgaaggtccctgactatggctccccagagcctgccttcatctaggatggctcctctgggcatgctgcttgggctgctgatggccgcctgcttcaccttctgcctcagtcatcagaacctgaaggagtttgccctgaccaacccagagaagagcagcaccaaagaaacggagagaaaagaaaccaaagccgaggaggagctggatgccgaagtcctggaggtgttccacccgacgcatgagtggcaggcccttcagccagggcaggctgtccctgcaggatcccacgtacggctgaatcttcagactggggaaagagaggcaaaactccaatatgaggacaagttccgaaataatttgaaaggcaaaaggctggatatcaacaccaacacctacacatctcaggatctcaagagtgcactggcaaaattcaaggagggggcagagatggagagttcaaaggaagacaaggcaaggcaggctgaggtaaagcggctcttccgccccattgaggaactgaagaaagactttgatgagctgaatgttgtcattgagactgacatgcagatcatggtacggctgatcaacaagttcaatagttccagctccagtttggaagagaagattgctgcgctctttgatcttgaatattatgtccatcagatggacaatgcgcaggacctgctttcctttggtggtcttcaagtggtgatcaatgggctgaacagcacagagcccctcgtgaaggagtatgctgcgtttgtgctgggcgctgccttttccagcaaccccaaggtccaggtggaggccatcgaagggggagccctgcagaagctgctggtcatcctggccacggagcagccgctcactgcaaagaagaaggtcctgtttgcactgtgctccctgctgcgccacttcccctatgcccagcggcagttcctgaagctcggggggctgcaggtcctgaggaccctggtgcaggagaagggcacggaggtgctcgccgtgcgcgtggtcacactgctctacgacctggtcacggagaagatgttcgccgaggaggaggctgagctgacccaggagatgtccccagagaagctgcagcagtatcgccaggtacacctcctgccaggcctgtgggaacagggctggtgcgagatcacggcccacctcctggcgctgcccgagcatgatgcccgtgagaaggtgctgcagacactgggcgtcctcctgaccacctgccgggaccgctaccgtcaggacccccagctcggcaggacactggccagcctgcaggctgagtaccaggtgctggccagcctggagctgcaggatggtgaggacgagggctacttccaggagctgctgggctctgtcaacagcttgctgaaggagctgagatgaggccccacaccaggactggactgggatgccgctagtgaggctgaggggtgccagcgtgggtgggcttctcaggcaggaggacatcttggcagtgctggcttggccattaaatggaaacctgaaggccatcctctttctgctgtgtgtctgtgtagactgggcacagccctgtggccggggggtcaggtgagtggttgggtgatgggctctgctgacgtgcagggctcagcccagggcatccaggaacaggctccagggcaggaacctgggcccaggagttgcaagtctctgcttcttaccaagcagcagctctgtaccttgggaagtcgcttaattgctctgagcttgtttcctcatctgtcaggagtgccattaaaggagaaaaatcacgt

SEQ ID NO: 23872 - DNA, 31920 bp, Homo Sapiens
agcagttcccagcttgacttttcccttttgcttagtaattttgggaccctaacattttcacaggctttaaattttattattctttagttactacgtgctagcatataaataaatagtacaaaaccaagaaggcatccaccttttggttgtctcttcacgtgtaaaacaacactttgtgttaagtatcttcacacacggcggcgcaaaggtagaaaccgatactaaaaaagcgtgtagaaaatagctcccagcctgggcaacacagggagacctcatttctacaaaaataattcgccaagcatagtggtgcgcacctgcggtcccagctacttgagaggctgagatgggaaagttgcttgagctcgggcagcaggagttccaggctgcagtgagctaagaatgcgccactggactccagtatgggcgacagcgtgagaccctgtctcaaacaaaaacaaaagcccgttactccaccaagaaggcgcttttgcacattgttttaatgcttaacgccttcaggatgccagcgtgacggaagcaagtaaccaccaaggcatcaccactggcgctaaacttctcacttccggagtgctgcaagcgcagaaaatatacgtcatgtgcggaggcggagcttccgccctgcgcgtcgtattagacggaaaccgagcgggcccatttttcgtgggtttgcggacccaccagcgaaggcgggaggtgtcgcagggacatcttctggctgtttccgtcgcctgcgtggcccttgcaccccggtcttccattagcggcgcagacgtttgggcctaagcgctgggcgaggcgaggccctgcccctccccgccaacggccattctctggacctgtctttcttccgggaggcggtgacagctgctgagacgtgttgcagccagagtctctccgctttaatgcgctcccattagtgccgtcccccactggaaaaccgtggcttctgtattatttgccatctttgttgtgtaggagcagggagggcttcctcccggggtcctaggcggcggtgcagtccgtcgtagaagaattagagtagaagttgtcggggtccgctcttaggacgcagccgcctcatgggggtccaggggctctggaagctgctggagtgctccgggcggcaggtcagccccgaagcgctggaagggaagatcctggctgttggtatccttaacgccgcgttgggacttggggtgcagggattcggggctggattcctcgcggggctctgccttgggcacagtggcatctgcaggatgatggtcttgggtcggggtcggggtcgctatagaatctctgtcactaggttttctaagtacagtcgtccctcggtatccccggggctttggttccagcccctcctccgtataccacgatgttcaagttccttcaactcccttatataatggcgtggtatttgcatataaactacccacttccgtaatcttttaaatcgtttctagcttacttgtaatgccgaatgcaatgtaagtgatctgtaaatagttgttatactgtattttaaaattttttgtagtttttattggtatgttttatttatttatttttttccatcgcaaatatttttgatccgtggtaggttgattgcggaatcgggtgatgaggcgggccgccctgtctgctttccccagctttgcagtcttagcggcctgtgcatcctggtttgtcactttgtggcagtgctttatgttcctctctgccttagttctctcatctgcaaagtagaggtggtgatagtatctacacacaggattggaatgaggaataaagaaattgcctacatgagagaagtttagtgcgattaatacagtaaatcttaaagttattatcctgtccgggaggtcagtaaggagagcagagtagacttcgacgattagttttgcttgagtcttgccccatttatgtttcttagaggaaggatagtgtggacaggtgttttacccattttttaaattgactttttaaggactattgtttctgtacatgtttggctggttttgtttgtcattggaattaaattcttttttcattagcaaaacgtgatactgcttttgaaatttttatctttttctttgttatgtagtcattttttttttttttttgagtatctattctggctcagaatctggtgataccttacaccaatttcctaaatggggatctatgagtctaggggctcgtgggcttgtggaaagagtcctgtaaatgattgcggggggattggggacgggaaatggagtgcaagagtgtgtgggcgttcagcaaaggaatccctgactgtggagccctaattcttcagtaggtacaaaacttataaataaaacgacattgataagttttaaaacataatgagattatcattttttgcaagtgaataatctttaaataaatctgtaattgatttttggcttaaaagtttttatacagggtactttgaattggggaaagccaaaggatttttgttttgttttgttttgttttttgttttttagagcacatgcgctgttgctgccctcaagctgttgcttagtatcattgcagtctaaagattttctcagaaataaagggtaaaggttagttttcagtgacaagaacccttaaaacttcagcaaagatttagatcattttatgtagcagcccttgtgaagaattactaaagaggactgtggccaggctcagtggcttacgcctgtcatcccagcactttgggaggtcaaggcaggaggatcatttgagcccaggagttcaagaccagcctgggcaacatagtgaacccctgtctacacacagtcaaaaaattagctggacgtggtggcctgcacctttggtcccagctacacggaaggctgaggcaggaagattgcttgggcccaggcggtcaaggctgcaatgagccgtgttcatgtctgtctctgaataaataaataaaaaggactgtgaaagacattctagtcatgacaacctcatatatttataataaactcgtttatgtcaaaggagtatatctgattacttgttctacaatcggttttgctttatttcattttcacgggaattcagacacctgaaattatttagattttattgtattgtttgttaatgacaaacttacccgttattatactagtttcataatttactcttgtatctctatactaaattgtttggtctttaaaccatctatatagcttagtgtcttatttatacagtctaaatgtctgtgtcaaataatgcagaagtaagttaaacttttgtctcttatagattttaatgtttgtaatatgcgtttaagtgtattagcaagatattaccatctctttaggctatgtatactaatggagatttttaagtcacctaactaaagaactaaagaaacttattttttgtattgaaatgttattggtctttgggtcttataccgaaagtgatttttggctttgctgcagattttaacttttctgtccgcagaaatttaattttgcgtatataaacttactgaaattagacaagtcaaattatacaaatattttcagattgtctcatttttcatatttcttgtctaacaatttatgtgaatattttcaggtcgtctaattttacatatttcatctctaagaattcaagccaaaattctcaaccctagctgagaattggcattacctgtagttaattgaaaaataaaaaataaaagaagtcctacctcagtctctatgatttagaattttaggcccatggggtttaataatccgtatgtttcagaagcttcatatcctattctaatggatagcagggatgagagccactgatctgaaactagatttcctcactgaagttaaagtttaaagtagtgggccaagtagaaactaatttaatcctatgtaatagtgagcttcatggcttttccagactatacttgtagcaagcagaaacatcgatctaatacaagacagatgcacatcaacaccaagttctacctctgagatgtatcttttatccgatctcttctcgtggtctccaccactactgtctgcgttaacttgggctattgtaactcattttagaactggtttccttataatctgttcttcacatgttcatcaaagttatccttaaatcatgttctagaaacttcccagtggccgtatcacctcctgccattccttttgtcctgctgcactggcttcctggagatagggaccgtctctgttttgttcatggctgaattgtttggtgtatatccctagggtcttggatatgcctggcccatggtattgctaaatattatagaaataagcatagcagtagcttgctttccactaggtattttgttacatagtgttttgtaaattaattgttgatggacctacatttttttttatgttagtaaaagttaggcagtgtacattcatttaaatactaaactgttcaacttatttaatagcagatatttattgtgtataagagtccctgtgaaagggagtgcagtgcacaaattgcccgggcaagccatggagcacacaggctgggttttttccctgctagattataaactccatagggccaatactgtgttttgttcagtgcactggatatgccagtgcatagaaaaaatgctgccacataataaaaacagaaataacgtgataggtggccccttcaatgttcttttcctatgttagaaatttacctgcaaatattagcatcagtccaggtttctctctgttttttttttctttttgtttttttttgagacagagtctccctctgttacgcaggctcgagtgcagtggcgtgatcttggctcactgcaaccttcgcctcccaggttcaatcgattctcctgcctcagccttataggcacacgccaccatgcctggctaatttttgtatttttagtagagacaggatttcaccattttggccaggatggtctcgatctcctgacctcaggtggtctgcccgccttggcctcccaaagtgctgggattacaagtgtgagctaccgcactcggcctcaatatattttttaaataggaatgtatacaaggaggatgtcttcatctagactgaggaggggacccctggactgagaccttagagtaggagagaactaggcggagagagggagaaactgtttcaggcagaggaagcagcatgtgagaagaacctggaggcaggaaggagcttagtgatttctgggtttgaggaaagcccagtagcaggaagtgagcagaggccagatcattcaaggcttcctagaccaggagaagaagttttagatagtatcttgaaggcagtgggaagctttggagggttttcaccaaagatacgttggtgaaatctagtatataccttcaagatacattagaagatagaattgatagacctggtaatagctataggtggtgatgcccagcattctggctcaggtgaatggcagggacattcactgagatgggggcatgagcagctgagtggagaagacatggagttcagttttgatcatgttaagtttgaaatgtctatgaggtatggggtagagacgtcatctgggctctctgttctggggtcaggagcgtgctctgggccagacatatacatggagtcagggcgtggtgtatgtggaggggagtggaggttgatagttcagacaggaggaaagaagagggcctgagaaagatcactgatgaagtgaatactttaacagtgttacaggagctggcaaagagtctgagagcaggaaaaccagcagagcgcggtgtcactctttcttttggacaaatataacattttttgagaagcactttttagaaaagtttaaaaatataagaaaacttcaagatgaaaatataagttatctttagtctcagcagacataatatctactttaatattttggtatgtgaactagttttttatatttaacatatatactgtatcagaaaatggagttatactttatatggttttatagcctgttttactatctttaataatatttaatgactatcttccttatcacacatgctcctgcaacttccatttttaagggctttttggtattccagcaaataggtctgccataattagtttttcttttttgagacggagtcttgctctgtcaccaggctggagtgcagtggcgcgatctcggctcactgcaacctctgcctcctgggttcaagcgattctcctgcctcagcctcctgagtagctgggactacaggtgtgcaccaccatgcccagccaatttttgtatttttagtagagatggggtttcaccatgttggccaggatggtctcgatctcttgatctcgtgatccacctgcctcggcctcccaaagtgctgggattacaggtgtgagccaccgcgcccggcctatgattagttttttaaaaagacctgctggaaaacttttaagttgatttttatattttcattattataaacaagcattctgtaaataactctcattatatatccatgatgattttctgaggatcaatgtctggaagtggtaaaatagactgcaaagttttaaaaagtttttttcactatgaattgtcaaattgtcctccagaaaatttgtgctaattcatgaaaattctttagcaatcacttatttttttttaaagaagcaattctttgcaatgagacttcttaaaaggatatgtctgtctttgtatgattttaaaatgcagtatgtgaataggggtaacaagagttcaactaaaagttaactgactttaggtagatcccatgagagctaaatgtttttcaattttaaatgaatagtgataagtatttagtgttcaacgtttggataatatcagttattaggaaattgaagttgtgaggatgaagagaaaaatcccggagttttttccattaacaattctcccagatattagcatttggttaaaccaagcacttaaaggagtccgggatcgccatgggaactcaatagaaaatcctcatcttctcactttgtttcatcggctctgcaaactcttattttttcgaattcgtcctatttttgtgtttgatggggatgctccactattgaagaaacagactttggtaagtgtcgtatagtttttagtaagtgtcaaataatttttttctttctgcattcttagaaaaattcacataaaatttttgttttctctttagaattttagaaacagacttattttgacacatacttaattacatctacttttttatcttgaacaattaatttttcttttaaaaagttttatgagagttcatcatgggtacaatgataaaatttaacttttaaataaaactaactactaaaaaccttgctgttgagagttttcccttcagaggatcttgttaggtgttttatatttatttcaaggatgcggccatcactcagaacactgtggaaaccctcttttgggaagtgcctccctgaatctgagatcaagtatcctccgtgatagcaagccttcttttaaggggaattggattttaggagtaagcaatgttatgtggtgccaagtggtgactaaagtggattatctaggaaggaaattgaccatgatatagaagagtcagaatgagttgctgctttattgttctggaagtagttttaaaaaatgtttttggaaggccgggggcaggaggattgcttgagcccaagtccagcctgggcaacacagggagaccccatctctaaaaaaatgacataaaataatgtttaaacagtccaaatgacagcacccatttggatatatgacttttatttgttgaaaataccaaagtaatgaaatgatgactttgtaatcataccagatactctctaaatgaggatataggataaaagtaaggatataggataaaaataaaaagcatttataaatgctgggggacctttgttgcctcagtaagagtgtctagtcttgaatgttgcagttttcagttacccaaggcatactgtaaatcaggtactttgtggaaggattagaaaggaaaagagaatatcttggttatttttatccgatattcagccataagcacagggactatccatttgtcactacttgaacatttcttacaagatatttctatacattttagaatttctcatgatatataatcttgaatattgaagggcagaattacatgtaagtaatgcatgtttataaaaagcaatattagaaattgtttttggtgtcactgtgacattttatagaataaataaataatttcttttgggaagcatttaagctttccacttcttgggcatattaaaagacatttaaaagaaactgaaagtaaattaagtttcccaaatatattgtgtagtagcccattaagtaatagatggaaactctgggtgtcctttacgtagcagcaacctgaagatatacactgatatggcaattaggaggaaatgctaaagcagccatagtctgaaaactcagacaaaccaaattctctggaaaataaatcacagcaatgtttctagtggtctaatatcctgaagtgagatcttacatcctttcttctcataggtgaagagaaggcagagaaaggacttagcgtccagtgactccaggaaaacgacagagaagcttctgaaaacatttttgaaaagacaagccatcaaaactgccttcagaagcaaaaggcaagaggaaaattatagtcgtgttagagatgaagttttaaaaaagtgatttttgtcttgatttcctgcgattctctttccctatctaattttgactctcaacagaaaatagagagtgaaatgagacaagtaggctgccatttgacctggtaatttggagttgtggcaattctccgttctgtgagaatcaactttgctaatgagaaaaaaaagctgtcgtgttgcgtcatgtacactttttactttgattatggtcttcttgactctaggtgagcagccccgccacggttccttcctttctctcggctgcatttattttccacagcagtggcctgagagcagccaggtcaggtccctgttcaccatcctgagcagggtctgcataatctgtttaaagatttgtgtactttccagagatgaagcactacccagtcttacccaagttcgaagagaaaacgacctctatgttttgcctcctttacaagaggaagaaaaacacaggtaaatgtttaactatttaagaatattattttagtcattgctacattcagacacatttaaaccttgatgtgttatctacatgataaggcatgtgaacatttcttaatgcatctgaaataggcatgctctatacctttcagaatatttttcaaagactaaattttttatttactattctttgtgttttggtgattcatgattcttattcctcttcattctaaagaacttctgccagggctgtggattctaaattctccaaggcatgaattttagttttgcttacactttgcttacacatgctgtctctagctgcttttcaatccaatatggtctctctcaccatgatgctaaaataccacaacccatgacattcttgttgctaaatccagcagacgctttgcacgtcttagtgtgctcgacttctctgcactaaacaccatgccacactgccccgctcccccggcatctctctggcgctttctgctcagcctctctgtggactcctcttcctctgtctctctcttaatggttggtggtttctgtgtttgaagtgaaggtggagaaccggaagcttggcagtttgcctttgtcccctgtccttccctccacctcttcctttcccaggagttcccaagagacaacttagcttttgtatcagctcagttctatttgtctccattgctaccactgtcattttttctccaggttacattattagcttttaaacttctttctgtctttgtctttgatcataccctttttgtaatagttcctcccaccaagcccaatctctgttttgtgttatagtctgtttaaaatccaaatctgatattgtcatttccttacttaaaacactttctagcttctccttctcatttttttctttcttttttttttgagatggagtctctgttgcccagactggagtgcagtggcacaatctcagctcactgcaacccctgcctcctgggtttaagcgattctcctgcctcagcctccggagtagctgggattacaggcacgtgccaccacacctggctaattttttgtatttttagtagagacgaggtttcaccatgttgtccaggctggtctcgaactcctgacctcaagtgatccacctgcctcggcctcccaaagtgctgggattgcaggcgtgagccaccacacgcagcttagcttctcatttctttaggataaaactttaactccttaattacactttccagtcttatccctgcctttcttcacatcatccacaggcaggctttcttttccttgtttctatatggtcatacaacttagttcttttgcctggaacactcttctccatgaaccttcccgctccctacaactacactcattaattcgtggctaactccaaccagtgtaattgcaggagatcctggaaagcttttgtgactcctaaattgggtgaggtgactccctattgcatctctagtgacctgcccttcccttgtggtggaagttattagatcccactctaattgcttacttacacgtgtcccccaccagaccatgagaccagtagtggcacagatcttgctgttttattcaccactgtagcccgtataacgagcagagccttgcatacaagtatttttgtaaggggtccttaaaaatcatagatatcgtaaaagtatgtttgactttcagttcagaagaggaagatgaaaaagaatggcaagaaagaatgaatcaaaaacaagcattacaggtatttagatcatttttgaattcagaatgtattctgttatttgaaatgaatgacatgaaaatgaatattaatgaggtatatcaaactgtgaaagttcctgataaaaagtaaagacagatggctttttggttgtgcatatatatgtgtacatgtatgtatttaaaacacactcacctacacacgtgtatatatatatatatatggaatttgccattatgcacatctatatattcaaaacaagctatttttcttttacaaccaaccaaccaatagtaatatgtgcttacatagaaaatatagaaaacatatcattcataaataacttgtaataacagtttgatatattttcatccattctttgcctgccccatatagttgaatatctgtgtgtgtatttgtatatatgtatcaaatgtgcatgtgtacatatatatgtgtacacatatgtgtgtatgttctagttatctgtcgctgtgtaacttagtggttaaaacatcatttgttatcgtcatctgtctgggttccaggggtagatgagctcagacaggcagttctctctggggtctcttgtgtagatgcagccagtctgtagctggggctggagtgattaacgaggcttccttgctgccatgggcggtggttgatgctggctgtcagccagtcttccatgcggccagcaccagagcacctacttgtggcctctccacgtggcctgggcattttcccagcatgatgactgtattcccagtgtgggcatcccaagagaaagttctaagcagaagccctgttgcctttctgacctagctttggaagttgtgcagcatccttcccactacatcctgttcctcagaagctagttactgccctatggaaggggcagagagttagacaagaagaatgtcccacacatattttcatgaataacatttttacaaattgagattatgctgtatatatacatttttttcataaacatttttcaagtttcttagtgtcacagatagcattttttgattcccaaattcactgtttcttgtttgttcatatggttttgttctatcaggtagaaacttttgagctaaaacctcgagatccttcaggttgcggaggtgctgtgctattaatgcagctagtgagagcaatcttagttaagaccatgggcctcgtggtcaaaaagacctgcgtttcagtccaggctccactgttcactagctgtgtgatcttacacagattaaattctccaaggctttatttttttttgtaaaacgaaattgatatcaatgccttcctgatgggggtgatgggagcattagtgagggaaagcacaggaaatgctgagcgcagtgacaggtctgtcctacgtgtttgctggttggtacgtacacatgtaacatacagacatgcaggacatcaggttgtattagcttatcttttttactaatgaaggattttaaagtacttttggtaatgagttaaagttgagaaaagttttacacttttccatgtcttctgtgaatttcttttaatttcatttcttatgttataagcaaaataaaactaacttaattatgggaatgatatatattgcttgaattcctaaggcacattctgtcttgggttcttgcattttctgttctctcagcctgaaatgctctatcctcagtgaggctctttgatatcttccaagtccctgctcacacatcctctttttagtggggtcttctttatctatcaaatagatctttttttccacgttctgttcatgtaatcactctcatatcagataaatctgctttattttaccattatcttgttcatttatttatttatttattgtcttctctcctctgctcctaagagcagggaccttatctggcaccttatccgatctcacagtaccttagcacctagaacagtgcctggtgccttagaggtacctgctaagtatttttttcttttgaatgaattaaagagtgaatggctacattccctaatttgcctactcactttgttgcctgtcacagattatatgcaactgtgtttagccaattgttgattatgtagaactgtgtttattatataaacataatacatatccttaatgttgaatagaactaagtgtatgaaatgtaaatttcatggtgctgtgattttatctttacaggaagagttctttcataatcctcaagcgatagatattgagtctgaggacttcagcagcctgccccctgaagtaaagcatgaaatcttgactgatatgaaagagttcaccaagcgcagaagaacattatttgaagcaatgccagaggtgaaatatgcaacagtacattcatgcttagaattaagaacttcagcaaaactttttattagaaagaagagaaaattgataagcaatacttacacgatatctcagttaacagtaaacagcatttctacatctcagattctaagaagcatcgtatatttatacgtttgagcctatagacatttactctaagaagtttttcttgacttttgacccgagactaggtcttttctcctggtctttgttctcacagcaccctgtaatatcacttcatagttcttagttccaaaacacgcttatcttgctcacctctgtattttcagtgtctagctcagtatttttcacatggtatgtgtccagtagatgcttactgactcaattcttaggttaggtcataaaagttattgtaacctataatatacattgtctataaaaactaatagtcatatagaatctaatcacaatggaaaaataagttctaaattgaaattccaggtatatcttcctctgctgcagccctagagatgccattggctctccacattcccttgccctcttcctggacagtgcgaatggggcttcttcaccttggaacatcttgtagcttggcaggcccagaaagctagagtggaggtggtatgtgcagttgggtgctagcaaatatgtctcctgatcatgctgccattgatacttaattcatgttactattgatgactccctgtcttagttgccagtgagtgagttctttttctctttctgttgctgctacctgttatttctaccgtagttctccattcacccactataggacagaatcgaaattttgcagcatcatcgaccttagtgcatagatggagtgtttttttattttctacaatttttgaatattgcttaaattgatagcagaaatatgaaaaaggaagggtaaatttcttttctcatcactccctgttttttccacaaagaatgtgcagtagcacacactaaggtgcacagaagtgacattcttgggtctttggatatacaaaggacagaagtaaattgatttttatttcaggagaaaaatccaggctcagtctgtctatcaggcattttatttcttgagtatgaaaggatctctggctggcagttgaggaagtagaattttggttgtgtaaacaataacaggaagaaatgggagaaagagagacagtccctaatgatttactgttctttattttctttctgcaaccatgaagtctctggaagtggtggactgtagggtggtgtggagtagcagcttactggatctgtaattttgatagagatgttctaagtcatccatgttgggcctttgtgtgatctgtatgtcgtgcaaatgtaatattgataatagtagtgatggtaggtaataatagcagtagtaataatcataataccatagttccactttactcacggtttgcagttttcagtgacctgtggtaaactgtggtctgaaaatattaaatggaaactttcagaaataaacaattcataagttttaagttgcacaccattctgagtagagtgatgaaatctcacaccctcctgctccatcttgcctggaacgtgaatcctccctttgtctagcatctccgtgctgtagatgcttcctgcctgttaatcactgagtagctgtcgcggtgatcagatcaactgtcgcgatattgcagtgcttctcctcaagtcactcttatttgacttaatgatggcacaatagtgcaagagtatgatgctggcaatttgaatatgccaaagagaagctgtaaagtgcctcctttaaatgaaaaggtgaaagttcttgaattaataaggaaagaaaaaaatcgtattctggctgaggttgcttagatctgcataaaaatgacttttctatctgtgatattgtgaagaagcgaaaagaaattggtgctagttttgctgccgtaccataaactgcaaaagtcatgacctcagcgtgtgataagtgctcagttaggatggaaaagccattacattttggggtggaagacatgaagagaaacatgttctgattgatgacaatcaggtttggtacttctgcagtttcaggcatcctctgggggtcttggaacataccccaaggatgagggggctgtctactatgttaatagaatcaattgtagtaaattgacatgcttttgatcccagatctaccacttattagccctgtgactctagggaggttacctaacctatttaagtcccaatttcttcatttataaaatggaggtgatatctgtttcataggatgattgtgagaataaaatgaggtattatatgtaaaagcacttagaaaaatgccctccatgggaaatgccttataatgttaagtattactgttaataactgtgattactgtgatttattgtgtcttttatgggataaggttgtgcaggacacttcacttgcatatttacctacattctagaagattgttaagccataatcagatgtcatagtgactgctatgcattacatgctcaatacatgtttattgaataatgattaaatcataaacagtattcatgatttttttttttttttttttgaggggaagtctcgctcttgtccctcaggctggagtgcaatggcacaatctcggctcactgcaacctctgcctccccggttcaagtgattctcctgcctcagtctcctgggtagctgggattacaggtgcctgccatcacacccggctaatttttgtatttttagtagagacagggtttcaccacgttggccaggctggtctcgaactcctgacctccggtgatccacccatctcggcctcccaaagtgctaggattacaggcatgagccaccgcacctggccatagtattcatgatttttttttgcccaactctttcgaagattatttttttaaaaggaagctgtagtttttcttgttattcaccttttataatatgaaactaccatcaatgaaaaaagccaattgttctttgttccctgttggggaaagggtggaaatatggtaatattatctgtatttaatataaaacagtaattttgtttgtttattttgcctttaggagtctgatgacttttcacagtaccaactcaaaggcttgcttaaaaagaactatctgaaccagcatatagaacatgtccaaaaggaaatgaatcagcaacattcaggacacatccgaaggcagtatgaagatgaagggggctttctgaaggaggtagagtcaaggagagtggtctctgaagacacttcacattacatcttgataaaaggtatcaggcaccatcatttatatattcacattaaaaaatcaaagatatatcatgactctgaattctataaactagcacccctggataatattaatgaaattctatttatgtaataactgtatactgctattaatggattaactactatagtgccaaaccactttaaaattagctaatgaattaactcctagttgccgattaaatgaaaatgtatatacttatttatgagaaccagtgttctcttatccatcttactagaagcgtattgtcacactgtaaaactgaatggtgagaagtgttttaattcttcttaaggtattcaagctaagacagttgcagaagtggattcagagtctcttccttcttccagcaaaatgcacggcatgtcttttgacgtgaagtcatctccatgtgaaaaactgaagacagagaaagagcctgatgctacccctccttctccaagaactttactagctatgcaagctgccctgctgggaagtagctcagaagaggagctggagagtgaaaatcgaaggcaggcccgtgggaggaacgcacctgctgctgtagacgaaggctccatatcaccccggactctttcagccattaagagagctcttgacgatgacgaagatgtaaaagtgtgtgctggggatgatgtgcagacgggagggccaggagcagaagaaatgcgtataaacagctccaccgagaacagtgatgaaggacttaaagtgagagatggaaaaggaataccgtttactgcaacacttgcgtcatctagtgtgaactctgcagaggagcacgtagccagcactaatgaggggagagagcccacagactcagttccaaaagaacaaatgtcacttgttcacgtggggactgaagcctttccgataagtgatgagtctatgattaaggacagaaaagatcggctgcctctggagagtgcagtggttagacatagtgacgcacctgggctcccgaatggaagggaactgacaccggcatctccaacttgtacaaattctgtgtcaaagaatgaaacacatgctgaagtgcttgagcagcagaacgaactttgcccatatgagagtaaattcgattcttctcttctttcaagtgatgatgaaacaaaatgtaaaccgaattctgcttctgaagtcattggccctgtcagtttgcaagaaacaagtagcatagtaagtgtcccttcagaggcagtagataatgtggaaaatgtggtgtcatttaatgctaaagagcatgagaattttctggaaaccatccaagaacagcagaccactgaatctgcaggccaggatttaatttccattccaaaggccgtggaaccaatggaaattgactcggaagaaagtgaatctgatggtacgtgtctgtgcttttgtagaaatctggaacggtaggatttcccctctgtaggaattcagagatcggttagtgtagtcccgttttaactttttacagataaggaacgagagacgtagaaagaaagatgaaatgactttcccagggagtcacagctggtcatggaatcttgaccttccctgtgttgctctgctttttgttatcatttttaaaggcatgaagtgccctatttggggaaggtaaagttgagtttccctctagtttttaaaaactttttattttgaaataattatgaactttaaaaagttggaagaatattataaaacactggttccttcatccagtacctcagtggctagcatgttaccacattagcttagaatttctcttggtctctctgtggccctctatatgtatatcatatatctccaaatctgtatacatatgtataccattgatcctcattatttgtagattccatatttgcaaaattgcctgatcactaaaatttatttataactccaaaatcagtactcaccgcaatgtctttgtggtcatttgtggacatttgcagagttggggaaaagcttgagttgccacactgtcccctgctgaggttaagcaaggtgacactctgcctggttcccgtgttctgagagagatgaccagagggtggggacagtaggggattatgcaatggagagagagcaagaagctccggccccaggccagttggaccagatttgaatccctattctggcacctgttagcgtggcagcttcacacaggtcactaatttgtttcttgaactttgtttcttgtttataaaataaatggaatctattaagatggtggttttttaggatttaagataatatatatgaaatgtgttcatatatatgttatatatgcatatgtgtgtatatgcacatagatatgtttaggagcaatgactcggtattggctaatttagtgttcacagagacttcatacgtgatggccactttgaataagagaatcaaccacacacacacacacacacacacacacacacacacacacaatttgttcctggtatctgctagttttcttcattcaaatgttactatttcccttttgtaattaataagtattttgtggaaaaggaatttttggagctatataaatatgctgttcctgaacaaacttccacccacttgttagcatccattgatgtttacctgaataatttgttactacgttggttgccaaatgatggtttttctaactccatcattccttatatattattacttgacatcctcctatgaggaagatcttttccttctccccatttatttttattatttttaatcagtgtagactcctgtattcctatttagtgagttataatccaatactgtcataatttactttgttactcaaattatcacagctttggccattggggctccttctaatggctttcagcagttttttcattatattttgagcttttccttgctttctggccaagctgtttcaggcatatgttgtactttctctgccctggtcctggaaccagccatttcaccagggagctctggttcctttcagtggagcatggggtttagacaccacaagctggatgtgagtgtgcttatggatcctgaggtataactgtctcaggccttttcagcaacagtgccaggaagtatatttatgtatacatatacatgcacacacacatctatatttatttctatgtctatctgtactaaaatccatgagtttatactgacatctgcaattccatggggttcagtctagcctcctgcttctttatagtttccctaacaatgagaaacattgctccccttatcctcaatacatttacatctgcttattctccctggatatgtaaccatctccccctcccactggcctcctccttggccctgctctcttctttgcttcagctgtgtccttggtgccagctcccagtccctgagagccccctcctctgttccgattgtctccttaaacccagctggacaggccttgccagccctctccacctacagggaaggaaggcaaccattaaatatattttaaggagaaggaaagacagtaagacagtaagagaggagagaagggaagtggaagaggaagaactatttcttagtcacagctttattctgtgctgtgtgaatagcataaaaacatactgagcaacttccatgattgtttatatactttgataatcctcctttttgaatttttaaaacaatgtcagttaacttagaacatatttatataaagcgaatatacaaatcttaagagagtttcctactttcaaagacagtgccagtttacctaattgaaaaggcttgttttgaagttacaggcatttgtgattacatttatttattaataacgctactattacatgtattctgttatagtcatatctttcctttttaggatgtagcatttttcaggttcctccagaaagctcttgatgattgcaggatcattttaatgttttgattgtagatgaagtgaccttttaattttggtacaggaagtttcattgaagtgcaaagtgtgattagtgatgaggaacttcaagcagaattccctgaaacttccaaacctccctcagaacaaggcgaagaggaactggtaggaactagggagggagaagcccctgctgagtccgagagcctcctgagggacaactctgagagggacgacgtggatggtgagccacaggaagctgagaaagatgcggaagattcgctccatgaatggcaagatattaatttggtaataccgtaacattgtgtttcgacttcttgctgaggaagccaggttaagtaggttttgagttttaaggagttggtggatgagtatttagtagctatttgcagtacatcttgtggttgctgatggcttcatttttgtgtaggttactggctgggatagactccgttttccatgtggtttagtgatgaatctctaaagatattacagagtcttggttagacatccagtggagtacttcctaaggagaaagagcttattggtaatttcagtcagactaaatgcaggctttttgtaaacaaaactcatttggattattaatataaatctataaatgaaaaaacattttataggaggagttggaaactctggagagcaacctcttagcacagcagaattcactgaaagctcaaaaacagcagcaagaacggatcgctgctactgtcaccggacagatgttcctggaaagccaggtgggtgcaggcagcttgggtttcctttaccaccttcctcagacccctgggggaatgcactgcatgaagggggtatgcactgtgccccctggtgctcagggcctggtgatgccgttccctgggggtcactgtgtgtccctaactctgcaggaatgaatgcattacatgaagtggtaggcactgctccccctgtgctcagggcctggcggtgcccttccctgggcgtcactgtgtacccctcactctgcaggaactcctgcgcctgttcggcattccctacatccaggctcccatggaagcagaggcgcagtgcgccatcctggacctgactgatcagacttccggaaccatcactgatgacagtgatatctggctgtttggagcgcggcatgtctatagaaacttttttaataaaaacaagtttgtagaatattatcaatatgtggactttcacaatcaattgggtaagacttcagagtctttttgattactttctgacatttaccttcagagtttgtcctaggaagttttctttccaaggaactagtttgatgcattgatggaaattgcaggtctatgcaaatttttatatgagtgatctttggcttatatagaggaataggattttaaacatttgaattaaggaattaaagtcctagtatgtttaggtagttaatcaactgacttagttaaactttgactagttacccgagatctccacagtgaacaaaaggtggtggagaggggaagcaggccgcgcctgggcctgtattcgggtttctggcactgatcttcttctgttcatccagcaaatatatgtttggtgactcctatatgccagttgttcttaacaagagggaaggaacagagagtaaaatagtaggagaaacagatgataagcagatacataaatcataatttgacagttggtggtaagtgccaaatagaaaaatataacagtaaaggagaggagagagtgaacttcaggcatcgagagtgcaggtgctgtttcagagagttgttgggaaaggctttactcatgtaacttcaaggcagggacctgcaggaaataggaagcaagcactgtagatagatacctcgggactagtgagtgaaaggggctgaggcagaagcttgtgggctgtgttctagggaagcaaggaggccagtgtgagaggaggagggaggaaatggcaagggttaatcttagagaataggaagaagctgaaacccaccagggtctggtgtgctagggtatgcaggcagattgaatgtggggtgggagaagaatgaagtcgaggaggattccagatactgagcagctggtcgagtggacctgccttcagtaagacaaggagggagcacagtggaggaggagaaacgaagtgttcaggtttggatatgataaattggggatgctcattggatacccagtggaggtgttgagttgatagttgaatatatgtgactgtggttcagagagactcaggctagatagctaactttgggggtcagcgtatagagggtatttaaagctatgagaatggatgaaactttaaaaatattaacagaatgccattgaataaaataatttattttcaaataataagatatttttggtggttggatatagatatagatatacacacgtacatgatttatataataaaatgtttataaatgtcatataagaaatcttgataaaaattaaaaaatattgttactctttaggattggaccggaataagttaataaatttggcttatttgcttggaagtgattataccgaaggaataccaactgtgggttgtgtaaccgccatggaaattctcaatgaattccctgggcatggcctggaacctctcctaaaattctcgtaaggtcttttatttctttaatttggataattgtgtaaatacccaaataagcaaatagaactattatttacagcatgaactgtcatgctgtaacatgtgaacaatggttcactgagaaagcagcagaaagtattggttgttttccattttctagaaatgatgaaatcagagtcagttcttagtggtgctgggcttatcctagttcaagggtacaaagccagtcctgtggatttcacaggaatgtagaagttgccttttcatccattgacatacttatagagcagctatgatgtgtcagacactgtgctggccctggggaaaggagagatgagtaaggcataggccataccctcaaggactccccccatatacttggaggtgatggagaagcaaagcaaattgtacttgtctgtgtgtttggtgtcctgagagaggtcagccaggaagcgacttggaaatataatgccaggaatgttacatccagcactcctgtcctgtttctcactatgtgaatcccgtgacgtgttcagtggtgaagtcttgctccatccagaacccagagtcgtgctatactcggggtacatttatcattttgaagattctgagatggtaggagttatgagtatgtctgggaaagtagttttttctttgtccttgatggcatctttttaaaaaattgaaatatagtcacataccacagagttcaccgatttaaagtgtacagttcattggtttttagtgtattcacaagattgtggtggcatcttttaaccgtcactatgtcgtgagatgctgtttggtggtggctgatttaatgatccttgagtgttctctccagttacatatcctgtgtttgaaagatgctaggatgctctgacctgaagagtcagtgactggaatcactgaaatgaacggcgaaactgttgtagtgatcatggtcttccagtcatagcacactcaccaatgtgttgtattttatactttcttcatttatctttttctgattttcttattgttgaggaaatttatataccgggaatgagttatgaggtagacatacgtcatggtaggtaaataacttgaaaacctacaaataactttattatacaaataaagtaaatacatcatagaaaattataaatatgtattaaaaagatgattacagtttacaatttgtttatgtaattttagacttctcttcacacatatatatgcatatacattgcatatatatgtatactcatttgagtgtgtgtatgattttttttataagaatgggatgatgctatatactttttattttacctgtaacccatttggtattagaacaagacctattatcaacgatgatatagatttatatcgtttttaatggctacaggtagtatctttttgcgtctatcagggctagtttaatcaagtgtcttttgttatttctatttttagaaaggtattaacagacattgatttgagtgtccttaatcttcgggttcttatctaatgattattttagaataagtgaaatagtatctgacttttccatttggtttcttgataactattgagagtgaattttttatgttcatagacggtttgtgtttctgatttagtgaatgacctgtttatgctgttccacttttctttgttcagcagtttttgctcgtttgttgcctgctgaatcattttcatatttgagcagtttctgcctttggtcctccagctcgttgatgccagataggagcagccttcgctctgcctggctcaggacatttaggatgaatacagagtaaagagcaggaaggatggtgggaaaccagtaaaatcagaatgtggcctcactttgttttctgttctcctcttctgagggcaccctggctggtgaatcattcttagagtggggctgcattgggcctgcaggttgaattgagctgtagtcacatttggtttggactacacggtgtattcttctcttgagctttaattttcaattggctaccaacatttacctttgggagattttacacaaaattatggattctgttgggggaaaaaggagatctgaaaatactgggcctgaatttctggatagccccaaaatagctggcatggagcaacagcagttcccctcccctaccccaaggccttggactgggcatgaatccttcaatttcatcacagttgcctccactcccccagctcagctgattgacagacaccttcctcctttcatctttatgtgaagtgccaggccctcctgcttgaaggagtaaccatagctttggcttgatgagctcacaagtgcactgattctaactgccagtcatgattacagtttcaaaaacgaaaatctgcaagtaaagtagaggagaattatcggtattctctcagtgcactcctggaaagaatgttgtaaaagtaatgaagaaaaattattttttcctttttgcattttgttgttataatactttgaagaccgcaattagtaatttccaacgctagatggcactcctgcatcggtgaggcggaccctggccctgacagccggtctgagtgggttcctaatgctgcactagcaagcttgtgaagcgggggagcctgagctgcgggcgttttttcaggttccattgagtacatggattggtgaggattatgttagtaactttgatggcatttattttttcctaattgtgtaaatgtttctggtcagtcgtcactgcattacaaactaccttcagccttagtggcttcacacagcagtagtcactgattttgctcatgcctctgaagctcgctcaggcctggtgggggtgtcttgtctctgttccatgttggctaggacagctcagctgggctaggaccccttaagatggctcgcggggctgatgaggtggcttcggcctcggggcctgggtggacacttggtgagcttggcttcctcgtagcatgttggagccaagagcaggaggtccaggggacaggaagtggcgagggcctcccctaggcctggcacggcttgagtcacactggtcagccatggccgccctgctcaagaggaggccacagggacccccttcgtgatgggaggagggtccaagagtgtgtcgctgtctttatccggccgatttaggcttagaatggaaaacattgaaaaatgaataaaatataaagaagaaaatgaatggctgtgtgctcacgtagaatattgcctagcacacagcgaaataatagttgttagtgttatttattttaagtatctgtttacttttctcatatatgtgttttttccaaaactggaatcatactttaagtagagttctattatctctgtttttgtatatatttatttgttttacatacatatgtatttatatatatataaaatgttaaattttaaaaacagatacatgtatctgtttttacagattttttaaacaaatttaacattttcttggcatatttacattttattaaatattcttcgatccattattgtatttgatttgaggtaaataatacagatacattacttccattttactgctgagaaagagacccagagaagttgtaacttctgtggtataattatgagtgtgggctctagaggaagactgtaccaattccagctgtgaaatcttgagccagttacttatttttgagttcagttccctcctctgtgaggtgagggtaacgatagggcatggcttgtgtgatgattgggcatgtgaaatatttaacacagtgccaagcacagaggaagacttccataaatgtttgccatcattatacattgtggctaatagtactaaaattaataaaatattctatatagcatacaatttgagttagaacttgagtttacatgttctaagtttagttcttcatccatagtgtatgaactataatgtctcattgctgtgtaagtaattgtttcctttattttacagagaatggtggcatgaagctcaaaaaaatccaaagataagacctaatcctcatgacaccaaagtgaaaaaaaaattacggacattgcaactcacccctggctttcctaacccagctgttgccgaggcctacctcaaacccgtggtggatgactcgaagggatcctttctgtgggggaaacctgatctcgacaaaattagagaatatcctttgcttcttaaaagagaaggaaacaccttgtcaaatatgtgtttggtttaaaacttatggaagagaaacttggatcatttttttcttatatcccgttaatcccattttcttaatatcccgctctccttttcactctttcttccctctcctcagttgttgttttttgtttgtttgtttgttttaaaggaacagtgtatcactctgtcacccagcctggagtgcagtggtgcaatcatagctcactgcagccaccacttcctgggctcaaggaatcctcctgcctcagcctcctaagtagcacaagccactgcatctggcccctctccttagttttaaagagggtctttgtttgaataagcagtgataagcattcatagatataaccacatacttaaatattattgattctgaaagaaggaaagatgactaatcttgtcctttttattactggttgtcctttccgtgtatatttaagtaatcatttggatagatgtttcaaaacttgcactagaattaatccaactacgtttgattttttctcttaatgaaataggcaagatatctgaaacttgtttttattccagttaaccttttttcatagtcacaagtctttgatgtcctaaagtgagagctaaatatgttttattttatagaattgaaaagaacatagtgccagatgattatgctggagtcatttattttgttagtactttcttttagcactctaatctttataaataggaaaatcttaggagatacagggaatggaatcaagaatgggttctttggacctttttatttgtcacttgtttaaatatctttcaaaatatttataagtcttaactgcatgcatattttgtcagcggtatttcggctggaacagaacgaagacagatgaatctctgtttcctgtattaaagcaactcgatgcccagcaggtaatcatggtggacccttctcctaagttcaggatgaagggtaggctgtggttgacagctgttaaagaccagttaactcttattttggggcatagagcagacattttgaaattaggataatttagatgagagaatagaagaaaatagaaaaagaaaagttagactttggcttcattttctatgatcactcttagggctgaactttggagtcctttcatattcatttttttctttgaaaaaaccagtctaataactgatttcacactaaggtgtttctgattaaatacattaccccttgggatttactttcattttttaacgaaaggaagtcttcaaagcaattctgatcatttaagtttttataagtactaatatttttaaattctataaacgaatcttgaaaggtagaagttcagtcattattgtgtatcagtaggagaggtttttgtgggaaggagcccttttgtatgacctttagttcctctaggtacctacttcttgctttatctgtgagtatgttctgactcacacaaaacaagctttcgcccacactagaaacaacccacaaaacatacatacaaataaaccacttagcagaaatgagaatgtagcttttgtgataatatatttaaattaaacccattttcattaggcttggataattttgaaaaacatgaacaaaactaagacagcatttctatgagtttctctttgttttttggatgactatctactggaaacattataaaccaaccaaaaaggaaagctatttgtcttagtgtctggtgatttcttaatttcagataaattttgttgtaatatttatctcctttttcattctaaaacttaatgtgtttatttttccaaaattagaaaatgaagaaaatgaattaaaactactcattagttacctcctctaatacagttgttaacatttaggttaaaaaattttcctgcatttatttgtgaccatactaaatgtaacttaatagatctaatcctcccccccaacttattagcatattttcttctatgtattgtgtggttttcttaattccagatgactagattatatttcatgaaagatatttaaataattagttcagtttacttgttagacctttaattttcaagtttgttatagtaatgctgtgatgaacattaggcatatagctttacccatatattttttttttgagacggagtctcactctgtctcccaggctggagtgcagtggtgagaactcggctcactgcaagctccgcctcccgggttcacgccattctcctgcctcagcctcccgagtagctgggactacaggcgcccgccaccacgcctggctaatgttttgtatttttttagtagagacggggtttcaccgtgtaagccagaatggtctcgatctcctgacctcgtgatccacccaccttggcctcccagagtgctggggttacaggtgtgagccaccatgcccggccaaagaatatcttcttaaaagtgaatttactgaataaaaggcatgaatatttcttacagttgctaatatatactgtgaacttgcctctcaaaggtattgtatgatgataatgtttttaaaagaaagatatagtaggacttagaaacaggccccatgaagtcgtgttgctcctgaggaagatgaaatgtttagctacagaaaaatatttaacgctctttgaatatcttaggaagagatttctcatttgagatgtggactaaagacttagttgacagagatggtacaagtactgctttaggtatgatttagaaagtgaaaattactgtcagtaattcactgggagagaactgggttttgggagataatgaattaatattctctgacatagtaatccaatgtgagtgatcaaggttgagcttgttgatttggtttagaaacttgacttacttgtctgatttattattattattcttttgttatttttttagacacagctccgaattgattccttctttagattagcacaacaggagaaagaagatgctaaacgtattaagagccagagactaaacagagctgtgacatgtatgctaaggaaagagaaagaagcagcagccagcgaaatagaagcagtttctgttgccatggagaaagaatttgagctacttgataaggcaaaacgaaaaacccagaagagaggcataacaaataccttagaagagtcatcaagcctgaaaagaaagaggctttcagattctaaacgaaagaatacatgcggtggatttttgggggagacctgcctctcagaatcatctgatggatcttcaagtgaagatgctgaaagttcatctttaatgaatgtacaaaggagaacagctgcgaaagagccaaaaaccagtgcttcagattcgcagaactcagtgaaggaagctcccgtgaagaatggaggtgcgaccaccagcagctctagtgatagtgatgacgatggagggaaagagaagatggtcctcgtgaccgccagatctgtgtttgggaagaaaagaaggaaactaagacgtgcgaggggaagaaaaaggaaaacctaattaaaaaatatgtatcctctataattagttatgacagccatttgtaatgaatttgtcgcaaagacgtaataaaattaactggtagcacggtctttgtatttagtgtgtggttcctaaaaacaaatgctaaatctgacatttgttttttaatgttttacttttctagtattttttagctgaatatttcaagtatcattggatattatcttgtattcacaggctttgtcttttcatgttttcattatcttaacaatgtctgatccttcctggtcacatgttaaaaaagcgaaaaagatttctattgatcagcactcactctcaataggctttccctctgacattcagacgtagctgagaagaaatacgtgcatgtttctaattccacaatagtggcagttttacacaactgtttagccctgctgcccacggctttgcattttccctcaggttccacttaaaagcatagcaggagggagcctcactgctggaacatatttcaatatgtttgctgtggttttagcaaacaattaggaaacctaaatggggtgcatcattctacctgtgaacattaagtgtatgggaacctctgtaccgttatgtttggcttttaaaccagacttcacttattagaagctgacttctgtgtaaatggatttggaggctgggggctggagttgaactggtgtaggtgggtcagctttaggagtggcctgcaggggatgattgttgttgacacagtgtttgttcagagtggacaaagaaggttattttaagactgctcctgtggagacgtctcccaagaacaacccccaagctcctatttgcttcgagttaagaatgattggaggagagtactaccaattactttgagcgtgggtcctctgccttcagagctaccttcccaagtctgtgtccttttggcatctttagtatttccatctttcctgactttttccttcagccttcaaattgaaaatcttcaccaatgaaaacaaaatccaaatagataatctccagcagtctttgaacggctcctagatgtgttgttttttaggctctcatttatattgacttggccagccaaacttctccagtacttggactacagcagctgcttttctttgcacactattttttcctaatttcaaatacgtcttctgcatccatcattctt

SEQ ID NO: 23873 - DNA, 55319 bp, Homo Sapiens
actgtctgtgagcagcatgtagtgtgaggctgggggtggggggcgtgtggaaaggtggtccggctctgcaggaccctgaatgctccatccagtgtgggcacctgagacgcagcatttgtcaggaactgcataggcacaggggctgggggctcaccttgcactcaggggttgtgatctgagttgggggttggcgctgggaggagagtaggattctgcagctggtgaggccttccctgctcaaagcctgggagtggtcaggagtgctgggtctggatggaaagtgaggttgtgaacaagtcaaggaatttgatgttttcgctagctcttttttttttttttttttttgagacagagtctcactctgtctcccaagctggagtgcagtgacgcgatcttggctcactgcaacctctgtctcctgggtttaagcaatcctctcgcctcagcctcccgagaagctaggattacaggcatgtgccaccatgcctggcaaatttttttgtatttttagtagagatggggtttcaccatgttgcccaggctgggctcgagctcctgacctcaacaatccacccgccttacaggcgtgagccaccgcgcccggcctagctaactcttttaagtagaggtgtgacatttgagttttgaaaagatgatgttggcagcttttgcagaagggaacatcgataaccagttaggtgttttgtttttgttttttgagacggagttttgcttgttgcccaggctagagtgcaatggcgcgacctcagctcactgtgaccttggcctcctgggttcaagcagttcttctcctcagcctcccaaatagctgggattacaggcgcgccaccacacccagctaattttttgttagtagacacggggtttcaccatgttggccaggcttgtcttgaactcctgacctcaggggatccacccacctcggcctcccaaagtgctgggattacaggcgtgagccgctgtgcccagcccaccagttaggtttttaaaagcactggtactgcagtaaaaccacaggtgtatgtcaaaagcctttatgctgggggaaagctgtgccacttgggttgaaggaggcaggcctccagcttctaagtgccctggggcctctgtagagggccatgaggggccacaggatgcagggagctggagctaggccctggtagtcaccatggaggaggagaaacaaggacatccaagacctgaggctggaaggttctggagagaacacaagagaaaaacaactccggagcttccaacctcaagtagggcacagggagacaagcgggtgggaaaaggccacaaatggctccatgtgagtgaggggcagaaagaagaggatgaggtcagtcctctgggggtgtcatctttgaacagcagttgacaggcagtgggtgtgaaggtctatatggcaaggagctacacacgagggaggagagaggtactctgaaaagtttgcagagtgggtaggaaatgactgtggagcagtgaggagagtgatcagtgatggtgtagtagttagagagtgagtggtggtggacttgatggagagtgagtggtggtgctggagtggtggagagtgagtggtgatggtagattggacggagagtgagtgtggtagactcggggacagtgagtggtgatggtagattggatggagagtgagtggtggtaggactgggggagagagagtggtgatggtggtgtaggtggagagtgagtggtgatggtggagttggtagagtgagtgtggtgatggtgttgtgggtggagagtgagtgatggtagtgttgtgggtggacagtgagtggtgatggtggtagactggaggagagtgagtgtggtgatggtgttgtgggtggagagtgagtggcggtgctggagtgggtgatgtagggtcacagaaggaggaaacagcctagaaggtggctgcctttgatggtccttgagtgggcccagctggagaaatggtgagaaggattaggtttctgttgtcttgctcagggactttttattttattgcacttatttgaattaaaatggtaaattcaaatggaatatttgtgtttatactctgttaagtgggagaatgtggagaacaggagtcagctgccatacggccacctggctggctccgggaacctgaggcctggtcttgcccagcaggagcgctggcatagcatggatcacttacagaaatttatgatcaagattatgggctgctcctggcaatatggggaggatttccttgctgtggggactgtctgtttccatgcctggcccacccggtctgtgatagcctcaggtgcagtcctgtcttaagtttggagacaccctgggaggtccgtacagactctttgagtttctgaactgtcctcgaaacatctcaggccctccgcctcagggcctagggaggctgtcctctggttcctgaacagggtggctctgacccgcagatctgtgggctcccgttgcaggtaccggtggtgctcggaaccgtcctcagattcagtcttggaaggtgctttggcacctccttagagtcggacagacccttgtcacgagtcagtccagctgcaggggctcaagttgttctagagctgggctggcagggcccttgggtgagggagtgtggcttggcactggcatctcagcctgcggccaagtttcctgcctgcccaggcagcatgacccttggtgggatcaggcagagctctgcctctcccctccctacctcggaacatcctgtcgtcacacacgattgtccagtgtcatgaaagtttgtaagtgggaaggcaggcagatgatgaattcatcaaacattacagggatgcttttgctgtaagacttcgggatgtagcccgtgtggggctgtttctggggtcccgttcgcctctccaagctcctcctgccattggtaaagatgcagggcatctgaactcgctcttgggctgtgcgggcacttggacctggtcagctccctgtgcagagaacgtggctgtggacgtcactgcccggtattcacgtgccttggttgtgaaagccgttctgtggtgcctgtttgtgtcctgtgagtttatggggaaatcctgaaattgagagctggggaccaagagaactgtgtgcgtcccaccatggaggcgtttgagtgatgctgtcacgaggctctgctaatgccaagaggggaccaatgagctcctctaagggtctaccaccaggtgtccttttacagacctggatggtgaagttcaggcctgaagaggtgaacctgatgcagcaacaaactgctgtttccttcagtgcttgaaggagtgagttctgggaacaggattcagcgactcaggccttcttttgtcctcataaagaaacaactttacatttgaggttaagaaggttgtcagtttagccccctcaggtttaagtgttgaagaaatctatgatgacgtgcttgtttttacaagagtcttttcatatttcaggattttttttttctacataggatgaggttagagaaactctgaagggatattaaaaattagaaaattataggttgggccgggcgcagtggctcacgcctgtaatcccagcactttgggaggccgaggcaggtggatcacaaggtcaggagattgagaccatcctggctaagagggtgaaaccccttctccactaaaaatacaaaaaattagccaggcatggtggtgggcgcctgtagtcccagctactggggaggctgagttaggagaatggcgtgaactcgggaggcggagcttgcagtgagcagagatcacgccactgcactccagcctgggcgacagagcgagactctgtctcaaaaaaaaaaaaaaaaaaaaagaaaaagaaaattataggttaattaaaagttttgcccctgctgggcacggtggctcatgcctgtaatcccggaggccaaggcgggtggatcacctgaggtcaggagttcgagaccagtctggccaacatggcaaaaccctgtctctactaaacatacagaaattagctgggcgtggtggcgggcgcctgtaatcccagctactctcgaggctgagaaggagaatcgcttgaacccgggaggcggaggttgcagtgagccgagatcacgccattgcactccagcctgggtgacaagagcaagacttcatctcaaaaaaaaaaaaaaagaaaaaagttttgcccctaaaacatgctttaaaagaggtattataggaacatctggtataaaattcaaagaataaaaaaggacatcttttttcttacataatcagctctttgttagctctttacttttggtatttggaagaaatctctggagttcgttgtgtaagaattggaaacctcacctttggtgcacagctcgatttgcagtagaagtatcaggtgctctttaggggatgttaaaaacttttcactcttggtatttacattaaaaaatactttgttgtagaacaattagaaaatccagatttgcagttgatatttagcttgacttacagtgtggctttctgctgtttgtcataagagactagatttgtcaagttttgcttagagaggaggactggtagcagcaggtggcttagactacgtgtggggatggatctgcgaggggaagggcagatgtcagcgttggctgaattagaggctgaattaggtgacccctcatcccccaggtgtcttactcagatgattctggttgttcgggtactggccatgcactgctctctgtatctttgtgtgtagcccaagcctggaaaagcatccgccctttgtacctttttcccgactggctgagattcccgcagcatcccgactccgcttcagggctcctgtgaggacagggactatggcttttaagttgtcgcacaggtcatgggcactattcacatgtgctgcaggtaattttgagactcaaggatgaagagttatatctgcctcttcccgttagtcttttatgtgaatcctgtttgtttgtttgtttcgagacggagtttcgttcttgttgcccaggctggagtgcaatggcacgatcttggctcaccacaacctctgtctcccgggttcaagcgattctctgacctcagcctcccaagtagctgggattacaggcatgcgccaccataccctgctaattttttgtatttttagtagagacggggtttcttcatgttgctcaggctggtcttgaactcccgacctcaggtgatccgcccgccttggcctcccagagtgctgggattccaggcgtgagccaccgcgcctggccatgaatcctgtttttctatggtccagtttctaagggattctggtctgatgaatgaaaaccttgtgtgtcccctgtggctttgggatacagtatcttttaacacaggtgcttgccctgtgcaccctggtcttctgttcattaacatcgcgtcactggggtctgaggaaaagagacagtgtgatccgctccagtgaatggggaagcaggagagggtcagaaacctgaatgggtcagcccagaatccagcattgccaacacatccctggccctcccctcctgcccaggtgacaggtgtggcatatgctggtcctcagccctgcccaggagacagttgtggtgtctgtgggtcttcagccctgcccaggtgacaggtgtggtgtgtgctggtcttcagctgtgcccaagagacagttgtggtgtgcacgggtcctcagccctgcccaggtgacaggtgtgctgtgtgctggtcctcagccctgcccaggtgacaggcgtgctgtgtgctggttctcagccctgcccaggtgacaggtgtgctgtgcacgcgtcctcagctatacacaggtgtcaggcgtgatgcgtgtgggtcctcagccctgcccaggtgacaggtgtggtgtgcgcgggtcctcagccctgcccaggtgacaggtgtgctgtgtgtgggtcctcagccctgcccaggtgacaggtgtgctgtgtgtgggtcctcaccctgcccaggtgacaggtgtgctgtgtgctgatcctcagccctgtccaggtgacaggtgtgctgtgcacgcgtcctcagctatacacaggtgtcaggcgtgatgcgtgtgggtcctcagccctgtccaggtgacaggtgtggtgtgcgcaggtcctcagccctgcccaggtgacaggtgtgctgtgtgtgggtcctcaccctgcccaggtgacaggtgtgtgtgcgggtcctcagccctgcccaggtgacaggtgtgctgtgtgctgatcctcagccctgtccaggtgacaggtgtggtgtgcgcgggtcctcagccgtgcccaggtgacaggtgtgctgtgtgtgggtcctcaccctgcccaggtgacaggtgtggtgtgtgcgggtcctcagccgtgcccaggtgacaggtgtgctgtgtgtgggtcctcaccctgcccaggtgacagttgtgctgtgtgcaggtcctcacccacccaggtgacaggtgtggtgtacacgggtcctcagctgtgcccaggtgacaggtgtggtgtacgtgggtcctcagccctgcccaggtgataggtgtggtgtgcgcgggtcctcagccgtgcccaggtgacaggtgtgctgtgcacgcgtcctcagctatacacaggtgtcaggcgtgatgcgtgtgggtcctcagccctgcccaggtgacaggtgtgctgtgtgctgatcctcagccctgtccaggtgacaggtgtggtgtgtgcgggtcctcagccgtgcccaggtgacaggtgtgctgtgtgtgggtcctcaccctgcccaggtgacagttgtgctgtgtgtgggtcctcaccctgcccaggtgacagttgtgctgtgtgcaggtcctcacccacccaggtgacaggtgtggtgtacacgggtcctcagccgtgcccaggtgacaggtgtggtgtacgtgggtcctcagccctgcccaggtgataggtgtggtgtgcgcgggtcctcagccgtgcccaggtgacaggtgtgctgtgtgcaggtcctcacccagccaggtgacaggtgtggtgtacacgggtcctcagccgtgcccaggtgacaggtgtggtgtacgtgggtcctcagccctgtccaggtggcaggtgtcctgtgtgtgggtcctcaccctgcccaggtgacaggtgtgctgtgcacgcgtcctcagctatacacaggtgtcaggcgtgatgcgtgtgggtcctcagccctgcccaggtgacaggtgtgctgtgtgctgatcctcagccctgcccaggtgacaggtgtgctgtgtgctgatcctcagccctgtccaggtgacaggtatggtgtgcgcgggtcctcagccctgcccaggtgacaggtgtgctgtgtgtgggtcctctgccctgcccaggtgataggtgtggtgtgcatgagtcctcagccctgcccaggtgacaggtgtcccgtgtgctggtcctcagctgtgcccaggcttgggctgtgggtgccgcccgttcccagtggacatggaatccttgtgttactgagtgacctgcgtgtgctggttgctgcaccagcgggcttttctgtcgcagttgctttttaattgtatccattaagtagactttccacaagaaaataatatgacttactaaaaaaagttcaagtaatatttcttctgattataagagtaatcttagttgcagaaaatttggaaaaattctaggaaagcaaaaagaagaaaatgaagtcacgttcatatgtgagctgaattgttagggtttcatagcatatgcctgttggatttctatttagccgtgtgtaataaaggcagcttttccaagatgggaatgtgctgtaccttctgtttctaatcttttcacctcagtatattgtcagtgttttctctggtcagttatttttttctaccatgttttcagcagctgtatgtttttggtacgttggggagtcgtagatggtcagttactgaaaaagtgggttaacgtgggagataattaaaaaaaagacgctgtacctaaacacttcattttacattcaaacaaatgtgcatctggtccccaaatctcttggctctggactgaacgccccttcttggagagtgggccaccccttcaagccacgcccaccatactgggttttgatttctgtagactgaatggagaacataaaagacatctcaggacacggagtgcagcctcctgggttgtttgcagttttcccaggatgctgctaacagtgccactggtatagaggggtgtctggaatgagcaaggctgagtctgagacatgtggatctgtccgagagagtcctgtcagcctggtgctttacaggaaaggcggtggagttaggagcgctcttcctgctgcatggatgtgtctcagtaattacccactcccctgtggttggggattctagtggtttccagttaaatcttcccaaatttgcacaaatccaggatgagtcttaggatgaattcctggaggtgaaattgcctgtgcgcgtgcatgtctgtgagtgcagatgctggtcttttcaggtcgctttcagcacagtgtgaggtatagccgtcaggctttttagctgctgtgtagtcatttacttcctctccttgaaagtattaatggcggccgggtgcggtggctcacgcctgtaatcccagcactttgggaggctgaggcgggcggatcacaaggtcaggatatcgagaccatcctggctaacatggtgaaaccccgtctctactaaaaatacaaaaagttagctgggcgtggtggcgggcacctgtagtcccagctacttgggaggctgaggcaggagaatggtgtgaacccaggaggcggagcttgcagtgagccaagatggcgccgctgcactcccgcctgggcgacagagtgagactccgtctcaaaaaaaaaaagtattaatggctcggagtaacttgtatgggacttattttaggctccactatttcttttgcctttaagaaaaatcaaggcttgaatgaaaatatttcgtgtcaccactattgatagaacccaaattatattttgcagggaagcaggatgaagagggagatgaccgtggtgggagttcagcctctgactttgttttcatgcctgagtttgaggtcatatgtcttacccagttattgactcttggaggccattcctgctttagggcatcctttgactccgggagtcgtttttaagctgaggggccttatctggaacgatgcagcatggaggacagatgtctgcctcggtgtcatcccggtagcccgagttgagctggctgtggatgaggggttcctcttgcttcaggagaccctgggtgtcccctccccagcacggccaggttggggaggaggagtcacacatttgacagctcacggggtgtgcagccacagaactggaagcctggtctgtaggctccgtgtctgggagctcttcaggccagcggtggagtcggctagccacgatgacttttgcccggacttaacctcttttttctctaacaaatggaaaagcagttcccattggagtggccagaccaaatcctattctggggtggaaggggatgaaggtggtcagcatcgaggttgatcttgatgccagtccccatcccaggctgtggttccagtggcatttatcacatgtggatgctgatcctggaagccctgcttcgtgtttttgggcatttgttccctggagccctgtttttgctcactgttgagacagaaaggctgcgcgtcccctcgccccagcctgtcctgagcttgcctcactgtgcatccttgtgggtgggcgtcaaaccccgcacctgagtctgctgcggctctggtgcctgcccggcgccattgtcagggtgggtgtcctgggccctctggataccccctgtctggccggggttgccgctccgttctgaccccaggccaccctggaggagggtttctgagagtgccggtggctcactctgtccttggatgacttgatttttgttaaaatggaaatggaaattctttctaaaagggaaaagagtataatgtaaaaacttttccagaagagaaattagattaacatattgttatttttaaagttagctgctatgataaataaatagatgaatggagatggtctccacctcccacaggctggcggtatactcgggcgagggctatggggcggctcttccctgaggccccaggcctggaccccgtcgcgctgtctggcagcgtgtgctgcatttccctctggaggattttcccaccggaacctgtgtgatgtgttgtggaggaagctgtgtgaggcaggggtcccggggcctgaacggctggaccttgctagccctgcgacctcaggtggggactcctggcctctgtgtgctcgcctgtcccacgtgggcggccagctgccctccctacagggcagtgagggagaaaggagggcgtcagctgcttgccacgtcctggctgaacttggatggattcaaaagagtgaacataaggctttgacgaaattaggagcacctcacaggcctgggcgctgtgtaagacctcctcccagccacgaggggctgatctgatcagagctggagggacggccattgccgtgtgtccaatgtgagggctctgagctcaggagccagcatccagacacgctggggactctgcggcctctgtctttgccccagtgttgcacagaggggccctggctttccctgggcactgtttagaatgattgagggggtggcaggtggccagaaacgggagaggtggagtctccgaggcagcaggcctcccctgcaggctgctgcttccaggagggctgcaggcacgaggtgttcaaatgcagcagtgacttcataagaaaagggagtggagccgccgacatttcaggtgagttgtcatcaagagtgcagaatccaactgtgttgggagccacttgctggtgcctggccaagttcccgtctggtccctctactccccaccaccccagccctggaaaaccgtgcctgccaggttcataccacacaacccggtgcagcccaccccaaagacagcgggaggcaggatgcaagcacctttttaacggctgtggaactgatgtatgggttttccaggcagttttgcatttgtgcctgttgtagactagagcatcatttggtgtttttctgctggaaaagcaggctttagagtggtggctgaaagtctcattatagattatatagattagagcagcctctcctgggagagggatgctgggtgcctgccttccaagtgtctgctcatgagtggatgggccccaccctctgtgcctgctggggcttcagaatccactggtttcctgaaggttctggtgcccccgaagcacagccccacctccctaacctgccctcctgtgactcccattgtgtatgaacttacctcctcgctcttcagcttcccctgcctgatggctccaggctgtcccctgaggacctggggttcgtgttgccctcctgggtggagtctgcgtccccctttcctggtcatttaagttgcgtggggccgggaggaggcgttctctgcccctacgtggctcacactgtggttctgtggccgccgtccctctgtccgctcggggtagccagcttcctctgactctttcttagggtgatgttgggcaccaccctcgcctgcagctcatcacctctggatggatcttgttaggtgtgtggcttttcccttagtttagaaaatgaaatcgccttattgctttgttcggttatgaaaatggaaagtttatttaaaaacgtagggtgcagaaaggtgtcagaaagtaagcagtcatctgaaatgacagtcaacggggctctgctgttaaggctttttggtgattgtttctggggatgccctagatgtgtgtgtttaaatacacatgtacagtacggaattctaaataaatgaactcacatgttttgttcactgctatgttttactcaacagtttgtcctaggtttttttttttcacatcaataaatataagcagagataattctaaaaaatttgtggaacgtttcagacacacacaaaggagagagattgtgctggtgcctcgtccctgtcacggacctgggtgactccctgccgggccagggtgatcattaagtagttattaaatattctgacatgtgtctctcagagatagtcattcactcttattgtcacataggcagcatttacatttctcaagttgtctcaaatttggaaagtttgtttgcattggagcctcgccccctccaggctgctggagtctggtctcgctgatgcgccctcacgtactccaccctgttgatgggctgccctggctgaatgttcatccttcgaaaccctcaaaggtgttgggtgttggggcctttgggagtgactagaattgagtgagggcacgcgggtgtagtcccccctgccctgttggatcagtgtcctgatagccagtccccacggcgagcctgcccttttcccaccttgcgaggcccaaggaggaggtagtaggtgcagcctggaagctggttctgccctgacctcccgcttccacatccaggaccgtgagagagaatccttgcacttagggctccaggactacgagagagaacccaggaccgtgagagagaacccaggaccatgagaaagaacccaggaccgtgaaagagaacccttgtgcttagggcttcaggactgccagagagaatccttgtatgtagggctccagaaccgtgagagagaacccaggactgtgataaagaatccttgcacgtagggctccaggaccatgagagagagcccaggaccgtgagagagaatccttgtatgtagggctccagaaccgtgagagagaacccaggactgtgagagagaatccttgcacgtagggctccaggaccatgagagagaacccaggaccgtgagagagaatccttgtatgtagggctccagagccgtgagagagaacccaggaccgtgagagagaatccttgcacgtagggctccaggaccgtgagagagaaccctcgtgcttagggctccaggaccatgagagagaaccctcacacatagggctccaggaccgcgatagagaactcaggaccgtgagagagaacccttgcacgtagggctccaggaccatgagagagaaccctcacacatagggctccaggaccgcgatagagaacccaggaccgtaagcgagaatccttgcacttagggctccaggactgtgagagagaacccttgcacatagggctccaggactgcaagagagaacccagaaccatgagagagaatccttgtacgtagggctccaggaccatgagacagaaccctcacgtggggatccaggaccgcgatagagaactcaggactgcaagagagaacccaggacccaggaccgtgagagagaatcctcgcacgtggggctccaggaccataagagagaacccttacacgtagagctccaggaccgtgatagagaactcaggatggtgagagagaatccttgcatgtagggctccaggaccatgagagagaaccctcacgtagggctccaggaccgcgatagagaacccaggaccgtgagagagaatccttgcacgtagggctacaggaccgtgagagacaaccctcacacgtagaactccaggaccgtgatagagaactcaggactgcaagagagaacccaggacccagaaccgtgagagagaatcctcgcacgtggggctccaggaccatgagacagaagccttgcacgtagggctccaggaccacgagagagaaccctcctgctcttcccacttgatgcttttgctcactcggagcgtgtttgtgagatgagccttcacgctgtcctggatcttctccagatgcgaggttcttttctgctgcatccctcctctgtggtggcaccatctcctcttgcctgaggtggggaggtgttggcctccgtagctgagaagggctgggcctggcggtcacccagcgtctcctgcctggacttagcaacttgaaccagcagcgtctgtcacctcctagtgcctgttaggagcccaggtccccgttcagcctgtcccgggcggccctggcctgtggtgccctgagttggtctgggcaggaccactttcaaattaactcacccggctgctggtgggatcccgctccttgtgggctgttggtgggggtgtgttcttgcactttgccttgtgggcccctgcgtagggcagctcgctggtggcttcctcagggtgagccagcaaggtcagagtcggtctcttgaggccaccctcaccctcaccaggctctggtgcttggtgggagcagggcagggcagcccacttgggggcccctgcagggccagggcactggaagggatggctagggccaccggaggtcgtccctgagctctggggttgtgtttgttcccaggtgtgctctccagggtccaggaggactcgtgggagctcgaggctggggtcccaggcccggccccagaggaagggcctgtggccaggtgcgcggaaggtgctggctatttgtggtgggcaacccaacagccaaaagggaggagcagagagagttctccgcaggagttgatgggggagcagacagagttacccgcaggagttgagggaggagcggatggagttacctgcaggagtcgagggaggagcggagagagctactccctctgtagctctgagaggaggacagagctactccctctgtagctctgagaggaggacagagctactccctctgtagccctgtagcggacagaggagggacggagctacccgcaggagtcgagggaggagcggacagagttacctgaaggagttcagggaggagtggatggagttacccacagcagtcgagggagaagcggatggagttacccgcaggagtcgagggaggagtggacagagttacccgcaggagttgagggaggagtggacggagttacccacaggagtcgagggaggagtggacggagttacccgcaggagctgagggaggagcggacggagttacctgcaggagtcgagggaggagtggactgagttacctgcaggagtcgagggaggagtggacagagttacccgcaggagttgagggaggagtggatggagttacctgcaggagtcgagaggggagcggatggagttctccgcacgagtcaaaggaggagcggagagagttctgtgcaggagtcccgtgctggggccaggagggtcctggtagcaggcggggcccatcccagctgctgtttatagagtggcctcttccccaggtctcttcattcattatgcagtttaatgtgcagtgcaagtgttttctgccctggggtctggcgcaggccactccagtcctcagggggatccctcagtgcagctgggtcactttcttctcagctctgcttacttttgaaattaagattgttccttgacacttttatggctgttgcgtaggcagagttgagtggctgtgacagagactgggtgaccctcaagcctgaatcatttgcagggtcccccctgagaagtgtgcggccctggcgtccctctctccagccctgccctgggcctggcttgtgaacctgtgatgtcgggactgcagggcccctgctgggccgttttcttaccaggcaaaattcctgcttcacagagttgatgccaggggtgtcaaatcttttgttttccctgggccacattggaagaagaattgtcttgggccacataaaatagaataacactaacaatagttgagctaaaaaaaaaaaaaaaacgtataatttacaaatttgtgttgggctgcatgcagaggtgtcctggaccacatgcagcctgcaggacacaggtcggataagcctggtttatactctagtggggagctgttagcaatggaaatggtcagttgttcagtagattagaaagtgcagagaagagcagggcagagaagggtgagacagcgtggggtccaggtgtatgccccacctggctgctgtgtgttgcttgctgaccccctcatgggccttcgagtgtaagggagagtcctcttcatgccctcgcaccctcctgggtctctagggcttgtgtgtccccaggggaggagccccctggacacaccctggcgggtgctggctggcaaagagggaggcgttgagggcccgggcagcgcctccatcctggccaggcaagtgcagcttcaggttgtgagaaccgtggtcacctgtgtgttttaaagatgacggcagtgataggtccccttttgggcctggcatggaaattagtcacattcgtagaccctgtcacagagtgggcactggtgatgtcatcttttatagttcttattttcaattgattcagctttttctagcagcatggcgtgttttaggaacgtgtgttttgctgttactgctgctactcatagtatggttttgtctaatgtaagacagaagagaataatctactgttatctccatgaagtacaaacacaaatacagttgaatatagtttttctaatagaaattaaggttagttttagccaaggagcacctttgctgttggcttatatgttaatgtgtttagcaccttgaggtgtccttactggcaggtagggttgcatcttgagtgtaaagatttaacaggaaaataagtccagtgcacatgtcttaaaattaatagcaatttcagcaatatgttaaaaacacgaagctaggccaggcgtggtagcttacacctgcttgagcccaggagttcgagaccagcctgggcagcgtaatgagacctcgtctctactacaaataaaaaaaaattagccaggcatggggtgcatgcctgtcccagctactttggaggctgaggtgaaaggatggcttgaaccgggaaggtcaaggctgcagtgagctgagatcttaccactgcaccctagcatgggtgacagagtaacagcctgtctcaaaaaaaaaaaaaaaaaaggcaaattaaactatttgtgttttggtggtgcttgttactgagttcctgtgggtcacagcccacaagaaatgcaaggaggacccacatgagggtctttcctacagctccttacatgctcaagctggtaattgtggtctagtagtagctactgaatatcaacccataagaatgacttcatattaaaaaaccacagaggctataattgggtctgtcttagtaagttctaaagtgtcagtagagacccagactcacacccacactcctaagggcaggacacaggggaggctgtggccttggatcctgtgtggctgaaatggggttgcctattcaggtgctgagtttgagatgggagctggcccctggcctggagagtggggacttgtgccgaggccactttgctgttgcccagcaggccagcgtgcaccccttgcgcatcctgttgacacgagcactgagcggacagacctcggctgtcctgttaacaggtcccacttagcagcctccgtttacagccagcccgggacctgcctggcaggacccctggtagttctgtgtcataggagcccctctttgttccaggccaaccaggacaggcggtcaccccacatacagggttctgaacgttctgacgttacagcgggggtctggtgctgttgtctcaggcaggaatggaggctgagggtctgcacgtttactgctgtgtgcaggccccgtcccaggagcgaggtggagcccatgtgaggaggttgtggtctttgtaaaggtgagcagcagcgagtcatgaactgcaagctcttggtaggttttggacgggacgtggctggctgagcttcctcttggctgtgtggagcctcagcagggcgttgtgtttgacggcaaatgggaattaaatcatggcatcgtcactgtcttttttagggacgatgctgcacttagttcttgcgactcttcctgttgtcagttggggcgggggggcgtcataacattctttcctgtccttgggggtcaccttccaggaaaggggtgggtgtcagagagtgagtgtggctttgaaaggctggtgttgagtgggatctcgtttttcaggtgatggtgccagtgatctttccgtgcggaactaagtttatgcagggttcaagatccattcaaagataaattcagtgacgacctggttgatgaaaagaaccacttttttttaatgttctagagaaaactctttaactgctgtattacttatctattgctgtgaaacagacaaatgtagtggcttaaaacaacaataagctgtcttctcccacacagcggctgtgggtcaggagtttgggagtggctcaattgggtgctgctgtcctggattctcatgcagttgcagttgagatgttgcccagctctgcaggcctcaaggccagggtctgggagtctgcttccaagatgtctcaccctcgcagcagtagcaggaggagccctcagcaccaggaccacctcagggccgcttgagtatcctcacaccgtggcaccagctttcgccagagggcagggagtgacctagcttcagaagttgccccttatttccatcctcctgggggtcacagaagtcagttcagggaggagaaggtggcacggtggtgagtgtctgcaggggatcctgtgggaaagcagcgcagtggtgagtgtccgcaggggatcctgtgggaaggcggtgcggtgatgagtgtccaaggcggcgcggtgatgagtgtccataggggatcctgtgggaaggcggcgcggtggtgagtgtccgcaggggatcctgtgggaaggcggcgtggtggtgagtgtccgcaggggatcctgtgggaaggcggcgcggtgatgagtgtccgcaggggatcctgtgggaaggcggtgcggtgatgagtgtccataggggatcctgtgggaaggcggcgtggtggtgagtgtctgcaggggatcctgtgggaaggcggcgcggtgatgagtgtccgcaggggatcctgtgggaaggcggtgcggtggttgagtgtccgcaggggagcctgttggaaggccgcgtggtggtgagtgtccgcaggggagcctgttctggttgcttgggctgctgtcacaagaatgccatgaccatgaactgggcagcttgtaaacaacaggaatccaccgctcacagctcgggagcctgggagtccaccatcaaggccctggtaggtttggtgtccagtgagaaccacttcttggctggtaaatagcgtcttcttgccgtgccctctcctggtggaagggccagggagcccctttatcagggcacatactccatccaggaggctgtgccttcatggcccagtcacttccaaataccgtcccaagcaggattaggaggaccacatgtgaagacgccgcacagccttcctggaggctgtgtgccccagccctgccatcagctgcctgctcccgctcacgtctccccagttcacctgcctccagtgctggtttatagaacatttgtgtgacttcttcagatgatctgtaaacagaggcagtctaggtggtgttttgttttctaatttcctttatggaaaggagagtttgcatttcccttgtgattttgacacacattgtattatgaaatattttcagtgtttgtcaaactcggtgtggggtaagcgcatcccaccaagataggcgcttacaggcagccaaggaacccaccgtgtggtttccttttaggttggatttcctgtcttacagcctcatgttcctagttggaaattaaggttgagactgtagccaggtgtgcatttattcatccgccagctctggagaggtctgctttagaggccctgcggccccagaagtcatgcctctgagtccgtggttcttagctgagggtggctttgcagtgtccggagatgattctggttgtcccacccagggtgaatgaaggctgaagatgccgccaaacaccctgcagggaggctggcccctgacagagccgtgcaggcggcagcggcagcactgttgctgcggctgagacagcgcagggcgtcattcatccccctgcctcctgagcccagagcttctccaggagaaagctgaggaaaggggccagccgtgagctgcgggtgcttgccagggatctggtgacacctgggcatgtggctggtggaaccagcaggccaaggctgtggattttgaagtgctgtctgccatttccactttcagaagcatgagttgcataaggaaggggaatgaaagggtttttcctggagcaaaatgatgcttgtggcagacacagttggaaccacagacgatgccacgcttgtgtcagcagtgcgacactggcccacgtgtcgtccttgttctctcctcattgctgccgtcactgtgtgctgcgcatgccctgcagttaccccagagctttatgtcacaacattgaggctggcggagaaagaccggccccttcaccccaccttagacttcctggaagggccgcccgggtccacaacctggcccgttaactccctgggcagctgctggggaggaagaagcactgcccgcaaggaggggctgtgccagtgggtggcggtgacgggggccagtggtttcctggacctgggtttcctgggtgtgggctactcagggattgctgagttcccatcccagccggagctgaccaccaagtcgacggggcagagtgagaaacatccaggccacctgtgccgcagcccccatggctgccgaggtctcccctgggcaggggcagttggtgttctcgcagggcctgtgttggtgcatatgaggagtgttttctgtgagcagcggtggaacatttacagacacgagcgtcacagtggctgggcaaggcccgtggctgagtgcacggtggccctgggcggggctcctctgttggggcctgacttgctggcatttcatggaggccgcaggcagccgctcttcctgggggtcttccacatgccctgcaggcatggggaggagcagcccccactctgtctctgcccatcaggctgcccccgccaacagaaaaaaggcactgtgccacccggggcagtgcgttcccagtgccagtccctggccctgtactttttagcaggcgctcatgctcatcctggtgagggagggcgatagacagggacagcggtgcaaaatggcttcagagcctgaaccacggttgccacaggctggggctggagtgcagacaccatacaggggaactgggcagagccctggctgtgcaggcgggagggcagtcatcctccacagctgggacttgctccgtcagacccccagcagggcttcctccagctccacgcacacggggctggagcatgctgcactcccacacagatgctcgagctgggcccaagcctgaccagccctggccgaggcccttgactcctggcctcacccaccacgccttaacctcctggctgtaacttcctggccttacccttctggccttacgcacctggctgttctctcctggctgacccaccttgtgtttaacttctcggtcttacccagtgtgcttgctttcacctccttggtcatagtcacctgaccttaacctactttgctgtagtgtcttggccttcatctcctgtgggttctagcccaccatagccacttggccgtgtgtacctggctcagccacctgtccagacccactcgcctttttctaactggccgtaccctcctgccctttctctcccaggcttaacgtctcggccttaccaacctggcctggatggtagtgccctcatggtgaccaggacatctagcgtctcacacctgtaacacactaatgggtgccagcacagagccacgcatgccggccttcaggcaccatcgttgaccgcacgtcatgcttttcctggtgtcgtatgtttgtgccagcgtagccctctgcggggcctgtgccggtgctgtgtcaggtgtggtggcctcagagcgcctcctgggtgcagtcaggttcttgctccacggctcttttccttgatattgcgtcacacgccgtctgtgggcccctgggggtggtggagccttgatcccagccccttggtgtggccagtgggatgcagcccccctgcacatcctacctcacctggctctgtgtgcaggtggtcaatgggacatccacccacctcccagcaagtcccacagccagggctgggacggtgcctgctggacagctagactcagaaagtgcagttggacccggttggaacggcagtagtgactgtcttttttttttagcgtcctaggatgtgaacttgccgtggtcctcgggcttacgggcagccctggctttcctcatcttctgtggggaagtggagttgtgaagatgcccaggaaattgcccagtggtcttgcagtggtcgtcttgctgggctttgagtcttggctgcctcccctgtgtcccctgactgttacctgggtggcaccagggggtcttggcgtctccttgttcccatggtgtgtcccctgactgttacctgggtggcaccagggggttgtggcgtctccttgttcccatggtgttatctacggaagggtgcattcgggtgcctttaccctcagcgaaggcagcaaccctcatcgctgccccccagccccactgcctgaggtgcgtggcctcctgggaccctgggtactcaagcatgctgccgtgtgtgtgctcacactcaggctgccacgcctgtgctgccagcacgccactcccagaggccgcccctccaaggcctcctcttgggatggcttttccttcgcagagcccggcctctggggactgacattttgttgggactaggaagagaataaaagatttccatggctttctggagaagcaggatgaggttgacagttctgataggagtcccccttaatgtgtcttgccgtgtggctgtaccattacgcgtgtgctcttgccgtgtggctgtactgtcatgtgtgtgcccctgctgtgtggctatactgtcatgtgtgtgcccctgctgtgtggctgtaccgttatgcgtgtgtgtcctgtgtggctgtagcatcactcatgtgcctctgccatgtggctgtaccatcacgtttgtgtgtgcttgctgtgtggctgtactgtcacgtgtgtgccctgacgtgtgactgtactgtcatgcgtgtgcccccaccgtgtgctgtaccatcacacgtgtgaccccgctgtgtggttgtgccatcatacgtgcccccactttgtggctgtgccatcacacatgtgcccccgctgtgtggctgtgccatcacgtgtgcccccgctgtgtggttgtgccatcacgtgtgcccccgctgtgtggttgtgccatcatacgtgcccctgctttgtggctgtgccatcacacatgtgcccccgctgtgtggctgtgccgtcacgtgtgtacccctgctttgtggctgtgccgtcacacgtgtgtccttgctgtgtggctgtactcttacctgtgccacacttaaatagaatgtgtttaacattctattgtgaacattttcctcatcattacaatcttgatttttcaagactgtgtggattctgtaagtcatggctaattcctggtggacggtgctgttttggccctgtaggtgccatggtgatagtgacattccttctccggacctggcgttctcctggttgttcctggagttgcttgcttaactgtggtccttctgcctttttatgacgttatttgatagaacccttgagggtggttttaaacacccctagtttcgtagcccttttagctgtcatatttattattgttttgttgctttccgcaggccggtctaattgaagccaacggagaactcaaggtcttcatagaccagaaccttagtcccgggaaaggtaagggcacctgttctggacacactcttgtgttgatgaatgcatgaagcttcacatgtttatgaagctgttgacgctgaagcctcttgctaatgatggcatctcctgcatgggcacctttgtgctccgggaacccaggagggtgggcgtaggagccttctagcatttagaacacagcctgcacacacaccagtagctttgtggattttgaattctaaggtatgtatactatttgcaaaagtttagaaaaggtagaatattgtaaagaagaaataaagatagtttgttttctctccacccaaagataatgacgtttcagctgtggtgtgggctcttccagaggccggcctcacctgtgctgtttgaggaaagatgggcctaccatggtgcatgccttctgcgaagcaggcacttgccacctttaacgcttcgcgtgtgtattttactagctcttgaggaagagccgtttttcttgtcttggggaatccaggggaggaagtcagctggagaggttgaagccacctcttccagggtcccacggttggtagtttccattttacacctcggagtggcgctgtggtttacgttcgtgaaggtgtgtgtgctcacctggttacttcctgggtaaactccttacctgtgctgggtcagggcacgccatttagaagctttgatgtgcgatgcttggcccctcgtgagaggctgtgctgtgtggatctgggattgcgtgcagggtagttcgttgtggtttgttgcgatattcctgggagacaagcttgtggaagagcttgctttgtcccaagacctgtctgcctgcagagcctagtgggtccactgagtgccctggtcgcaacatccacgtggtcgcatcagcccagggaggagcccagaggcctggatgtgtttccgttttgggttcctaaaaggaaccttaagatttttctaattattcccatatataaaattagctttttttactcttaacattgtgacccttgtaagtgacctctcagtgcttgccatggctctggggcgtgggagtgtggtgaccaggcccccacctctctgctgaggcttggccttgccacccgtccctttctgtccagtgctggtgcgggcgcccatggtgccatctgcctccaacccctacatgctgtggatccaggtgtctccttggggcctgtccctaggtcctgctctggtctcttccttgagagaacttggctttgtgacctgagccagcctgcagcctccccagcctcctgctgtccccgggccctgtcagagggaggtggtgggactggccctgctcttctgctgaagcaggtccttccctgccgcttttctaggaatagggaccaaatctacgcagcccttttgggattatttatgagctttttgtcttgatcatttgaggattcacagattgcttgagagaaatatcgttttagtgtaactaattgaacacttaaaagtggacaagttgcaggcgtgacattttctgttcaagtggtgaagcagaaataacaataaaaaagttcaccattttatttgcttggaaatgatgaagtctgttactatggtgttgaatttgaatttctcttgttaggttacatgcagtaggctttcttaccacatgtgggctgtctccttttccattcttactcacaaatctgtgcttgaatctgtaacaagtttaattgagctgaagagttgaattgcagggattaggaaggaacatattctgcattcatgacatagctgaaaatgttctggttttgagccggcccagcagggccgtgcatttcccctcagctcgccccgcgtgccccggcccccagatccctcccacatgagccttgggacggtcagttctttccctggatcgccggcagcagctcctggacctcccctgccctcacctggtgttgattccaccgcacagacggtggtttttgttgttgttgttttggagatggagtctcactctgtcgcccaggctggagtgcagtggcgccgtctcggctcactgcaacctctgcctcccggattcaagcgattctcctgcctcagcctccagagtagctgggattagaggtgcccaccaccatatccagctaattttgtatttttagtagagatggggtttcaccatgttggtcagactggtttcgaactcctgacatcatgatccgcccaccttggcctcccaaagtgctgggattacaggcgggagccactgcacccggccacacgtggttattttaaatttgcttttgaatcagtgacacgttcatgtttttaaattttgaagtatgaaaaggtgcagagaggtttccttttttcctcttctgtccatgcaggtgagcaccaatgttcacttccggtgttcgttccagagaattctgtttaacaaatagaatggtttgttggtgtttgcatgtgtctgtgtcaatatgtgtgcatgagtgtgtgtgaggaatgtgtgtgtcactgagtgtgcatacgagtgtgtgtgtgcatgagtgtgtgtgtgtatgcgtgaatgcgtgggtatgtgaggagtgtgtgtgcatgtgtgtctgcgtgaatgcgtgggtatgagtgtgtgtgtgcatgagtgtgtgtgtgtatgcgtgaatgcgtgggtatgtgaggagtgtgtgcatgagtgtgtctgtgtgtatgcgtgaatgcgtgggtgtgtgaggagtgcttatcagtgcattgtgcgtgtggagtgtctgtgcgtgtctgttcatgggttgcatatgtgttgagtgtgcatgtgtgttgagtgtgcatgagttgtgtgagtggatgtgagtgtacctgtgagtttgcgtgtgtgtgcatgcgtgtgagttgtgtgcgtgtgtgtgcatgtgaattgtgaggagtgcatatggagtgcatgtgttgtgagtgtgcatgagttcacgtgagttgtgtcagttgtgtgcgtgcgtttgtgagttgtgtgtgagatgtgtgttgtgtgcatgagttgtgtgcatgagatgtatgtgagttgtgtgcatatgcacgtgtgagttgagttgtgtgcatggagtgttatgtgcgtgtgcatgtgtgtgtgttgtgtgcatgagttgaatgagttgtatgtgtgtgttgtgtgcgagttgagtatgatgtgtgtgcgtgtgtgagttgagtgtgagttctgattgtgcgtgtgtgtgagttgtgtgtgtgtaagcgtgcagtcctcgcctccccaacagacacctgtcttcactagtgggccccccttgcctctagttgggagtggggtggtccaggcagggtcctcggcgcccttagatggagccgttgcagctgctttttgagttgccctcggcggtgccagtgagcaaggctctgccttcctccgtttgtgccctgggagcccagggcatggtcggtagcactttgagggctgtagaggcctcccttgagtcagaccttgaggaaggacaggagctgtccaggtgagagtggatcaggggaaggtagaggggaccagcccagccgaggctcctcatgggcccctggccctggtcctggtcctcccagctccactccacgtcacagcctcccggggccactgtgtctcttcctgctgctgctgtggggggcctgtgtccagttccccactgtgtcagcgttctctaaagtagcagccagtgagcgacgggaacctgggtggggactcactacaggacccacctagccatagtggggccgtcagggcggaacctgcagggtggttggtggtgaattccttttctgggaaaatgcaggtgttgctctgaaagccttcagtgggttagacgaggcccacctgcatcgagcacagtctcctttgcttaacggctcctctttgaggagctccgcggcaagttctcggctggcctttggctgaataatggatagagcaccgtcaggttgacacgtaaaactgactgtcacacccttcgaggcttagaaggctgctttccacccagagaaatgcaccaaactcgagacattttgcatccacaggctccccaaggatgggagtcccaatgtggaggtttggcaatacatcttacgtgggccattttagttgtggctgtttgggttgcctctgattgtttcctgagagcaaaatgctggtgtgaacatttgcacacacactttgtgtgtctggcagttccacttcctcaccagcatttggtagtggtgggtttttaggctttctgtgtcacaggtgggctcttactcatatcatgcctacggccccgcagtgctgataggagcttttcctctcgctttgcctggtccaccctgcccctgtctgagggtgacctggccccatggctgcctgcactctcctccctgatgtgtgcaatcctgcccggcctgtgcctcgtcctcagggaggccatccgggaggccacagctggcctggaagtgtgcttgtctgtctctacctcagggctgcttgtgcacctcctgtacctagaggtgatccaggctcactgagaatctgcccacactgttccacacgtttaggccaggtgcaggggctcacaccagaaatcccggtgctttgggagactgcagtgggaggattgcttgaggccaggagttcaagaccagtctgggcaacaacgggagaccccatctctataaaaaattttaaaaaaaagtagccaagcatggtggcgcatgtctatagatagtcccagctacttgggaggctggggcaggaggatcgcttgagcctgggaggtcgaggctgcagtgagttgtgattgtgccactgcactccagcctgagtgacagagccagaccctgtctcaaaatgagtaggctgggcatggtggctcaagcctgtatcccagcactttgggaggccgaggcaggtgtatcacctgaggtcaggagctcaagaccagcctagccaacatgatgaaaccacctctccactaaaaatataaaaattagtggggcgctgtggtacacgcctgtaatcccagctactcaggaggctgaggcaggagaatcacttgaaccctgtaggcggaggttgcagtgagctgagattgctccactgcactctagcctgggtgacagagtgagactctgtctccaaaaaaaaaaaaaaaaagagtaagtgtgtaagtgtacatttgagcgtgcactttcgcagctggtgcgtggagtgtctgtcctctccatgccgtgtggtggctcctgtctgtagtcactgggacccttccagtcacggtttcggtggctgcgttttgctaccttttgttatttgctgccgttttctcgtagagtgctcatgatttttaacatagtaaatccgtggagagcgctcaggtacagatcatggctgtgtgcagtgcaggctcaccgtctgcggcgccaggccgggtccctcgtttgctgctcatctgggagtgcccagcacatgtggccattgattatacatatcctcttagcccagaatgactgcttactaaagagcatctccctttgttgtgtctttactttcctcctgcttcaatctcatatctgtcggctttagggttctaagtggaggaggaaatttagcaatgatgtgtggtcagaagcttagtgttgcttacgtaattcctcactcgtgaccgtcgcctgtgaactaactgtgccccttgccccccgacacacgcactggtctttgtagagctgttaggaagggggttataggaagggagggtataagttttggttggcctcttcaaactgccagcctcctacaaaactgtcaggagaggccatcagctttttctctctttgtatttctctgtttttaacccgaaggatgttaaaagcccagcctctgtttttagcccagtcatgacatttctgtggccgtaacccttgttccaggtgtgagatggtgactcttggatgcagggtagcctcccagagctttgtgtgtttgtatagagaggtttgtgggagtgacttgagccgtgctgtgaacttggactagcacccgtgtgttctcaggagcgggtcctgctggaggcccagccacgtcaggcacagtaggtgtgtgatttgtgcaacggaggcctctgataactgccagagtagatagcttttgtgtgggagctgcctcagcctgcattccaggagctcaggtttcctgagtctgaatggagtctggagagagcaatgtctccatggagcgggtgcctggctgtggtcgcttaggcaggagcttcctcctcagtgctgacaacagagaagaacattctgttgtggccagtcaagtgtgcacaaatgctgcttgcgagccagtcacagaggcactcacatgcagagccgctcacctgcagagccgctcacctgcagaaccgttcacctgcagagcccttcacctgcagaaccgttcacctgcagagcccttcacctgcagaaccattcacctgcagagccgctcacctgcagaacccttcacctgcagagccgctcacctgcagagcccttcacctgcagaacccttcacctgcagagccgctcacctgcagagccgctcacctgcagagccgctcacctgcagagccgctcacctgcagagctgctcacctgcagaggggttgtgcttggccagataagcaaacaaaacatctccagcatggtgggcaaaatagtaactcttagacatctggctctgacaacgtaaagatgttaaaattgtttttcagaaaatacaaaactgtatggtttcataatttatcttaagccctatagatattaatagaataggattagtaatgataaaaacgtgaatactatatttagactcctttttctgttaatggattatagcaactgagaccatatatattcttaactagttttcttcccaagaaaggaattctccatttaaaatgctgtatataaaatgtttttaattagttcatttgaaaaacgctgtgtagtgccttttacagttgaaacaatattatttctattgagttggcttgtgggccatgtcttcatgtgactcagcttgtccctgaaatgttagccctcctccctcccatgcatagattgtgtggcagtcttatcaagaaaatgtgtggaacactctactctacttatattgccagattaaaactaaatgattggctgggcgtggtggctcacacctgtagtcccagcactttgagaggccaaggcgggtggatcgcttgaactcaggagttcaagaccagtctgggtgatgtggcgaaactctgtctctacaaaaaatacaaaaattagccgggtatggttgtgcgagcctgtagtaccagctacttgggaggctgaggtgggaggatcccttgaaccgggaggtggaggttgcagtgagctgagattctacaactgcactccagcctgggtgacagagtgagaccctgtctcaaaaacaacaactactactactaattgaaataacattctatcctgaggtggacaaaaaaagtggtggggagcggcagcctggctgccactggtgcgtctggcctggaatgaccacttggggagctgggtggactctgggacagcggccgctgggacccgggcttccctggtggcaggtgtgccgaggaaaacacacagcatgtggttcagtaataacaaacagcattttcatatgacatctgtgttcatatgaccactttattataatggcatagcataacagcatttaaggaaatcagcctgacggctctatgtatgggtaaatctgaaacacaatgttggcagaattgcagaatgcgagccatataatatttgtctgtgtttcagacgcacacaaaaacaatcatttatagccttaggttcagcacatcctggaaaagtatgaaaaataaagtgagtacgtccctgcaggccctgggagttgcacacagggcagactcggggggaggctgaggatcctggggactgtaattttatttctgctctttatgtctctatgaaacttgaagcaagtatgatgataacagtgaattttaagtgtactggaataaaattgtcatgttattgtttgtatttgaaaagtttctcagtgaatagaaacaagaagcccggctgggcgtagtggctaacacctgtaatcccagcactttgggaggccgaggcaggcggatcaccagaggtcaggcgttcaagaccagcctggccaacatggtgaaacccttctctactaaaaatacaaaagttagccagtgtggtggcaggtgcctgtagtcccagctactcaggaggctgaggcaggggaatcgctggaacgcgggaggcggagcttgcagtgagccgagatcatgtcactgccctccagcctgggcgacacagtgagactccatctcaaaaaaaaaacaaaaaaaaaaaaaaaaaaagaagaagcccacccacccaggtctggccccagaagccactgccactgccctttccagcctgtacgtctgggtgtgggtctgagatgtattcagggaggggccttgctgctcgctgtggtcgggtggctgtgcaagctcagcccctatctccaggcccttctgaagtgctgctcggggccggacagggggtattcaccctcagcctcaggatttctttcttctccctgttactgatgtacgtaccctgccctctgtcccgtagagactcagctggtgacccaggggtgctgctgggttggtgtggtgtgccactcagaggtcctctgttggtttgtgtctaggctgggaggggccctctgtgcttggcaaggccttgggctccgaaaccctttacctgcagctggtgtgggggctcagactccaggtggacagcaggagtgagtggggaagctcaggggccctggatgtctgcctgcattcactcatcctgccctgggtaccagaggagggaccctcttccctctgtgtgtttgtctcccccttcctaattgtgaaaacccttagcgacccaccccagcctcacggtgctggcctctggcccagagggagagacctggttggaaggacagatggtgtaggcaggccagccggccggcctgtgggtggagcagatggagggcaggccggatgccccgagggtctcagctacactgctgtcccacagccccaccaccacctgaatccctgagtcctacccacactccctgatggggcaggaaaggggagccccagactgggatgcctgagtgtatgctacctgtggtgctggtggacgggcgccgtggcctggctgttcaggacggaaagagccgcctgggctgctgatggagagtgacagtgccactggcttttgtgaactcagaggtctgtttctttcttcacatttattgaaattagagactcgtttgcaaattttaaaagatgttatctttgtaatgaatcaactacatattcttgaaaactgagtgtttactcatctgtatgtgaatctgaaaagtgtttaattgcgtactttaaatcattccctgcatagtagaatattatttttgcttttaaaatgcctttccctggtaagtattacaccgtgtatatgtgcatccaatcatcactggtacatttcgaatatgtacaatctttacttttcaattgaatattctgaaaatacctttcacatatataaaacaataaaaaagtaaatatttgcttttcttaggatgcacacctttatttttggaagaaaatttcccaaagcagatcatcttattttagttccagaagagaattttaaatatgtgctgacattggttggtaaaaatactaatatttaacccagttgaatcaaaaggcaaatgtctttttaatcacttcctaatgatctgtcttggccaacttaggttattaagagaaattactaagtgtccttatgtagcacaaaattcattgtttaatatattttaaagaaatgcataaaaagcagtagatgttttaaaaatgcatgggttgtaaagggccccaaaatgaaacttcagatcgcaaaggcaatgtattcgaaagtctcaccgatgattcatgagtcattttggtgctaactggtgggaatgaagggagatgcctgtggggaggtccagggtcctgcagctctgcggatgggcggccgtccggggaggcccaaggtgtggcgagatcggggagttcttctttcctgatgttgttgtgacccgaaagtctgtgttttcttcacctgagagtatcatgtattttcaaatggggggctatccgctcagctcccccagccgtggggtggggtgtgggtggcaagccacccaggtgccgaggcaagagaccgaggacacgagctgttccagtataataaaatataaaacaagaatggttattccagatatagatcttagatatgattatatatgaatatcattaatcattagtttgtagcaattactctttattccaatattacaataatcctcactctacaatcataacccaggaaaaaccaggccatacagagataggagctgaggggacatagtgaggagtgaccagaagacgagtgcgagccttctgttatgcccggacagggccaccagagggctccttggtctagcggtaacgccagcgtctgggaagatgtccgttgccaggtggactgtggtctagcggtagcctcagtgtcacggaaaaacagcggctacttagcagaccgggaaagggagtttagagaagactctgttcctccacctcttgtggagggcctgacatgagtcaggctcgcctgcagttatctggaggcctaaccgtctccctgtgatgctgtgcttcagtggtcacgctcctagtccaccttcatgttccatcctgtacacctggctctgccttctagatagcagtagtaaattagtgaaagtactaaaagtctctgatatgcagaaataatggcgtaagctgtctttctctttgcctcctctctctctctgcctcggctgccaggcagggaagggccccctgtccagtggacgcgtgacccacatggccttacctgtgattggagatggcttactctccttatctttcccttttgtcttgtatccaataaatatcagtgcagcctggcattcggggccactaccggtctctgcgacttggtggtagtggtcccccgggcccagctgccttttcttttatctctttgtcttgtgtctttacttctacactctctcgtctccgcacacggggagaaacccaccgaccctgtggggccggtccctacagtggggcactgcgagccccttgctgcctctgtgtggccgcccacccttccagtgttgccctgacgcccctcccgggctgtgctgaccacccaggcctcccaacttgtttcccagggtgctcgctaccacctggtttacggtttctttgtttagttctctctgcccgctgatgccagtttttgaactttatcattactacttctgtttatgtgtaaatgttccaggacttttatccaccgccctgtccctaggaccttttgcataccgctgttggaagacagaggcttcacatctcctgcagaggggtctcccgcttgcttcaccagtgttctgagggcacctgcatgtttagagccgcagcctctgtggaaggcacactccttcctaggaacaaatgtggttctccttcctaaggaaaagtggattatcagatttccaaactagttttgcagccttatagagaaatgttgcgataaaaattctagttttaaaattctgttccataattgtcatagaatcacagacttttccaggccatggtccccaccagcacgttccatagcagacatcgccgaggggctggagcagtggatgatctgcctgggtcacctgggtggcgtcagcgcggccctgcggccctccccttacgggtttacattgggaatcaagcttcatggaggtgttgctcttgagccctggatttgagacagtacacgtggggaaagctaagcatctctaattgcaagcaccgtcttgcatttagaatggtcgcttgtagccttaacttagaaaaggagtctcgcccttgacctggtgtccttgtgttgcaggcgtggtgtccctcgtggccgttcacccctccaccgtcaacccgctcgggaagcagctcttgccaaaaacctttggacagtccaatgtcaacattgcccagcaagtggtaagcctcccgcaggagcggacagccgggatctcggtgtgaggtcgggatcggatgagccgtgtggttggggatgttcccaggtgtgcctggatttgggctccagttgcagcatggggcctttccctcatcagggagcccgtggccagtgctagattttccatagccctctgcagctgcccacgtgttgttgtgggagaggtgatggcgcccacagcactcctgtgtgccccagcccatgccatccttccagtaactggagggtggtgggtggggccgcggccccaaccagaggcagcttccttttagtgtcagagctcgaagctcttcatctaacaggggcttcttacgtgatgtggccgagcgttggctgtggccctcctggagacatcaggctgggaagccagagagggatagggccctggccgtggctgtgcgtttgccccggggcagtgacagggcagatgctgctcccttggccacgcacaggagaggggaaggtgggcattgggaagtggcgcatcccccctccccaggctgatgctggccaactgatgctgcttctcataatgctgtttcctgtctcgtgtccgccctctgcgtccttgccggtggcagcctactggagacagggagcccacacagaatcctgacctcaccagaaatggggccccaggcacttggtgggcaggtttggctgtgactggagctggtggtgagggacatagccatcccaaggctaggccgggcttccagtccttcctcagggacttgtttatggtgcctgagggctccttcctggtcctgagatgatgctgtggccccgcctgggcagctgccccagccctgttcctgccaaccctgggctttggtgatgcagcacctcttgcaccccggcctcctggcccactccaccccctcaccctgctccgtctgtgctgtggcccagtcctcttaaaaggattgaacacctccgggtgggatgagaacctgtccgttcactgtcaccaggtgtctctcaggcatacccaggtgtcctcacgtgtctctcgggtgtcctcaggtgtctcccaggcatcctcacgtgtccccaggtgtccccaagtatctctcaggcatccccaggtgtcctcacgtgtctctcaggtgtcctcaggtatctctcacatgtccccacgtgtctctcagggtgtctctcaggtgtcctcaggtgtctctcagggtgtctctcacgtgtcctcaggtgtctctcagggtatctctcacgtgtcctcaggtgtctctcagggtatctctcacatgtcctcaggtgtgtctcagggtatctctcacatgtcttcaggtgtctctcagggtgtctctcacatgtcctcaggtgtctctcagggtatctctcacatgtcctcaggtgtctctcagggtatctctcacatgtcctcacgtgtctctcaggtgtctctcaggatatctctcacatgtcctcaggtgtctctcagggtatctctcacatgtcctcaggtgtttctcaggtgtctctcacgtgtcctcaggtgtttctcaggtgtctctcacgtgtcctcaggtgtttctcaggtgtctctcacgtgtcctccggtgtctctcacttgtcctcaggtgtttctcaggtgtctctcacatgtccccaggtgtctctcagggtatctctcacatgtcctcaggtgtctctcacgtgtcctcaggtgtctctcacgtgtcctcaggtgtttctcaggtgtctctcacgtgtcctcaggtgtctctcacgtgtcctcaggtgtctctcacgtgtcctcaggtgtctctcacgtgtcctcaggtgtctctcaggtgtctctcacgtgtcctcaggtgtctctcaggtgtctctcacgtgtcctcaggtgtctctcacttgtcctcagctgtttctcaggtgtctctcacatgtccccaggtgtctctcagggtatctctcacatgtcctcaggtgtctctcacgtgtcctcaggtgtctctcacgtgtcctcacgtgtttctcaggcgtctctcacgtgtcctcaggcgtctctcacgtgtcctcaggcgtctctcacgtgtcctcaggcgtctcacgtgtcctcaggtgtctctcacgtgtcctcaggtgtctctcacatgtcctcaggtgtctctcacgtgtcctcaggtgtttctcaggtgtctctcacgtgttctcaggtgtctctcacgtgtcctcaggtgtttctcaggtgtctctcacgtgtcctcaggtgtctctcacgtgtcctcaggtgtttctcaggtgtctctcacgtgtcttcaggcgtctctcacgtgtcctcaggcgtctctcacgtgtcctcaggcgtctctcacgtgtcctcaggcgtctctcacgtgtcctcaggtgtctctcaggcgtctctcacatgtcttcaggcgtctctcacgtgtcctcaggcgtctctcacgtgtcctcaggcgtctctcacgtgtcctcaggcgtctctcacgtgtcctcaggtgtctcacgcgtcctcaggtgtctcacgcgtcctcaggtgtctctcacgcgtcctcaggtgtctctcacgcgtcctcaggtgtctctcacatgtcctcaggtgtctctcacgtgtcctcaggtgtttctcaggcgtctctcacgtgtcctcaggcgtctctcacgtgtcctcaggtgtctctcacgtgtcctcaggtgtctctcacgtgtcctcaggtgtctctcacgcgtcctcaggtgtctctcacatgtcctcaggtgtctctcacgtgtcctcaggtgtttctcaggtgtctctcacgtgtcctcaggtgtctctcacgtgtcctcaggtgtctctcaggtgtccccaggtgtctctcatggatccccaggcatcctcaggtgtccctggccctgtggagagctctctgtactgagctgttttttgttgtctagggcatctccctttggtctaatcatgttttcttcagagaacatgaccacataccagggatattttggtcatttttgcactttagtctttattttatatgcattcctgctatttccgtttatttaaatatgcttgaaattctctggattctttaacagatgttaggatatgagttttaagagagagtggcttgtgggtcacagccttgaggatctgagcaggattgccttccccgcgctcccttccccgcgtcccacttccctgcgccccgcttccccgcagcccccctccccgtgtgtgctcccacacagctgtcctgattgagcggttccagatcccaggcagcttttgtggccccgtttcctgcctgtggaaggtgacaaaaaacttgctctgcagaagttttgtggccattgaaagtagcggtttgtggaagccctaccacgtcatacggcttttcaaccacgttgcacagcagatcacggcttttcagtaaatgccattttgataaaagctaaaaattcagtttttgttttgcttgataattagattataggtttgcttataagttgactaggaattctaagtttgattttataggtgctgtgtgtcatagcagagtttgtctgggtgaataattgtagcaccactttcgtctttactgccggtgtgaatacactggggggaaacgaatgagaagattatcttattgatgtgctttaaacttcgtcactgaaagtcaagttcctgatttaaattcagctgttcgggtggagtttgtcattgctgttttgtgctttgcaaaatcccagtgatgggaattaaagctgacaaagggcaaatgtttcttaaacctttttatataccagaggtttacaaaaaactggactggctcattctgacacgaggggtggggctcagtccgggcatgtgagtgaaagcggtgggggaggtccttaggtctctgacctgcaccagtcagcaggcgcagggcttgtcaaggtcagggtcttttgaggtgcggatgcttgtgaagcctgtggtgctgcagagctcagcacgcgcacaggaacgtgtgcgggacagaggacatatgtgctcagccggcaggagcagcggcctgtgtgagcccctggggagaagcagccccccacccaggcctgtgtcccagaagtcggcatctgtggtcgcagtggcctttcctttgcagctgcgccactggccctgtctctctggacaccgcggttaaccttggtccatctctaggattctgtgtctgagtggggtcacactacacggagacatcgtaatctcagtttttagagtgtgtgaaattaaggtgcaaaaagtgtgcacttagggcagaagggatgccttaaatcaggagtccccaacccctgggcctgttaggaagctggccgcacagccgcctgagccctgcctcctgtcagatcccagcattaggttctcaggagcgcaaaccccactgtgaacggcacatgcaggatctaggtggcactccgtatgagaatcgaatgcctgatgatctgaggtgggacagtttcttcccgaaactacccccgactccggtctgtggaaaaactgtcttccacaaaactggtccctgataccaaaaaggtgggggatcgctgctttaaacaccaaggctcactgtgcagccagtgaggaggggagctcctgggggaggagggttggtctcgggcaaggtggacctccggcaggtcctctactgtgggatgcttccacctggagctgttttctaacgactgctggcgtggaagctgcaaaagctttagagtcgaaagactgtgtctgaagccgtgtaaagactgtctggagccgtgtaaagactgtgtctgaagctgtgtaaagactatgtctggagccgtgtaaagactgtgtctgaagccgtgtaaagactgtgtctgaagccgtgtaaagactgtctggagccgtgtaaagactgtctggagccgtgtagagactgtgtctgaagccgtgtaaagactgtgtctggagccgtgtaaagactgtgtctggagccatgtagactgtgtctgaagccatgtcatttactttctctgaagcgcagcttggattccagccgtgagcacagtaggaagggagaccccttatgacctgtggggcctgggtcacctcccctgctccccagcgagaggcgggtgagggagtcgtgagggcggagcccatcctccagagaagccgctgttaaatctaaggggtgggtgtccctggcgcctttcagcccctgcctgcctcctgctcccagaggctcctggatctcctggaaagccctggttggagtgggacccacagcctcccagctttgggcagtacccctcattgtgctgtgaccacttctcccttccagggtctctgcccaccactccagctagcgtggccactgcttccaatacctcctttttttccctaggggcccagctctgaactatccttcccggcactgtcccatccaccctttggcacctccttggttcctgttttccctgcgcttctgcccacacacgccctccagggcttcagtgtgttgccgtgcctcctctggctgttgagtgtggctcctggtgtagggaagtgaggccgggggcctgctccatgtctgttgaatgggagactggaaggcgtcctgtggcacaggcggccggcccgagttcaccggcttcctgtgcaccaggaaggaaacgcacacacctgtgccaggtccgggagcaaagcctctgtctcgttcctgggagggctggctccaggccgcccctgtgatgctgactcagctcacagggctggtgagcagcaggtgatgggtgaggagcagggacagtgctgcggagacacagtgaggggagctgccacgcagggcacgcagaggaaggtgcaggcacccttgcccagcactgcatgggccggatgccgcggggccttccgcagggagcagttaaagcaggagagtaaggagagcttcctgtaagacctggcctccgtaaacaacgcattcccagtgcactggtggctcgttctcagggtgcccctgggtgctgagtcctgtcttccaggaaaggttgttggtgagcaccattgagcacctggtgtgtacctgcctctggctttctcttcttcccaacttacagtgggtttgacctgtgattttgactttaagatggtccaaaagcaacatgcattcagtggaaactgcttccactgcccatacgaccgtcctatttttcattttgagtgtggtattcagtgggtctcctgggatacccacacttgactagagtgggctttgtgtgagatgcttctgcccgactgggctaacatgcgtgatctgagcacgtgtaaggtaggctggctaagctgtgatgtgtggtaggagaggtggatgacgtgcatttcgacttagggtattttcagctcatgcgggtttatcgggatgttccttgtaagttcctcgttgtaagtcagttcctcgttgtaagtccactctttgtgagtaggtttgctcctgcctggaggacagcggcacggtgacggcatctgttttggggccaagatccagtgccttgcgtggtcctgggattcctggggaagggagtggacccatgaggtgggttagaatcgtgtgtgggattctccagccccctgtacctgtgcgtgtggtatgcgcggagccagccagcactgcctggcgtggagctggcgggttctcagtctgacatcaactcccggagaatggcatctgctgaactcaacgtaggaagccgtgcggggccagcgcgctctcaggcagcctgagtggcagggtccttttgtcagctgtttggatctcccacgtggcccagtgccccagcagcacacacacacacacacacacacacacgcgtattgaacaaaacaagtttcacaggacatttatccacgcccaggagatttatcttttgtatggcttcattttgcagaaaattcacttgtttgatttcatggcctggtgatccacagaaggccgcactctgatgagtctctgatcatcggagagatgagtgtcaatgaaaagatcagtccttgaaatgtttttcttctccggagctgacaggtgatctggcctagggataattggaaagtgtccccgtcagctgctcccagggccaccgcaggtgatgcatttatccccgtaagaaggggagctgggggggcccagcttagagtagctcagggcatcggccacatgaagcccccccgccagcatacaggtgtccagctccaatccctttaacggaaactgcatgtccatacaagcagtataatcgctgaggcactttgatttgtggtgaattgaatgatttaacatttactgagaaatagtgtttccagtttagatagagtcgtgccacaagatctttgaaaagtcagagttgtatttgcctgtatgagggtgtccaggtattcacactcgaacattcattgttggaactaaagtggtaagaccttgtcaagagtcagaccagccagcatgtccctgaagggagagacagttgttgacaccctcaggtgtgctgtggggtggggcgggtgggtcagtgtccacactggcgttgcctctggtggttccccccagaggggcccaggtgtgtgagccccaggggcgtgtggagcccctaccttccgcccccagtgctggtggccctccctccttgcctgacgccgttgtgggtgcaggggttcccccagacagggccccagggcacagggttaccaggtgatggctgtcaccctgctgggctggaggagcagctgctgtcaccctgcctgtgcttttgtcttttgagagctgtttttggtttgtttcaggcctctttttagtaccacagaaggatacaatttcatcctcatccatatcactaaaaggaagtaaaagggtgaagggaaaaatggaagcgtgctcaagtgccctgtgtggaattctgtgccgcccccttcattaaacttgaccgttagcgccttgtgtgcggtttgggggtcacgctctgccctgtcctgttcttgcttgcttgggtcgtccgaagtttcttgttgcttttgtctaattggagaagatgcctgtgactgacaagaggaagatgagccacattcagaaccggtggggtgatgccgtcaccgtgacaaaagcgtccaccgctggacgtttttcctgctccgtcatggctgctcactgtggttaaggaaattcagcagtggctgcggatagcgaacagatggtgggcatggcaccctcgccgtgtgggaggggactgactgtctgaattgtctttttcgactgtaggtaattggtacgcctcagagaccggcagcgtcaaacaccctggtggtaggaagcccacacacccccagcactcactttgcctctcagaaccagccttccgactcctcaccttggtctgccgggtgagcacttccctctggacccttagagttgtaggactgcttgcggttcgcacctccacgttctcctgggccacgtgtgtcacacagtcgtgcgatggggctcccacgcgcgttgacgccagcctccgaatcacactcacccatcatcgtggcctgcacaggtgtgcagccgaggcgcactgcctcggtcatggagaagtcgggctgggcaccgcccaccccgctttgtgtctggtgtagtgggtgctctctgaagggctggcagctcttggccaagacggggagaagctggcctcgtactcgccacaggacctcggagactttccctcgtctgtgctgggagcatgtgggatggatttcacccactgcccctgaattcagcctctactgcccctggggttacggcccccgcgggtggtcccgccagagctgctccttccactaaagcaagatctgatgagctgtgtctttccttaaaaacacacacacgcaaagctgcaaaagcctgcctgtgttggtgcccaaagcttcaccagctaggaacctcaggtggcctttcccgccatgtggggactgaccagagtgtacagagttgggctttccctcgacctgaagcacacttagtgctttgcacctgttgtcaagcggctgtcacagcccaagctgtatgaaattacagcctgctgaaattagtcctaagaattcccaaatttacactgaaacgtcccatagttcctgattctggctgccctctttagaaaagtggtgcttggggctcacgcctgtaatcctagaggccgaggccagcagatcacgagttcaagagattgagaccatcctggccaacgtggtgcaaccccgtctctattaaaaatacaaaaaaattagccagatgtggtggcacgtgcctgtaatcccagctactcgggaggctgaggcaggagaatcgcttgaacccaggaggtggaggttgcagtgagccgagatggcgccaccgcactccagcccacgacagagcgagactccgtctcaaaaaagaaaaaacaacaacaaaaagaaaagtggtgcttggtgtaccggcacatctcccatatgctgatttgggtcctggggacgcctcccgttttccctgacgcttggaaggttagaggtgcagcctgctggggagacactcgctttctgacctgcaggaccactgggcctgggggctggggctagggggtcctggcctgctcacgtgttggatctgctgcgcccgtgggacgtggcccctttttgtgcagctcattagagctctcaggtaaaagcattcctcgattcaggctgatcctcaggagggctgacagtcgcttctcttttcctttgtattttgaaggaagcgcaacaggaaaggagagaagaatggcaagggcctacggcatttctccatgaaggtctgcgagaaggtgcagaggaaagggaccacttcctacaacgaagtggcagacgagctggttgcggagttcagtgctgccgacaaccacatcttaccaaacgagtcagtaagtgtgtgccgggggccgagaggctggggtggcggagcccagcggtgtggtacgtttcgctcttttaatatcgggaacagttaaaaccatacagaaaatgccaagtacagcataaaagaatttttaccaaacgagtcagtaagtgtgtgccggggccgagaggctggggtggcggagcccagcggtgtggtacgtttcgctcttttaatatcgggaacagttaaaaccatacagaaaatgccaagtacagcataaaagaatttttccgatccatttgctggcacgatgctttgtcaactccagtgagtgagcacgtgggctggctctgcacgtctagcggcccagaaatgcacaaatgcccacctcaccagctgggctcgacacccgagagcccccggctctccttctggaacacactcaggcttcgcacagccccgtcttgccctgcgtcatctgtggggtgggagcgctccctgagggcatgttggggtggcggctccgtgagcggggtgcccctttgagccagtgcccatggtctacagtttaaggatccaccggcctttttggatcatttggaaactccactccctgtcatccccaggcttatgaccagaaaaacataagacggcgcgtctacgatgccttaaacgtgctaatggccatgaacatcatctccaaggagaagaaggagatcaagtggattggtctgcccaccaactcggctcaggaatgtcagaacttagaggtgccccttcagccttccttcaaccttgatttcccttcaagtccgtgtagatgttttagtcgtcggtcactcagaagggtctgggctccgtgcccttatgctctctgtgtccggctggcagacggtcatgcagacgtctccctgcgtttctcagtcttggctgtcaggggagggagcatggttggcccagacccactagagtctgttaaactctagtgtaggttaattctgaatcctagtttgtgggatttttgttttctttttagataccatagttaaatccaagaaatgagaggaaaggggagaaggtatagtttagaaatggaaaaaaaactcacctatatcttgtagcacctgctatgtctagatttgtccatatcccttcgattacattctgggtaaacataggtaacactgtgaggatgtgaggatgtgggttttaaaaaacgctctgtggaacagttgtgatgattcttcacatgggtggtttgtttttgaaggtggaaagacagaggagacttgaaagaataaaacagaaacagtctcaacttcaagaacttattctacaggtaagagaatacgtatctgtggaggcagggtaatttttattttactaatttagttttataacggcaacatactgccttgggttacactcctgcatggcaaatcaaatgactgctctaagattctgagtgtgagttcatctcataggtgttgaacgtgggccttattcccagagcgaggttgtgcacgtgcgtgtgcatgcatgtgtgtgtgtgcgtgcatgcatgcatgtgtgcgtgtgtgcatgtgcctgtgtgcgtgcgtgcgtgtgcctgtgtgcgtgtgtgtgtgcatgtgtgtgcgtgcatgtgcctgtgtgcgtgtgtgtgtgtgcatgtgtgcatacatgtgtatgtgtgtatctctcgtcacagcatctaaataggcaaaagacagatggagggatgacttcatgcaaaagcaacatttgaaaaatctcctcagaggtgcttaacccaaggcccaggtgccaggcaaggcctgtaaaactgtggtggacacagtgcacctgggtcttgacagtgctgatcagggccctggagctggccttccccacctcccattgagtgctgagggtgggcggcaccactgggggccccgtgtctggtgtggagggggttgtgtgcaaggtgctcactgcagagctggctgctgccctgaccaaggtgtgctcgagccctcccagaggggacggtgtggcagccgtggtgatggaggctcgtgggcaggagctcctcaggacccacagagtgtcaggagggacagtcctggttgccagtgccttaggacctgccaggtggggatagacccagggtggccgggagaggaagggaatctcctggctctacattaatagcaaagaaggtctctccaagtggaacacttggtttggggccctgaggccctggccctggattcagccttgcagggcccattcccccagaggagcacccctgcagcacatgggcccttctgcgttccactttccagggtgggcaaagtccacggcacggcaccccctccaaggccatcaccctgtaggtgccatggtggtaggtggtcttagaggggtgaaggacagcaaggaatcgacttccaaaattggtgttttgttgagcgccgttgccgtggaggacacttttatcagggcacggatggctgtgcgcccgctttcccttagttctcccctcaggatcccgtttcctgagcgcttttctccctgggctgcagaggtcagcacccagcggccggcgctggcatttcagatgtccaggccaactcctcgctgtcacgtggacgcagggagggctgtgaggacccctcgagcacaggggctgcgttcttgtgccgccacgggccacctggctcctcttattttttttagcaaattgccttcaagaacctggtgcagagaaaccggcatgcggagcagcaggccagccggccaccgccacccaactcagtcatccacctgcccttcatcatcgtcaacaccagcaagaagacggtcatcgactgcagcatctccaatgacaagtaggttgtgggcggggagctgttccctggtcacccatctcttttttagggagccgaccctgttggtattgtcactaggacaagttttaaatgttgtacaaatagcaaatgttgcacaaattgctgtccattggggggtggtgggaggctgccgccatgtggcagatggaaggtctctgttccgggagcgtgtgccttagggcatgtcctcctggggagaataggcctcgatttgcctctcatctcatttacttcagagtttataaattctgtgaggagacactgatgactgggaaccgggaagctgtgtgtggcggtcagcgggtcagccgtcctggctccaccccagtgtgtaccgtctccgctgggagaccctgtctttctgactgtgcctttccccttcagatttgagtatctgtttaattttgacaacacatttgaaatccacgatgacatagaagtgctgaagcggatgggcatggcttgcgggctggagtcggggagctgctctgccgaagaccttaaaatggccagaagtctggtccccaaggctctggagccatacgtgacaggtcagcaatgcccagacaacctggcgtggctgtgtgaggaatgggcccccagcctccgacggtgccctcccctcccggctcggctgtgtgaggagtggcccccagcctccgacggtgccctcccctcccggctcgggatgtgtcttgctgagatcaggcccacgtgtgtagggccaggagcaaagacaaaggggctgtgagggggatgagggcaggggtgtggctggggtggggtccagccagtgccgtgacccactggatatgggggccttgagtccgcaggtggctcgtgtggatttcctatgtggtttgtgtgaggaggtgctaagtcaggattttaccctccaagtaggcccagaagtagaagttgagattctttgagaagtgcagttggattgctgatcccacccactgatggtagctgattggtcactagggcaaagtcaccaagaaaaagcatttcagagtcattggcgtcctgctccggagggccgggagcacaggagcttttgttgaaggagctttttttctgttctggtgaattctttccttgggggccgtagggtcccagccactgacagcaggatggctttaaggtgagaaattgtgaaggtgtcatatctgctgatccttctcttgttagcctaaacttggggtgtagatttattccctgagagggtcagagattcctccctgagctcttagactgccccagatcttgtgaaaatctggctggtccatgttgtcaggtgacagtgggctctggccgcccacgtgggctgggccctgaccccggcctctgtcccgtgcttcatggagctgccaggatgggctgtgggaagagggtttcagcttgacactttgattcggttccgtttcacgatgggtatgatactgaggcagcagcacacgtgtgccgtttgtaagtcagtgtgtgcaggtatttattgcaaggctgttcttgcctttttagagaagacaggcttatgtgactgcacagcgggatgtcctgctccgtggcgcagtgtggaaaatactggacaagcgaaggatatccggaagcttctacagccgtctgtcctgtggaactgcgcgtcattttgttggttgcctgtgcgtcttgtgttgtttctgtttcatgaccattcgcttattttctttcccttttcagaaatggctcagggaactgttggaggcgtgttcatcacgacggcaggttccacgtctaacggcacaaggttctctgccaggtgacagtcgttgagggtgtgggagaggcgtcatctgggcctcccccggggtccaggggccaaggcagggcagccgtctcaggtgtggccatcaggtctgtggctgctctgacgtggcttgtctgtccaggcagtggggccccgctggctttccctgtgtggagagctgcttttcttagttggtttctgctcactaaaaactgaaagtaatacatggtggtttttttttcatagtatcacctaataagtaaagtaggaatgaaaaccacccaaatcctcctgtccccggcagcccaagtaacagcaagtatttccaggttttttttcccatttttcagaacgcgtctgcggtcacagcgcacgtatttttcagaacgcgtctgcggtctgggcgcaagtagttttcagaacgtgtctgcgatcacagcacacatttttcagaacgcatctgcggtcatggtgcatgtgtttttcagaatgcatctatggtcatagcgcatgtatttttcagaacgtctgccatcacggcgcacgtgtttttcagaacgcgtctgcggtctcggcgcacgtgctgcgatcacagtgcatgtatttttgcgaacgcgtctgtgattatggtacacgtatttttcagaacgcgtctgcaatcacagcgcacgtatttttcagaacgcgtctgtggtcacagcacacatattttgttccgtgcatttttcagcttacattttattgtatgaatatatattgtttctatgctattaaagggcctttatttaaataaatttgtatttaatctttgacctgcaatcccacagagtagaatggtgtccctaggtattgatcttagtgcttcaaagataaatataacttttatggtaaatattaacaaaacaatgattttattaacttttatattgcattgtgatacaatatatagtattactttatattaatcttaagtgttaataaaatctttaattagaaatacaagaactcagtaacctatgggtccgggtaacagggctcgacatagtgagtttcagtgtgcttgagcctgcgttgggatgtgctgtggccatgagatgtaacaggtgtgtcgggcacgtgtagcttcctggccagctctggaagtgcaaagccagccttggcctcctcacctgtaaggtgagactggtgattgatgagttactgatctgtggcaaggatcagtgaggtggtgatggaagaaaggactttggtgacaagcttttgacagaggccggttctccttctgttgtagctatgtgtgaacgtgtggcggtcagtctgtaaacatgtttaatgctgcttcttccatgaggtgggatgtgggtatttttaggacttttatcatcacataatcctttttatggatgtgattcttcagacttgtcagtttttcataacaatggaaacaaagctattaccatttcttacgaaataccgattttcatagtggcatgatgagacattttatacaagtacctcatgaaaggacatctaggtagttcccagttagaataaaaactgcagtgagcagctttacagctgaatttctcgccatttctgacttgtttccaagatacagaattacttcatcaaaaggcacattaacacatttttattgtagtgttaataaataccattaaaatgtattaaaatatgtacatatggttttatgttaattgaaaacatctttaaacattaggaacgtagtgagctctggttggtggtaggtttttgtggtgctgccagccctctgggttctcagtccccgctgccagattcgacccacgctctggactccatcctgtcctgccccgggctctcttttttcctgttgctggttatgagtgaaagtcccggagggagggatctaatggttttacagtttgttccctctggggcactgctcctgatggaatgatgagtgagggagaggcagcgtgtggctctgctcagcctcctgtttctgtcgttatgggttccaggagacagggccagaagagaaccagacagagatggagtaagtgccagagcgttggcgtgctgtagtgcagacactcagcctccccgttctgtttgtgtgactgacaaaacccacacctgtggggcacagcctgtcatttgaccacaagccctgaggcggggggaggctgggtgggccgcctgcactgacggcgccatccgcctcctgccttgcagtgacctgaccaacggtgcagatgggatgctggccacaagctccaatgggtctcagtacagcggctccagggtggagactccggtgtcctacgtcggggaggacgacgaggaggacgatgacttcaacgagaatgacgaggacgactgacgtcctccccacttcagattcggcttcaggaaaacgtttagcgaaaagaaactttttttttaatgtgggttttctgtttccttttggcctactcccaagaagatattggtaagctattgaatttagatatgcacctctgataagcaaggattgtttcccgtaggattaggacgtgctgtggatgtgtgttttgataccagtgtgctgatgcagagcgtttatttacttgttaggattttgtgttttcatttgctatttttctttaagtgcagagttcatttttgcccctgaaaagtttttgctgagtttgctgaagaaattgtatttcaaccacatccatgaaaataaaacacctcctgttgtggatggtgagcccctgatgccgcttatttgccgtgagtttggacggcacccctgctggcggatagcaagactctgtggagtttgttcagtggtacggtgtccaagcaaacagcagaatgcaactttctaaacagccccaagcaaacagcagaattcaactttttaaacaataaacaccatcaaccttattgactttattgtcccttaaattatattgactgttgtgattccatcaagtttgtacactcttttctctccctgttttgcagcaacaaattgcgaagtgcttttgtttgtttgttttcgtttggttaaagcttattgccatgctggtgcggctatggagactgtctggaaggcttggaatggtttattgcttatggtaaaatttgcctgatttcttacaggcagcgtttggaaaccttttattatatagttgtttacatacttataagtctatcatttaaagacatgtactgaaacaaatgtatttgtttcataagcatcttcctgtaatctattataaaattgaaattaaatatagagaatgttttaacaattttttaactcaaaatttgtcaatcatttttaatagttctttttttataaaaagaaaaaggaatttaaggacaggcagtagtctcttttaaaatttattcacaaaacccattaactgcacagttgctattagctgcctgttctaaaaacgatagtctttttattgaaacacaaataaacttttctgtaatattttatggtatataaagagactttaattgtttgacttgtttaacttggcactgttagtttttattaataaaacgcgcatgggcattttaaacaagctgtgtttctctaattcaggattattatctagaaatttgtctgtcttgttggttttactttatacttgagtgagaaagtaggttgttaggcccagacgcggtgggcccgggtggtccctgtgggtgcaaaccccaccaccacatgttgtctgaggcacatcctccgggagcccaccctgaaaaggtggaaggtggccaagggtggaggtcttggtggacacagggcaaagaggcaccttccttttcggtgcctgtggtgcagagaaagataagccaagttccttggccttttttcacaatgaaaattgagacaaaatttaaaagtttgactttgagaacaagaataagattgagaggattctgggaagatggtggaatagggagcaccaggaatctggctgcccaggtagatgtctacctcgcgggcaggatctgcctgatgcagctgttctgtaactacggaatctactgaaggcttaaagctttcaagggaggcttggtcagcacattgcagttaattttggtccatttcagctttctaccccgacctctgttccttcatttttctctttccccttttgggagccagacattgaagactaggacgtataaaaacaactgtgttgtatatatggggctgcccagggagaggctcagaaaagacccgagaagaccttacgtttacacctcaggctgaaccatggcacaggtacagcctagagctgtcaaaaaagcaataaacacagcaataacaaaaatggcaaatccgggggaacaggagacttcttttcagagttgtaccacagtaatagattcagatgtccagttttcaacaaacagtgacaaggcataccaagaaatggcaaagtatggcccatttaaagggaaaaaaataaaaacaaactgtccttgaaaaggatctgttggcaggtacacta

SEQ ID NO: 23874 - DNA, 3969 bp, Homo Sapiens
cgttgctgtcgaaagggtgaaagagaaacttggcgacctcccggaggagttcgcgaagcgaccaggagcgtgttgccatcgtcctcacccggcacccaattccaccacagagtcgggatttcgtcggtgatcgtgatggggtgcttttatttttctctttgattttcaaaaaatgtctatgtgactgtccctatcttaaggggaagttgaaagtgggggcgggggtgctcaatgagaaacgttgccttgtgtgtagttgtttggagcacactgcaaattatattggcatctctttccaaaagtcactttgattcaacttcgatagctttctcgtaaatggcacgtttaggtggtgagaggtggatgaggaaacaggcaccagtgcagctgatttgacctccagtgggatagatacgattagcaccaggatcgtgtctcattttgaacccagatctgaacagaattaagacgaacgagctttcacaattgcagcagatgaagatccattggtaaattgatcaggatttttggcctaccctccaaagaaaaggagcggaaagaatgtcggagcgggccgcggatgacgtcaggggggagccgcgccgcgcggcggcggcggcgggcggagcagcggccgcggccgcccggcagcagcagcagcagcagcagcagcagcagccgccgcctccgcagccccagcggcagcagcacccgccaccgccgccacggcgcacacggccggaggacggcgggcccggcgccgcctccacctcggccgccgcaatggcgacggtcggggagcgcaggcctctgcccagtcctgaagtgatgctgggacagtcgtggaatctgtgggttgaggcttccaaacttcctgggaaggacgggacagaattggacgaaagtttcaaggagtttgggaaaaaccgcgaagtcatggggctctgtcgggaagacatgccaatatttggtttctgtccagcccatgatgatttctacttggtggtgtgtaacgactgtaatcaggttgtcaaaccgcaggcatttcaatcacattatgaaagaagacatagctcatccagcaagccgcctttggccgttcctcccacttcagtattttccttcttcccttctctgtccaaaagcaaaggaggcagtgcaagtggaagcaaccgttcttccagtggaggtgttcttagcgcatcctcatcaagttccaagttgttgaaatcacccaaagagaaactgcagctcagggggaacaccaggccaatgcatcccattcagcaaagtagagttccccatggtagaatcatgacaccctctgtgaaagtggaaaagattcatccgaaaatggatggcacactactgaaatctgcggtggggccaacctgtcctgctactgtgagttccttagtcaagcctggccttaactgcccctcaataccaaagccaaccttgccttcacctggacagattctgaatggcaaagggcttcctgcaccgcccactctggaaaagaaacctgaagacaattccaataataggaaatttttaaataagagattatcagaaagagagtttgatcctgacatccactgtggggttattgatctcgacaccaagaagccctgcacccggtctttgacatgcaagacacattccttaacccagcgcagggctgtccagggtagaagaaaacgatttgatgtgttattagccgagcacaaaaacaaaaccagggaaaaggaattgattcgccatccggactctcagcaaccaccgcagcctctcagggacccgcatcccgcccctcctagaacgtcacaggagccgcaccaaaaccctcacggagtgattccttccgaatcaaagccttttgtagctagtaaacctaaacctcacacccccagtcttccaaggcctccaggctgccctgctcagcaaggtgggagtgcccccattgaccctcctccagtccatgaatctccacaccctcccctgcctgccactgagccagcttctcggttatccagtgaggagggcgaaggcgatgacaaagaagagtctgttgaaaaactggactgtcattattcaggtcatcatcctcagccagcatctttttgcacatttgggagccggcagataggaagaggctattacgtgtttgactccaggtggaatcgacttcgctgcgccctcaacctcatggtggagaagcatctgaatgcacagctatggaagaaaatcccaccagtgcccagtaccacctcacccatctccacacgtattcctcaccggacaaactctgtgccgacatcacaatgtggagtcagctatctggcagcagccaccgtctctacatccccagtcctgctctcatctacctgcatctccccaaatagcaaatcggtaccagctcatggaaccacactaaatgcacagcctgctgcttcaggggcgatggatcctgtgtgcagtatgcaatccagacaagtgtcctcttcatcctcatccccttccacgccctctggcctttcctcggttccttcctcccccatgtccaggaaacctcagaaattgaaatccagcaaatctttgaggcccaaggagtcttctggtaacagcactaactgtcaaaatgccagtagcagtaccagtggcggctcaggaaagaaacgcaaaaacagttccccactgttggttcactcttcctcctcctcttcctcctcctcctcttcttctcattccatggagtcttttaggaaaaactgtgtggctcactctgggcctccctacccctcaacggtaacatcttcccatagcatcggcctcaactgtgtgacgaataaagcaaatgcggtgaacgtccggcatgaccagtcagggaggggcccccccaccgggagccctgctgaatccatcaagaggatgagtgtgatggtgaacagcagtgattctactctttctcttgggccattcattcaccagtccaatgaactgcctgtcaactcccacggcagtttttcccactcacacactcctctagacaaactcataggaaagaaaagaaagtgctcacccagctcgagcagcatcaacaacagcagcagcaaacccacaaaggttgccaaagtgccagccgtgaacaatgtccacatgaaacacacaggcaccatcccaggggcacaaggactgatgaacagttccctccttcatcagccaaaggcacgtccctgacagctgaaaatagcacggggaggaataatgcggacacttttgaggacaagttacacctccactcagcactctggactccacgatgcctttgagtctgttttcccaacctcctgtgggcctcaagggtagaaacctgccgggctgttgttttaacgaggatttccctgaagctatgtctctagcagtgagtactcataaaggacactggatcaagttcagccaccgaattgcttttatcagtgttaaagtggtctgaactgcttgctaccaatctgtgagaagtttttgtttttgttttgttttttaacttgcagtatatcacagagccactcttcaagttagattggctgggcaaaagaatgttttggcaagagcgttactgtagacctttctccctccttccttttactaccatttttttttaacactgtcatctgtaggtcactctccagcagttaggcaccttaactggagaccagaaaccttccagagaacacagggctgcatcccgagcaaccctctgaagaagggaattaggctttagattttgatagcaatgttccaggaatgaaatatagatgttagcccaagacaccatgacaaaatagcccagccttttgagagtaatttgggaaaagaagctgtcagaagtttctaacttacaaactggtttgaaatttttgatgcccagacagcaagtatcgacagcaacggaattcgagctccgtc

SEQ ID NO: 23875 - DNA, 2325 bp, Homo Sapiens
actcaattggcacgagggcagcggctgcggcagagagagttccagtagctggctcggtgctcttctcggccacctgccatggcccgggggctgcccaccattgctagcctggcacgcttatgccagaagctgaaccgcctgaagccgctggaggactccaccatggagacgtcactgcggcgctgcctgtccacgctggacctgactcttctgggcgtgggtggcatggtgggctcgggtctctacgtgctcacaggtgccgtggccaaggaggtggctggccctgctgtgctcttgtccttcggtgtggccgctgtggcctccctgctggcagccctatgctatgcagaatttggggcacgtgtgccacgcacgggctctgcctacctgttcacctacgtatccatgggcgagctgtgggccttcctcatcggctggaatgttctcctcgaatacatcatcggtggcgccgccgtggcccgtgcctggagtggctacctggactctatgttcagccacagcatccgcaacttcactgaagacccacgtgggttcttggcaggtgcccctcctgggccactacccggacttcctggctgctggcatcatcctccctggcctctgcctttgtctcctgtggagcccgcgtgtcctccctggctcaatcacaccttctcggccatcagcctgcttgtcattctcttcattgtcatcctgggcttcatcctggcccagcctcacaactggagcgctgacgaaggcggctttgcacccttcggcttctccggcgtcatggccggcactgcctcctgcttctatgctttcgtgggcttcgacgtcattgccgcctccagtgaggaggcccagaacccacggcggtctgtgcctctggccatcgccatctcgcttgccattgcagctggtgcctacatccttgtctccaccgtgctaaccctcatggtgccctggcacagcctggaccccgactcagcgcttgcagatgccttctaccagcggggctacaggtgggctggcttcatcgtggcagctggctccatctgcgccatgaacaccgtcctgctcagcctcctcttctccctgccacgcattgtctatgccatggccgccgatgggctcttcttccaggtgtttgcccatgtgcacccccggacacaggtgcctgtggcgggcaccctggcgttcgggctcctcacggccttcctggcactgctgctggacctggagtcgctggttcagttcctgtcccttggcacactcctggcctacacattcgtggccaccagtatcattgtgctgcgcttccagaagtcttccccgcccagctccccaggcccagccagccctggccccctgaccaagcagcagagctccttctcagaccacctacagctggtgggcactgtacacgcctccgtccctgagccaggggagctgaagccagccctgaggccctacctgggcttcttggatgggtacagccctggagcagtggtgacttgggcgcttggcgttatgttggcctcagccatcaccataggctgcgtgcttgtctttgggaactcgaccctgcacctcccacactggggttacatcctgctgctcctgctcaccagtgtcatgtttctgctcagcctccttgtcctgggggctcaccagcaacagtatcgggaagacttatttcagatccccatggttcccctgattccagccctgagcatcgtcctcaacatctgcctcatgctgaaacttagctatctgacctgggtgcgcttctccatctggctgctgatgggacttgcagtgtatttcggctatggcatccggcatagcaaggagaaccagcgggagctgccagggctgaactccacacactacgtggtattccccaggggcagcctggaggagacagtgcaggctatgcagccccccagccaggcaccagcacaggaccctggccatatggagtagctgatcagcccacacttgccccgccctcccacacctgcttgggaggccagagaggccagacaagccgagagccccttctgttgtgggcagcctgggtttgcaggcctgcacaggctggggagtcctcaggaccttaggaccttcatccaggggctgggcttcgggtcttcaggagtgggccttggctggtgctggtgccatggactctgcccagagccttcttgtttatgatcagctccagctacctgggcagttgtggtggggtggatgggaaggcccacagcccaagggatccataataataattgcttggccagccatgtggcctgctggcgt

SEQ ID NO: 23876 - DNA, 3390 bp, Homo Sapiens
ggcttatcaggagggcagacttcaaaagctactaaaaatgaacggccctgaagatcttcccaagtcctatgactatgaccttatcatcattggaggtggctcaggaggtctggcagctgctaaggaggcagcccaatatggcaagaaggtgatggtcctggactttgtcactcccacccctcttggaactagatggggtcttggaggaacatgtgtgaatgtgggttgcatacctaaaaaactgatgcatcaagcagctttgttaggacaagccctgcaagactctcgaaattatggatggaaagtcgaggagacagttaagcatgattgggacagaatgatagaagctgtacagaatcacattggctctttgaattggggctaccgagtagctctgcgggagaaaaaagtcgtctatgagaatgcttatgggcaatttattggtcctcacaggattaaggcaacaaataataaaggcaaagaaaaaatttattcagcagagagatttctcattgccactggtgaaagaccacgttacttgggcatccctggtgacaaggaatactgcatcagcagtgatgatcttttctccttgccttactgcccgggtaagaccctggttgttggagcatcctatgtcgctttggagtgcgctggatttcttgctggtattggtttagacgtcactgttatggttaggtccattcttcttagaggatttgaccaggacatggccaacaaaattggtgaacacatggaagaacatggcatcaagtttataagacagttcgtaccaattaaagttgaacaaattgaagcagggacaccaggccgactcagagtagtagctcagtccaccaatagtgaggaaatcattgaaggagaatataatacggtgatgctggcaataggaagagatgcttgcacaagaaaaattggcttagaaaccgtaggggtgaagataaatgaaaagactggaaaaatacctgtcacagatgaagaacagaccaatgtgccttacatctatgccattggcgatatattggaggataaggtggagctcaccccagttgcaatccaggcaggaagattgctggctcagaggctctatgcaggttccactgtcaagtgtgactatgaaaatgttccaaccactgtatttactcctttggaatatggtgcttgtggcctttctgaggagaaagctgtggagaagtttggggaagaaaatattgaggtttaccatagttacttttggccattggaatggacgattccgtcaagagataacaacaaatgttatgcaaaaataatctgtaatactaaagacaatgaacgtgttgtgggctttcacgtactgggtccaaatgctggagaagttacacaaggctttgcagctgcgctcaaatgtggactgaccaaaaagcagctggacagcacaattggaatccaccctgtctgtgcagaggtattcacaacattgtctgtgaccaagcgctctggggcaagcatcctccaggctggctgctgaggttaagccccagtgtggatgctgttgccaagactgcaaaccactggctcgtttccgtgcccaaatccaaggcgaagttttctagagggttcttgggctcttggcacctgcgtgtcctgtgcttaccaccgcccaaggcccccttggatctcttggataggagttggtgaatagaaggcaggcagcatcacactggggtcactgacagacttgaagctgacatttggcagggcatcgaagggatgcatccatgaagtcaccagtctcaagcccatgtggtaggcggtgatggaacaactgtcaaatcagttttagcatgacctttccttgtggattttcttattctcgttgtcaagttttctagggttgaatttttttcttttttctccatggtgttaatgatattagagatgaaaaacgttagcagttgatttttgtccaaaagcaagtcatggctagagtatccatgcaaggtgtcttgttgcatggaagggatagtttggctcccttggaggctatgtaggcttgtcccgggaaagagaactgtcctgcagctgaaatggactgttctttactgacctgctcagcagtttcttctctcatatattcccaaaacaagtacatctgcgatcaactctagccaaatttgcccctgtgtgctacatgatggatgattattattttaaggtctgtttaggaagggaaatggctacttggccagccattgcctggcatttggtagtatagtatgattctcaccattatttgtcatggaggcagacatacaccagaaatgggggagaaacagtacatatctttctgtctttagtttattgtgtgctggtctaagcaagctgagatcatttgcaatggaaaacacgtaacttgtttaaaagtttttctggtagctttagctttatgctaaaaaaaataatgacattgggtatctatttctttctaagactacattagtaggaaaataagtcttttcatgcttatgatttagctgttttgtggtaattgctttttaaaggaagttattaatatcataagttattattaatattttgaacacaggtggatgtgaaggattttcatttaaaaaccaagtggttttgactttttctgttgaatgaacaactgtgccttgtggaatttttgcagaagtgtttaggctttgttagcatttcaacttgcattattataaagaggtattaatgcctcagttatgtgtttgtcaatgtactggctgaggattctctctcagctgtcttttctaactgtgtaggttgagttttgaacacgtgcttgtggacatcagcctcctgccagcagttcttgaagcttctttttcattcctgctactctacctgtatttctcagttgcagcactgagtggtcaaaatacatttctgggccacctcagggaacccatgcatctgcctggcatttaggcagcagagcccctgaccgtcccccacaggctctgcctcacgtcctcatctcatttggctgtgtaaagaaatgggaaaagggagaaggagagagcaattgaggcagttgaccatattcagttttatttatttatttttaatttgtttttttctccaagtccaccagtctctgaaattagaacagtaggcacggtatgagataatcaggcctaatcatgttgtgattctcttttcttagtggagtggaatgttctatccccacaagaaggattatatcttatagacttgtcttgttcagattctgtatttacccattttattgaaacatatactaagttccatgtatttttgttacaaatcttctgaaaaaaaacaaaacaatgtgaaacattaaaattaaaaggc

SEQ ID NO: 23877 - DNA, 3344 bp, Homo Sapiens
aagctggggagcatggaccagaccccgcagcgctggcaccatgacgctcgcccgcttcgtgctagccctgatgttaggggcgctccccgaagtggtcggctttgattctgtcctcaatgattccctccaccacagccaccgccattcgccccctgcgggtccgcactacccctattaccttcccacccagcagcggcccccgacgacgcgtccgccgccgcctctcccgcgcttcccgcgccccccgcgggcgctccctgcccagcgcccgcacgccctccaggccgggcacacgccccggccgcacccctggggctgccccgccggcgagccatgggtcagcgtgacggacttcggcgccccgtgtctgcggtgggcggaggtgccacccttcctggagcggtcgcccccagcgagctgggctcagctgcgaggacagcgccacaacttttgtcggagccccgacggcgcgggcagaccctggtgtttctacggagacgcccgtggcaaggtggactggggctactgcgactgcagacacggatcagtacgacttcgtggcggcaaaaatgagtttgaaggcacagtggaagtatatgcaagtggagtttggggcactgtctgtagcagccactgggatgattctgatgcatcagtcatttgtcaccagctgcagctgggaggaaaaggaatagcaaaacaaaccccgttttctggactgggccttattcccatttattggagcaatgtccgttgccgaggagatgaagaaaatatactgctttgtgaaaaagacatctggcagggtggggtgtgtcctcagaagatggcagctgctgtcacgtgtagcttttcccatggcccaacgttccccatcattcgccttgctggaggcagcagtgtgcatgaaggccgggtggagctctaccatgctggccagtggggaaccgtttgtgatgaccaatgggatgatgccgatgcagaagtgatctgcaggcagctgggcctcagtggcattgccaaagcatggcatcaggcatattttggggaagggtctggcccagttatgttggatgaagtacgctgcactgggaatgagctttcaattgagcagtgtccaaagagctcctggggagagcataactgtggccataaagaagatgctggagtgtcctgtacccctctaacagatggggtcatcagacttgcaggtgggaaaggcagccatgagggtcgcttggaggtatattacagaggccagtggggaactgtctgtgatgatggctggactgagctgaatacatacgtggtttgtcgacagttgggatttaaatatggtaaacaagcatctgccaaccattttgaagaaagcacagggcccatatggttggatgacgtcagctgctcaggaaaggaaaccagatttcttcagtgttccaggcgacagtggggaaggcatgactgcagccaccgcgaagatgttagcattgcctgctaccctggcggcgagggacacaggctctctctgggttttcctgtcagactgatggatggagaaaataagaaagaaggacgagtggaggtttttatcaatggccagtggggaacaatctgtgatgatggatggactgataaggatgcagctgtgatctgtcgtcagcttggctacaagggtcctgccagagcaagaaccatggcttactttggagaaggaaaaggacccatccatgtggataatgtgaagtgcacaggaaatgagaggtccttggctgactgtatcaagcaagatattggaagacacaactgccgccacagtgaagatgcaggagttatttgtgattattttggcaagaaggcctcaggtaacagtaataaagagtccctctcatctgtttgtggcttgagattactgcaccgtcggcagaagcggatcattggtgggaaaaattctttaaggggtggttggccttggcaggtttccctccggctgaagtcatcccatggagatggcaggctcctctgcggggctacgctcctgagtagctgctgggtcctcacagcagcacactgtttcaagaggtatggcaacagcactaggagctatgctgttagggttggagattatcatactctggtaccagaggagtttgaggaagaaattggagttcaacagattgtgattcatcgggagtatcgacccgaccgcagtgattatgacatagccctggttagattacaaggaccagaagagcaatgtgccagattcagcagccatgttttgccagcctgtttaccactctggagagagaggccacagaaaacagcatccaactgttacataacaggatggggtgacacaggacgagcctattcaagaacactacaacaagcagccattcccttacttcctaaaaggttttgtgaagaacgttataagggtcggtttacagggagaatgctttgtgctggaaacctccatgaacacaaacgcgtggacagctgccagggagacagcggaggaccactcatgtgtgaacggcccggagagagctgggtggtgtatggggtgacctcctgggggtatggctgtggagtcaaggattctcctggtgtttataccaaagtctcagcctttgtaccttggataaaaagtgtcaccaaactgtaattcttcatggaaacttcaaagcagcatttaaacaaatggaaaactttgaacccccactattagcactcagcagagatgacaacaaatggcaagatctgtttttgctttgtgttgtggtaaaaaattgtgtaccccctgctgcttttgagaaatttgtgaacattttcagaggcctcagtgtagtggaagtgataatccttaaatgaacattttctaccctaatttcactggagtgacttattctaagcctcatctatcccctacctatttctcaaaatcattctatgctgattttacaaaagatcatttttacatttgaactgagaaccccttttaattgaatcagtggtgtctgaaatcatattaaatacccacatttgacataaatgcggtaccctttactacactcatgagtggcatatttatgcttaggtcttttcaaaagacttgacaagaaatcttcatattctctgtagcctttgtcaagtgaggaaatcagtggttaaagaattccactataaacttttaggcctgaataggagtagtaaagcctcaaggacatctgcctgtcacaatatattctcaaagtgatctgatatttggaaacaagtatccttgttgagtaccaagtgctacagaaaccataagataaaaatactttctacctacagcgtgc

SEQ ID NO: 23878 - DNA, 1979 bp, Homo Sapiens
gaaacagtttcctggtgaagcagtccctcacccctagtcagcccacacccctagggcctaaagatgctgaggtctgtatggaattttctgaaacgccacaaaaagaaatgcatcttcctgggcacggtccttggaggagtatatattctggggaaatatggacagaagaaaatcagagaaatacaggaaagggaggctgcagaatacattgcccaagcacgacgacaatatcattttgaaagtaaccagaggacttgcaatatgacagtgctgtccatgcttccaacactgagagaggccttaatgcagcaactgaattccgagagcctcacagctctgctaaaaaacaggccttcaaacaagctagaaatatgggaggatctgaagataataagtttcacaagaagtactgtggctgtatacagtacctgtatgctggttgttcttttgcgggtccagttaaacataattggtggatatatttacctggataatgcagcagttggcaaaaatggcactacaattcttgctcccccagatgtccaacagcagtatttatcaagtattcagcacctacttggagatggcctgacagaattgatcactgtcattaaacaagctgtgcagaaggttttaggaagtgtttctcttaaacattctttgtcccttttggacttggagcaaaaactaaaagaaatcagaaatctcgttgagcagcataagtcttcttcttggattaataaagatggatccaaacctttattatgccattatatgatgccagatgaagaaactccattagcagtgcaggcctgtggactttctcctcgagacattaccactattaaacttctcaatgaaactagagacatgttggaaagcccagattttagtacagttttgaatacctgtttaaaccgaggttttagtagacttctagacaatatggctgagttctttcgacctactgaacaggacctgcaacatggtaactctatgaatagtctttccagtgtcagcctgcctttagctaagataattccaatagtaaacggacagatccattcagtttgcagtgaaacacctagtcattttgttcaggatctgttgacaatggagcaagtgaaagactttgctgctaatgtgtatgaagcttttagtacccctcagcaactggagaaatgatttttccttcaagaaaaactacagtgggattcatttactttttaaaatacactgggtaaatcacctatacttagagtaacagtttgttatcaaaatgcctgataaaatatattcttaataaaagtcttcatttcataatgaaatcaatttatttggcatcttaatatatttttttagattcatcaacagaccagtttttgtgggcatatatatatacacgtgcaaatatcagaattgttaataatttgttacacatggacatttgttccaaactgactaaaaatcaatatagatattttatatacatatatatatatataaatacaaaattcagtgtactttaccatattaatactgaggaaaaatctgttggagacataggtctaggatgtgtgaagtttggaaaaatatgctatttaattataatgttccctagactgctgtaaacagaagtgaatcagacttttctccagctacctttcaaaataataaattatttgtctcaaatataccttgatggaggacttttttattcttatggaaatggtgaattccaacaactatgatgaactatgttctttgctatttcttcactatattttttaaggttttattaaaaagccttagaaagttacatattggtttagaggctaaaattgtgttgatgctgtttactcacctaattacatagttttaatcatttgtacataattttaaaaacttactttgtattgattttgaatacagtgaaaatcttattgcaataaactattttagtaaaaaaaaaaaaaaaa

SEQ ID NO: 23879 - DNA, 1465 bp, Homo Sapiens
gtggggacagccgagccgcgccgggcccctggacggcgtcgccaaggagctgggatcgcacttgctgcagactttggatggatttgtttttgtggtagcatctgatggcaaaatcatgtatatatccgagaccgcttctgtccatttaggcttatcccaggtggagctcacgggcaacagtatttatgaatacatccatccttctgaccacgatgagatgaccgctgtcctcacggcccaccagccgctgcaccaccacctgctccaagagtatgagatagagaggtcgttctttcttcgaatgaaatgtgtcttggcgaaaaggaacgcgggcctgacctgcagcggatacaaggtcatccactgcagtggctacttgaagatcaggcagtatatgctggacatgtccctgtacgactcctgctaccagattgtggggctggtggccgtgggccagtcgctgccacccagtgccatcaccgagatcaagctgtacagtaacatgttcatgttcagggccagccttgacctgaagctgatattcctggattccagggtgaccgaggtgacgggttacgagccgcaggacctgatcgagaagaccctataccatcacgtgcacggctgcgacgtgttccacctccgctacgcacaccacctcctgttggtgaagggccaggtcaccaccaagtactaccggctgctgtccaagcggggcggctgggtgtgggtgcagagctacgccaccgtggtgcacaacagccgctcgtcccggccccactgcatcgtgagtgtcaattatgtactcacggagattgaatacaaggaacttcagctgtccctggagcaggtgtccactgccaagtcccaggactcctggaggaccgccttgtctacctcacaagaaactaggaaattagtgaaacccaaaaataccaagatgaagacaaagctgagaacaaacccttaccccccacagcaatacagctcattccaaatggacaaactggaatgcggccagctcggaaactggagagccagtccccctgcaagcgctgctgctcctccagaactgcagccccactcagaaagcagtgaccttctgtacacgccatcctacagcctgcccttctcctaccattatggacacttccctctggactctcacttcttcagcagcaaaaagccaatgttgccggccaagttcgggcagccccaaggatccccttgtgaggtggcacgctttttcctgagcacaatgccagccagcggtgaatgccagtggcattatgccaaccccctagtgcctagcagctcgtctccagctaaaaatcctccagagccaccggcgaacactgctaggcacagcctggtgccaagctacgaaggcaagcagatgtcctctgcggagataccgccagctccccaggacgcagactgactcctgtttgctcgctggaccaac

SEQ ID NO: 23880 - DNA, 4366 bp, Homo Sapiens
atggaagggggtgcgtacggagcgggcaaagccgggggcgccttcgacccgtacaccctggtccggcagccgcacaccatcctgcgcgtcgtgtcttggctgttctccatagtggtgttcggctccatcgtgaacgagggctacctcaacagcgcctccgagggggaggagttctgcatctacaaccgcaaccccaacgcctgcagctatggcgtggccgtgggcgtgctcgccttcctcacctgcctgctgtacctggccctggacgtgtacttcccgcagatcagcagcgtcaaggaccgcaagaaagccgtcctgtccgacatcggtgtctcggccttctgggctttcctctggttcgtgggattctgctacctggccaaccagtggcaggtctccaagcccaaggacaacccactgaacgaagggacggacgcagcccgggccgccatcgccttctcctttttctccatcttcacctgggcgggccaggctgtgctggccttccagcggtaccagattggcgccgactcggccctcttctcccaggactacatggaccccagccaggactccagcatgccttacgcgccctacgtggagcccaacactgggccggatcccgccggtatgggcggcacctaccagcagccggccaacaccttcgacaccgagccccagggctaccagtcgcagggctactgagccacagtgaccgcctgcccccgcccctccccatctgtcccctctctccacacccagcccctgctcctgcccaggctgccctgcccagcgcctcatcagcctctgccttgtcccactgaggtccagggtagctcggggcaggggtggggcagtccagtgttggggactgtctacgtatgtgcaagtatatcccagggcatgtgccccgcaggggcctagagggtgggggccaggggtatttgcattcgtacattgtgtcatcaagcattccttgagcgcctactgggcatccggcctgtgctgggcatgggtggtgacattggcagaaatggccactggaaaggggagcgatgagctgtggaggaagccctggtggtaccagaggccagaatggtgggaaagacagatccagataatgctgggaagtgtggctacaccgtggcttggtcatagggtgagtgtaaacacccacaggacactgggggctgtcaccctgctctggcagtcctgctaagagtgtcaggcccgtctccattttatggttgaggaaactgaggtctagagaggtcaagattacttgcccagaatcactcaggcagctagtgatagaggtggggccaagcccaggctgcccgactgcagaccacgtgctcttccctggccacccacctcctaccatccccacgcttggggcttccctgctcagtgttactgtcattctgggaggccttggggccctcagccccttgagacaccctgattctgctgcatgccaagggcctgttctgccccagctgttcctcctcccctggggacaggcccacctccgggtccctccacccacatccccctggtcctacccctggcccttggcctcctccaagagggctcaccccgggtgctgctctgtgctctgcgtgtcccacagacgcttgttccagggggctccagcaaaccccttcgtggtctctcaaaggactgatcactgtccttgcctctaggaggggtcactaagcccttacctagggctgggtggacaacaaggcacagatgagggtgtgactggcccgaggtcacggtgagtgagtggcaaagctggccctgacgcctgggtttcttggccccagctgcccagcaggtgcctcgattccctgcccttgtgacctcccaggaaacagaactgatctgggacactatgtcacctctcctctcatctggggtcagtcagggttcgggggctgcagcagccaagcgcatgagaggtgtttccttggccttccagaaggcccactgtggagccagcctccctatgggaggcagagcggcaaggacagggctttggaatcagccaggtcggctcctgggctgtggccgtggagagacactgcccccaggatgacacaggcaagagcccctgaggcatgggaggcccagggaagaccatgggctgtaggggagagtgtggcaggtgacccaaaggcccaaagagggccgtggggcctgaggaggtcataatctcttctgagtgggggcaggtcgattcttgcacaaggtgggctcttcactgagccataagggacagggaggtatgggagagcgctgggggcccatccccctgtccacccagtgtccactggcctgtccttcagggagcagagcagagcaggtggtggacgggcccagtgctgggtgttttcaccaccatccccccatcccccatctaagaatcctaagaggcaggcgatccctcacctgcttactcactcagcagttacccggcccctgtgctggagataccaagggcatgggtggtccctgcttcgatggccccaaagctgggccagagttaagggaaagaggaggaagtcctaagcagagaagtagcaccattatccccatttaacagaagggaaactgaggctcggcaagcataggcgagttggcagtggaacacggatctaaactcaggtgtgtccaagtcctcccaaaggacagcagtgatggagaggaccccagccagctgtgtgacagctggttgttgctgacttcattttccaatccggagaaggggctctgtccacagtcccccgccgccaggtggcccacatgggaccagcatgggggcaggttatctgttggcctgaagagtgaaacctgtaccaggccaaaggtgagggcgtgagtgagggcaggagtgtttatggcagagtgaagttctgtgcccaccacaagaggctgtgagatgttctgaccctcacccactgtccaccaaaagcctctcctgctgatgggcactaggagacctcagggtactgcccatctgtttctcctcgggtgccagccagctgctggtgatcctcagccggagggcagggtaccaggtaagcttaactccatcttgggtgtttgtgacaggccctgcctgccaccctaggcagggaaagctgtcaagactcctgccaggaatggggggtgctgagtcatctcacgaagaatccctcactcttcccgggttcagcccagaagcccttccaggcatgatcttccccatcaggctgggctctggcagggacctgcccaggatggagatgagagagggtgagagatggagggcgagatttggatgggacccagggctcctgactctgccctggaaggttcatggggaaactcgctccttctgttggcagaggacagcccctggggaaccccaggcccaactctgtccggtatcccttttcctcccagctgccctcccctacttctcccttgctcccaaagctttccttggagaagggccctcctgcagctggaccctgcagggtggctccctcctccccatcaagcacaagagagggcccaggaaaaaaggtttcacataagtgtagagtcgcaaggacgcttagagtcggcagagtctggggtagggagacagcgacttgtccaaggtcaagcacagagggagaggttcaggagtcaggtcttctgccttctgagttggctcatcctgggcagtcacagactgtcctgcctgcacggctcctatccacctgggggtgtcgcagttgaggggctaattcccaggggactgacgttagttccctactccatccttccctggtgattcttgatcttcaaagcctcggggatcccaggtttccccatgtaactgagacaccctgcctgttagccctgggagacccctaaccttggcccaagacccctttgattctctaaggagcacgaaagggggaatgcccctcccaggagtttatgggagaagggactgggccggctgcctcccagcgatgcacttgacctgacactccccatgtcctggtgcgcacagcccttgtcggtgccccggcccctcccgcagcgttactgcctgtgtatagtataaatatatatattttctatatataagatgtataatataaggctccacaaatatatctgtgtgtgtgtgtgcgtgtgtgtgcggtgaagggcggtccccatcctgggcctccactctagacccccccaccacctggttaagtctcgagtgaatccagtggccccgtggcaccctcctttatgacatccatccatctgtggtgaaccaagtgaaggtggtgacttctggtgacatagtaataaagtgaagactcagaaccca

SEQ ID NO: 23881 - DNA, 2064 bp, Homo Sapiens
aaaatggggtttggtgtaaatctgggggtgtaatgttatcatatatcactctacctcgtaaaaccgacactgaaagctgccggacaacaaatcacaggtcaaaattatgagttcttcgtattatgtgaacgcgctttttagcaaatatacggcggggacttctctgttccaaaatgccgagccgacttcttgctcctttgcgcccaactcacagagaagcggctacggggcgggcgccggcgccttcgcctcgaccgttccgggcttatacaatgtcaacagccccctttatcagagcccctttgcgtccggctacggcctgggcgccgacgcctacggcaacctgccctgcgcctcctacgaccaaaacatccccgggctctgcagtgacctcgccaaaggcgcctgcgacaagacggacgagggcgcgctgcatggcgcggctgaggccaatttccgcatctacccctggatgcggtcttcaggacctgacaggaagcggggccgccagacctacacgcgctaccagacgctggagctggagaaggagttccacttcaaccgctacctgacccggcgccgccgcattgaaatcgcccacgcgctctgcctcaccgagcgccagattaagatctggttccagaaccgccgcatgaagtggaagaaagagcataaggacgaaggtccgactgccgccgcagctcccgagggcgccgtgccctctgccgccgccactgctgccgcggacaaggccgacgaggaggacgatgatgaagaagaggaagacgaggaggaatgaggggccgatccggggccctctctgcaccggacagtcggaaaagcgtctttaagagactcactggttttacttacaaaaatggaaaaaaaaaaaaaaaaagaaggaagggctggtcatggtggaggtgcgcaaggagaaacagttccagaaagtgatcacagaatacctgaatgcccaagagtcagcctggcgctcttggctgacctccaacattttaatctaagtggccgggacaaaattgaccaaaactagggggaggaggggaccagtagtactaatgacttactacaggtcattatgaaataagctaacaatactgaatctttggcgagaaaattttgctgctaagggcactgcactgtaatttgttagtaaaggctaatatagtagagattaaagctccgttgaggacaggtgccttgtctttaacacgttgtattcatcacatttaacataggagtaattgctgagggatgacttgattgtactacggtgagatgaagggttaagatttcttccccatcaccagtagcctccctagctggtgtccctgtctccatactctcctgaatccaccttccactattgtccgctggccctttccagcctgtaaactggacagttttcattcctctgcctaacatccagtcgtagcagcccatcccatctctttaaggataaaacccaaattcttggtatagtaaagctaaaccaagcgctctccctggaagggctcctgtgtttcaccaaagctgacttacgtactttccccatcttcccaggcatcttgtacgtcgttacatttatcatattggaaggtaataaatgatcttgttttcctcttttcctgggctccttattaagagcagggaacctaatttatatcctcagggcagaacaggtattcagaaaagaataatgcaagaggaaaaaagtttaatataaactagggagatcgtaacattggctaatcacgagcaaatatttatagaagacccactgtgtgctaaatggctcctaatatatacttaagatattctcccagcttggaaattctgctcacttcttgctcttgcttgcttctctggtgggcttccatccaaatttggccatgacatcagatcatatggttaatattaacaaatattgtataaattgttttcatacttaatatccaacaggttgtcaatttacgtactactggtgccttatctgtttttactgtcccatacactgcccatctggaataagcttagtgttaaaaa

SEQ ID NO: 23882 - DNA, 11072 bp, Homo Sapiens
gagggaaggagggagggaagcagccgctgacccgtggcatgagctggatgcggtgtccgttgcaggactagggcgccgacatgaacctgcaccaggtgctgaccggggctgtgaaccctggcgaccactgcttctccgtgggcagcattggcgaccagcgcttcacggcttatgcatctggatgtgacattgtaatactgggaagcgattttgaaagattacagataatcccaggagctaaacatggaaatattcaagtgggatgtgtagactgttcaatgcaacaaggcaagattgcagcgtcttatggaaatgttatctccatttttgaaccagttaacctaccaaaacaaaagaaaaatttggaattatatagtcagtggcagaaaagtggccaattttttctggaatcaatagcacacaatataacctgggatcccacaggcagtcgtcttttaactggttccagctatttgcaactctggtccaatactaacttggagaagccaactgaagatgaaaatttaaataaaacagatcttaactttggagattggaaatgcatttggcattgcaaaactgcttcccaagttcatttaatgaaattttcaccagatggagaattttttgccactgctgggaaggatgactgtcttttgaaggtttggtataatgtagaaaactggcggacagctgttacttctccagatggaagttcagaaaaacaatcccaaggagaaattgacttttcttttgtgtatctggcccatcctcgagcagtaaatggattttcctggcgtaaaacaagcaaatatatgcctagggcttctgtatgtaatgtactgttgacttgctgcaaagataatgtgtgtcgtctttgggtagagacatttttaccaaatgattgtttgctatacggaggtgactgcagccattggactgaatcaattaatttaacaaataacttcaagagaaatgcttccagtaaagaacgagttcaaaatgctttagaagtaaatctgagacattttcgtagaggtcggaggagatcacttgctcttgtagcacatacgggatatctaccacatcagcaggatcctcatcatgttcacaggaacactccactgcatgccaatgcactttgccactttcatattgcagccagcatcaacccagccacagacattccacttcttccatctattacatctctgagtctaaatgaaaatgaagagaagaccggaccttttgttgtacactggctaaacaataaagaactgcattttactttgtccatggaagtttttttacagcaacttagaaaaagttttgaacaaccatcttctgaggccagtgtagaagattctaatcaggcagatgtaaaatctgatgaagaaactgatgatggtgttgatgatctgaaaataaatcccgaaaagaaggaattaggctgtgataaaatggtaccaaactcaagttttacatcattatcgtcagctgccattgatcatcagattgaagtacttctgtctgaatggagtaaaaatgcagatatgctatttagtattcatcccatggatggttctttgctagtttggcatgtggattggctggatgaataccagcctggtatgtttcgtcaagtacaggtgtcctttgtttccagaattccagtagctttccccacaggtgatgcaaactctctctgtaaaagcataatgatgtatgcctgtaccaagaatgttgacttggctattcagcaggggaaacaaaaaccttctggcctcacccgttccacatcaatgcttatttcttctggtcacaataaatcatctaatagtttaaaattaagtatttttacgcctaatgttatgatgatatcaaaacatgctgatggttctctgaatcagtggctggtcagttttgccgaggaatctgctttttctactgttctcagtatttcccacaaatccagatattgtggtcatcgttttcatcttaatgatttagcttgccactcagtattaccattattgctgacaacatcacaccataatgcattaaggacaccagatgttgataacccagagcaaccttttgatgctctaaatattgaagaatgctctttgacacaacaaaataaaagcactgttgacgtggcatttcaggatcccagtgcagtttacagtgagcttattctgtggagggttgacccagttgggccattgtctttttctggaggagtttctgagcttgcccggattaattctcttcatgtttctgccttttccaatgtggcatggctgcccactcttatacccagttattgtctgggtgcatactgcaactctcctagtgcatgctttgtagccagtgatggacaatatctgagattatatgaagcagttattgatgctaagaaacttttatctgagctttctaaccctgaaatttctaaatatgttggtgaagtctttaacatcgtcagtcaacaatcaacagccaggccaggatgcattattgcattagatcccattaccaaacttcatggcagaaaaacccaactgcttcatgtttttgaagaagacttcattttgaataaccttgagaagaaaagccttggcaaagacagcattttatctaatgcaggcagctcacctaatggattttctgagaagttctacctaattgtaatagaatgcactcaagacaaccgttcactgttacacatgtggaatttacatctaaagtcaattcctgtctcattagatgaaaaagtagatacaaaattatccgaagcggtttggcagccagaagaacattattcttcttctccagagaagatcctatctcctttttcacaaaagtatcaggcttgcagagcaaatctccagagtaccagcaggttgactctgttttcagaaatggtttatagccaagaattgcatttaccagaaggagttgagataataagtattaagccatcagcaggacatctgagttcatcttctatatatcctgcatgcagtgctccttatttattggcaacttcatgttcagatgagaaagtaagattctggagatgcagagtaacagatggagaatctgccacgtcaaagaatggaaaaattgatcttgcatacatttgggaagaatggccattacttattgaagatggacttcagagcaatagtagtataactgtacctggtaggcctgtagaagttagctgtgcacatacaaatcgtttagcagtagcttataagcagcctgcatctaatagtagatcttcccaggactttgtgatgcatgtaagtatttttgaatgtgagtcaacaggaggttcatgttgggtccttgarcagacaattcatttagatgagttaagcacagtattggattctggcattagtgttgatagcaatttagtggcctataataaacaagacatgtatttatctagtaaagagaatatcacatcaaacacaaagcatttagttcacttagattggatgtctagagaagacggttctcatatcctgactgtaggaattggatcaaaactttttatgtatggacccctggctggcaaggtacaagaccaaactggtaaggaaaccctggcatttcctctctgggagagtaccaaagttgtgcccctttctaaatttgtactattacgaagtgtggacctagtttcttctgtagatggctccccaccttttcctgtttctttatcgtgggtccgggatggcatccttgtggtaggaatggactgtgaaatgcatgtgtattgccaatggcaaccatcttctaaacaagaacctgttataacagattcgtacagtgggagcactccatctataacaagtttaataaaacagagtaactccagttctgggttacatcctccaaagaaaactctgactcgatccatgaccagtcttgcacagaaaatctgtggaaagaaaactgcattcgatccttcagtggatatggaagattcaggtctttttgaagcagctcatgtactttccccgactctacctcagtatcatcccttgcagcttttggaactcatggatcttggtaaagttcggagagccaaggccatcttgtcccatcttgttaagtgcattgctggggaagttgtggctctgaatgaagctgaatctaatcatgaacgccgccttaggtctctcacaatcagtgctagtggaagcactaccagagacccccaggcattcaacaaggctgaaaatacagattacacagaaatagattctgttcctccacttcctttatatgccttacttgcagcagatgatgatagctgttactcatctttggagaaatctagtaatgagagtacgttaagtaaatcaaaccaattatctaaagaaagttatgatgagctttttcagactcaacttctaatgactgatactcatatgttagagacagatgaagaaaatacaaagcctagagttattgacctttcacagtacagtccgacttactttggacctgagcatgctcaggttctttctggccacttacttcattctagtttaccaggactcagccggatggagcagatgtctttgatggccttagcagatacaattgcaactacaagcactgatattggagaaagccgagacagaagccaaggtggagaaactcttgatgaatgtgggttaaaatttcttttggctgttcgactccatacctttcttacaacttcccttccagcctatcgagctcaactccttcaccaaggcctgtctacaagtcattttgcttgggcatttcactcagtagcagaagaagaactgctgaacatgttgccagccatgcagaaagatgatcccacttggtctgaactaagagctatgggtgtggggtggtgggtccggaatacccgcatcttacgcaaatgcatagaaaaagtagctaaagcagccttttatagaaagaatgatcctttagatgctgccattttttaccttgcaatgaaaaagaaagctgtgatttggggattatatagagctgaaaaaaacaccaggatgacacagttttttggacacaattttgaggatgagaggtggcgtaaagcagctttaaagaatgctttttctttgctaggcaaacaaagatttgaacattctgcagcattttttcttttagctggttgcctcagagatgcaattgaggtatgtcttgagaaattgaatgacattcagttggctcttgtaatagcaagactctatgagtctgaatttgatacatctgcagcatataaatctattttacgtaaaaaagttttgggaatcgattctcctgtcagtgaactgtgttcattgaacataaatatgcatcatgatccttttcttcggagcatggcatattggattttggaagattatagtggtgctctggaaacattaataaagcaacctatcagagagaatgatgatcaagttttatcagccagtaatcctacagtttttaatttctacaattatctaagaacacatcctcttttgctgagacgtcattttggatcatctgatacattttccacacatatgagcctaacaggaaaaagtggactggcaggaacaattaatttaagtgaaagacgtttattttttaccactgccagtgctcatttaaaagctggctgcccaatgttggctttggaagtattatcaaagatgcctaaagtcatcaagaaaacaagacctttttatagggcttctagttttctggatactagtaaagactgttctccttcttctccattaaagttggatgcaagggaagataagtcttctgctgttgattggtcacagtcactgataaatggttttggatcttcttcagagggttcctcagagaagcaatcaaactccactctttcttttgactggagccaaccaagtgttgtgtttcaggatgactctttagagttaaaatgggacagtgataatgatgaagaaaatgaggatgtccctatttcaatgaaagaactaaaacctttacagagaaaaacagataaaaagttggatgacataagttctaactacacagaatctttcagcacactagatgaaaatgaccttttaaatccatcagaagatataattgcagttcagttaaaatttagagcatgtttaaagattctcacagtagaacttcgtactttatctactggctatgaaatagatggtggaaaattgcgttaccaactataccactggcttgaaaaagaggtgatagctcttcagaggacttgtgacttttgctcagatgctgaagaactacagtctgcatttggcagaaatgaagatgaatttggattaaatgaggatgctgaagatttgcctcaccaaacaaaagtgaaacaactgagagaaaattttcaggaaaaaagacagtggctcttgaagtatcagtcacttttgagaatgtttcttagttactgcatacttcatggatcccatggtgggggtcttgcatctgtaagaatggaattgattttgcttttgcaagaatctcagcaggaaacatcagaaccactattttctagccttctgtcagagcaaacctcagtgcctctcctctttgcttgtacagccaatgccaaaacagtagttgccaatccattattgcaccttagtaatctgacacatgatattctccatgccataataaactttgattcaccaccccaccctgatatccaaagcaataaagtgtatgtaatgcatactttagcagcttcactttctgcttgtatttatcagtgcctttgtggtagtcataactacagttcatttcagacgaatcagtttactggaatggtatatcagacagtactgcttcctcatcgaccttctttgaaaacaggaagcttagatgaagcattaactcccaatacgtcaccagctcaatggccaggaataacttgtctaattcgacttttgaattcttctggcgaggaagcccagtcagggcttacagtcttgctctgtgagattctcacagcagtgtatcttagtctcttcatccatggcctggccacacattcaagtaatgagctatttcggattgtggcccatcctctaaatgagaaaatgtggtctgctgtgtttggtggaggtgcacatgttcctagcaaagaacagacacattcaaaaactttacctgtttcttcactagttgaagaaggagaaaaacagaacaaacgttttaggccgtcaaaaatgtcttgcagagaatctgccccactgaccccttcctcggcaccagtaagccaggagtcactggcggttaaagaaaagttcatcccacctgagctcagtatctgggactatttcatagctaagccttttctaccctcttctcaaagtagagccgaatatgattcasaggagagtctgggaagtgatgatgatgacaatgatgatgatgatgatgttttagcatcagatttccatctccaggaacattctaattcaaattcatatagttggtccttgatgcggttggcgatggtgcaattggtgctcaacaatttgaagactttttatcccttcgcaggtcatgatcttgcagagcttccagttagttcacctctttgtcatgcggttctaaaaactcttcaatgttgggaacaagttcttctccgacgacttgaaatccatggtgggccacctcaaaattatatcgcaagtcataccgccgaagagagtttgtctgcaggtcctgcaattcttcgccacaaagctttactggaacctacaaacactcctttcaaatccaaacaccatctggcactgtctgtgaagaggctttggcagtatttggtgaagcaggaagaaattcaggaaacctttatcaaaaatatattcacaaagaaacggtgtctaaatgagatagaagcagatttgggatatcctggaggtaaagcaagaattattcataaggaatctgatatcattactgcgtttgctgttaataaggcaaatagaaactgcatagcaatcgcttccagtcatgatgttcaagaactggatgtttctggaattctggccacacaggtctacacttgggtagatgatgatatagaagtggaaaccaaaggatcagaagatttcttggttatacatgctcgtgatgatttaacagctgttcaaggtacaactccatatacacatagcaatcctggcactccaatcaacatgccatggcttggtagtacacagactggcagaggagcatctgtgatgattaagaaagccattaataatgttagaagaatgacttctcatccaactcttccttactatctgacaggagctcaagatggaagtgtcagaatgtttgaatggggccattctcaacaaataacctgttttcgatctggtggcaattcaagagttacaagaatgagatttaactatcagggaaataagtttggaatagttgatgctgatggatatttaagtttgtatcaaacaaactggaaatgttgtccagttactggaagcatgcctaagccatacctgacttggcagtgtcataacaaaacagccaatgattttgtcttcgttagttcctcctctctgatagctacagctggtctttcaactgacamtagaaacgtatgtttgtgggatactcttgtagcacctgccgatagtttagtccatgcatttacctgccatgacagtggagccacagttttagcatatgctccaaaacatcagctactaatatcaggtggcagaaaaggttttacatatgtatttgacctttgtcaacgacaacagaggcagcttttccagagccatgattctcctgttaaagccgttgctgttgatccaactgaagagtactttgttacaggatctgccgaaggcaatataaagatttggagtctctctacctttggtcttctccatacttttgtcagtgaacatgctcggcagtccatttttagaaatattggaactggagtgatgcaaattgagacagggcctgcaaatcacattttctcctgtggagctgatggaacaatgaaaatgagaatactgccagatcagtttagccctttaaatgaagtgttgaaaaatgatgtgaaatttatgctataacatttttacaataagatgtacaatttattacctatatggaagtggccaacagatataatatacagtgatcattctctatgccacaaattagctaatgctttcttgtttttatatttattttatggagctttgcccttgatgcactgatgccttaaaaattaacaaggtcattcagaagtagattacattgcctaaagtagaatgtgtaagtaatgctgtaataatacatatcatagtattattataatcagtatgtcatagtgttaaaggtgttttgtttactcaattgatacttttccacaggcatctctgcatgaatttcttccacagtaaaaatacgttttttgtaaaggcaattgtacataatactcatcacttaattcaccacactctcacttcctttattagccttatacatctcaaactcttctcttaattaatgataggtatttgagtaagaatgaaaaaaataatgaacatcttcattaaaattgtcattgagacgtcagtgataaatgagctagatggctcaatatgtaaggttttcagtagtttaccctccggaacccaagttatatgtatgtatacgtgtgtgtgtgtgtgtgtgtgtgtatcttacacatcttatttgaacttagttgtatatattagcgaaaactggtttttcatgtgtttttgtgccataacaactattgccaccagaataacttttttttgcaactgtgcttttcatttttaaaaaatttttgaattcccatcctaattttcaaataagtttcaaggagactatcaggattattattttaaagattagatttagtcaaataagtcttagcaggcaataaagtttctgtggtggcatatatcatgtaagacacttaaagtaagtttgtgaatttgtcaactttcgagcatcaaacaaatattttacttaaattttattttrtcttatttttagtgctttaatctcaaaattctgaaaagcgaatagcagtgttttcagaaacaaatgtgaaagcagtcaaattaagtagatactatttagaaatgtaaaatactctccagatctaccattaatagaagataaactacaccttatattttatttttgccaaaatattttattataaaatatgaccaaaatatttaaaatgcacaatgcttttaacttaaatgtgctaaccctgtttctgtctgttttgtgctgtaccttttctgattcagaattatagaaaacttgataaatacttgattttaaccaatgagactacaggcagatgggactaagtgtttatgggacaattatgtactatttaacttaaatatattttgtttaataggaaatatataataatagcattttatgtaataaaatatgggcaacgattatcttggaaattaaagagtcaaagcaaagaaatgaagggctggtaaaatgaattttgtaatatcctcaggatacttttatcttaaaagtatgttgttaaagattttgtaaattgtatttcaacaattttaaatgtgttgagcaagttgcagtgcaaacactgtcattatgtagagagtttatatgcacatgaataacctgtacctataaatcgtgcaataaccatatgcgactattttgccatggagaaatctgacagcattgcaaacaatagtattgtttgatgtagttaaccttaagttatttttcagtaatttcttcacaaatcaagattcaaacagctttaaacacttccaatgagataaaatatttactattatgcttattagaacaaaaggtgtttaaggatgaactaaatattttaattgagcatttatatggataatcatacattatgtaagcccatatgtatttacatccagagtcataatattttaaataaacaatcatgcagaaacttt

SEQ ID NO: 23883 - DNA, 801 bp, Homo Sapiens
ccatggaggagtacgctcgggagccctgcccatggcgaattgtggatgattgcggtggagccttcactatgggtgtcatcggtggcggagtcttccaggccatcaagggtttccgcaatgcccctgttggaattcggcaccggttgagaggtagtgccaatgctgtgaggatccgagccccccagattggaggtagcttcgcagtgtgggggggcctgttctccaccatcgactgtggcctggtgcggcttcggggcaaggaggatccctggaactctatcaccagtggagcattgaccggggctgtgctggctgcccgcagtggcccactggccatggtgggctcagcaatgatggggggcatcctgttggccctcattgagggcgttggcatcctcctcactcgctacacagcccagcagttccgaaatgcgcccccattcctggaggaccccagccagctgccccctaaggatggcaccccggccccaggctaccccagctatcagcagtaccactgaggaagccactgccaccatgggagctacttctcggttccctccccgatggtctacctcgaagggagggctggctcccagttagccctgggaccctccagagagggtttctactctgctccctagtcccagggtgggggtggggcaccccagctgccctgacagatgggtcccctttttctctctcagggcaccccagccccacactcacatgtacgaagttctcaccccagctcctttgtgtggcaccctgatgagtatttaaagcccgttttgaaatgcc

SEQ ID NO: 23884 - DNA, 404123 bp, Homo Sapiens
cccaccccccagcagccctgccggctccccacccacacagctcccactgggaggtacctgacagtggtggtcccatctcaccctcccggtccaagggccctggtgggaagcgacccgagcgtattcgccgcccgcagctcgcgcgcctgggcacccgggggcgctcacagtgatcgcggggccagcacaccctcacccaggacatccctttcctccccccaaccccaactccggagtggctcagagggagggaaagtagatgccggcaccctaccccgcccctcctgcccccgctgtgccgttctcggtcgtggtatcggccaggccttaccccttcctccctggcgcagctggggtcctcctccgggccaggcagagcaggcgggcatcagaagtgggggccaagcaggtgggtgagggcagggcaggagcaagcaggggagatgcagacggggcggggccaagcaggtgggtgagggcggggccaagcaggtgggcggggagggggcggggccaggcggggtaaatgcacactggaacggggccaaacaggtgggcgaggagggggcggggccaagcgggatagatgacacgagcggggctaagcaggtgggctcgggcgggggtgggggtgggggcgggggcgcaggcgggggcgggggcgcggacaggccaagccagggggtgaggcggaggcagggccaggccggtccgtgagggagagggcgggccaaaccggtgggcgcgggcagggacgccctgtgcgcgccggaccggcgggggcggggcgtgcaggcgggggcggggcacgccgtcccatgggaccggccctcggccactgccccctccggccccgccccgagcgcccgggctgggccggcagcggccccccgcggcggggctggcagcagtggctgcccgcactgcgcccgggcgctcgccttcgctgcagctcccggtgccgccgctcgggccggccccccggcaggccctcctcgttatggccgcggcctcctccccgcccagggccgaaaggaagcgctggggttggggccgcctgccaggcgcccggcggggcagcgcgggcctggccaaaaaatgccccttctcgctggaactggcggagggcggcccggcgggcggcgcgctctacgcgcccatcgcgcccggcgccccaggtcccgcgccccatgtgtccccggccgcgcccgccgcgcccccagttgcttccgaccttggcccgcggccgccggtgagcctagacccgcgcgtctccatatacagcacgcgccgcccggtgttggcgcgaacccacgtccagggccgcgtctacaacttcctcgagcgtcccaccggctggaaatgcttcgtttaccacttcgccgtgtgagtatcgccaccggcgacggccggcacgaaggtgcttcctgagagctggtgtgggggagctctgtcccagcgccacctgccccgtcggagctgcgaccccggagcagaggagggaaggaagtggggaaacgcagaaacacaaactctgcactctcccttgaagttcagaggcgctgctgtgtctgggggtgcgcatcttctcgcaggcccggcgtggggagggagccggctggggaggggaccacctggagcccagaatttggctccacacctccgggagggtagtccaggtgtgaatccttctgggaagagaagcgtgctggggagcgcacccttgggtgcagtaagataactcctcaaggtcggctgagactcgaggctcaggagcccccaagagagaaggcccctgatgtccggtgccgcatctcagaccccctgaggcccaggtggactctggggcagggggctgtccaggataggaaggtgacggtggcggtgctccctgagggctcagcatgccacgggccgtccccacgggccccacattaactaattgaaccaagctcatgaaaacctggcttgatgcagagagcggagaggcacgtttgcagctctcactaagaggcagctgtgctcccggagaaagcagcgctggtagcagaggcacctggcccccctgttaccaggtggttccaattcccggtacagcgtgcctgagcagggctgggcactggatttctcagggacaggcctgggaagtcacctccgggaaggtccaggctgctctcctccatgcctgcctggggccttcccccgctgccccagtggccctacttcctggctgcccagccagcggccttttggtgtggtgccagcctctggcctgggagcctctacccagacatcccatggctgatggctgtggggctcacctgagggctgaagggtggtctccctgagcgtcctcaggtggaagcatctcctctgcctcgggcaggctcagtagagaactggctggagggcatccagaggcctgtccatgcctgctggcagctgccaccagggcctcagggcgggtgacagcaggagccaggccccaaatggcttcaagcatcgtctcaggtgagggggtggggtaggggtcgcagggctactgccttccttgctaagaggtggccttccacatcaggaaggggaagtcttacccacctccctcctcaaagatgtggttggggggtgatcttggagacttttccccaccccagctcccaagcccctgtctcctgacatgtcagtgggtgcctgagccacagccgctgctggtctgtaagaggagctggctctgctcgtggctgcaacagcgggggctcggcttggggtttgggagatatttgtgtgcagtgaccccaggggaacccagtccgatgccactgtgcaaatgtctagcagatgccaggttcacaggtgctgtgtgctggtggccacctgcctcccggaccccagactctctgagatgtccaagggtgggaagacctcctcagccagaggccaaggcaaagtgcccgcagaccccctcaattctcacttgtattcaggtttgtggacacatgcctccgggctcactgcagccacccgtgtggaggaagaggaggaagagggctcgccacgccccagaggaagtctctgcttgcacttgtgttttcttcctcatttggattgtttaggtctcggaagtttgctcagcaagagtctaccttcgcccagcctccgcagagctggcaaggcaggggtggcttctggggacaggggcaggatggcttctgtgaaggggtggccaggaaagggatgcttctgtgaagtggccagatctggggctggtcctttccagttctgggtcctgtccttgtaagacgtgtgcctggccctgggaagttgtcatgaacagcctccaacccaggtacctccatgtggggtgggactggaggtggaccctgactgggcaggacatgtggcttggtgggggcctgggagatgcgctcccaccctcagtgccctaggaggttggcaggaccagtctcttgaggggagacctggtcatagaaccaggatggcagagtagctggaggccacctgcagcctcacgaaatcaggtccagccttgcgccagtccagccttgtgttgctgtaagaagtcttggcaatggtggcggagacagggccctgtccttaggtggattgtgaaatgagaaatattgtggtttctggcctgaagacgacaagcctggccttgaagagccagggcccaggcatgtgtgcaggggggttgaggcaggagccggtgttccgctgaccctacagggctagggcgaactctcctgtgtgcgcctggggaagccagccaggatatcctgtcccctcctcggggaaccccccctccccaggagagcagctcttcctgtgttccttctggcctccctgggctggccggggtggacacggcacctgggccacaactcttgcccgcttaggcttcctgcccccaacacccccagttatctgtggttgcttgcgcccccactgggggcagctcccatcttagctgaggggatgggggtccatacagccctgctgcacccagcggtcctagctcccttgctgtgagccttagccaggggtgtggacatccaggtggcatctactctggttgctgagatgcttggagatcctggttgtggccaaggagagggatttgaggggggacctgcagtgcatggagactgcccctgtaggctctcaaacctaagtctggctcagcagcccctgttccccgctcctacagccttggctttccctgtttcccaagaactttccaggggtgttggcagaaccctcgcgggtgcgtgttaatcaacaatggagccagaagcaggtcccagaggtggatggggctgatctggctgcctccccaaaagacaaggccatgcagagccagctctcagggtgcagcacccaactttgtggactccagtgccctcctatctccaggctctggcattggagtctgaagcagctgctgggcagttgttctgcagctgggcagggaggccagaggccaaggcaggtggtggggctgggcacagaggaggacggggctctctgagccatcaggtctctttctctccatcttctttaagatctgtccacccactcctcagccctagattcccaggaaaactgggaattccttttggggcttttcccagtgctaccttctgtggggcatgagcccttggtctcatcccctggctgtctggggtcccctcacctacatcgcagacccggcccagtgtttctagatccgctcttgccaacatgtcgagtgcctaactgtggcttcgtactagttggggggaacacaggcatcccttacccctggccgtcagctggggagggggtagtccaggtggcaagagcctagagcctgggagaaagggcctccccagcctgtgtggggacaggggatcaggagggtggtagggacttgggtccttgcaggtggcctgggcagtgcctggtgggcatggatcaggtggcagggctttgtgtctgggcatggccctgtggctgggctgccttggccagggtcctgggccttctgagtctgcgtctcattctctgtggcaggctcctggtgctggcaccttcagtgcagggtgcctcggttggagggaacattcacccgtgcctggcactgaagccacagctccctgtgggcatggtgcccgcagcttgagcctacaaccctggggtactgggggcaggagggtccctttttgcttggcagttgcgaggtactggaacctttgcatataacgtgcgggctgcgttgtgtcacagggccgggtctgagggaggggctttgcggggacactcctgggtaccgatgggatgaacttccgctgggcctgaaggcctgggatgcttttgggccggccagtgcggggtcaggtggttggagccagggagctggcacgtcagctgctgctatgagttctgccacgtgccatcctggcatgtggcacgtcttgcagaggacaggaagggtgaacagctccaaacccaccctatgtgtgctccagagctggaaacaggctgtgcggagctgagtgcctttgggggcagctgagatgggcaggagcaccgtgcccaccgagggtgtcagagtgacaggggttgccaggcaactccacccgggtggctgatgcccccgtttttaaaggcgttgggtgccgagaattcccctcctgctgctaggctggtttcaagtctgctccttctgcacttgacgtccttgccagtgtgatccagagctgctcacacgagcaagcgtcctcgagtcctagggatgctgttaacagggcagcgggtccagggagctggtcctgacgcaggggtcctgatgcagcgggtccagggagctcatgccttccagcgatgggaatgccaccggtccctgtagccaaggtgcagatgcacacgtcctggtcctgagcccctgctcggccctaggcagggcccccagttccctgcattccacccgccttgtctgggaggtggacgagccctccgtagccctgacattccaaactggcttttggcccctgcgatatcttgctgtgattcaagactctgtccacgggcaagaacaacaaggctgggacaatctcatctcaggcatctgtgggaggagacagctcccaagggcggtgatgccaggagaacattccaggcccaggaagagctgagagacagcagatgcccaagacgagttgctggtgtgtggccagtgctgggagagcatggtgtcggcccggggagatgccgcagagaagcttccagaagcccaacatctgctgctggaggggagaatgaggcaatgaatatcaccatcctgggccactttgacccagaccccaaggatttggttacagaggggagggcggcagcgtctggcttcactctcgggaggtgccttggggctggccagtatgggattgctgtcactgtgggtcactccagccccggatgctcctacaccatgctctgcttgcatctggggtccctgcgggcacgtcggtgagaccgtcctggcctccacaccccttcctggtgggtagctgtctctctccagcagctcctccaaccaccatgagaaaccccagacctcacagatgcaaaattatcgtggttgacaaagggaggcggctggtgtctctggtactggctgggtgaccacagggatgccgcgtgaccctagtccagggggccgcttttacacgaggcatctgaccatgtgatagggtgtggcttctgctgcctggcccagccctcttctgggagccccacgtgggtgggtgctggctggggaggggcttctctctggggagcaggccctggctggaggtggggaagatccatgatgggacccaggtgtcttcccacttctcgaccatctcctgggaagttctaatgtttggttcagggtgtggggtccatctgagcaggcatggtgcttccagaaggatccaggttaagggtggtgggtccaagggggtgcctgagcccttctgcagaaacaccgttccccgtagagcagcagtccccaacctttttagtaccagagacctgttttatggaagaaagatttttccacccgggcagtggtgatcttgggatgaaactgttccatctcagatcatcaggtattagattctcataagaagcgtgcaacctagatcccttgtgtgcgcagttcacaataggatttgtgctcctgtgagaatctaatgccaccgctgatccaacaggaggtagagctcaggtggccgtgcacattcacctgacgctcactcactgctgtgcggcctgctccctaacaggccacggacccggggttggagaaccctgtcttagaggattgaggctcggggccatgggatcggcactgtcattgcccttggagggttctgagcactggaaggacctggctgtggtcccaggcactgggtggatggaccagcagaaaggctcccaggagggtcgtggctccctcatcggcaccggactctcaggatgagccgcctggagtctgttggcatctgcctggccgcctctggcaggaacttctcctgatggaagagccgggctggggagctgactccaggacaggcccctgcccgctctgggacctggggcctgggctctgctccccatttcgctcctccactcacagatgaggacatttgggtcgccttacagatgagacaactaggcctggccactttgctcatgccacacccagaaagccctcaggacacccagaagcccttaggatgcccagaagcccttaggatgctgtggtctcaagtgaggtggtgcactattcctggcctcaggcccagtttgtatccatgggcacccccactcccacctagcacttgccaccaggaagcaccctgaggactgtcccctttgagagttggctctcaaagccttggtctgtgcctgcgtcctggcagcgggtgagctacggctgccctcacccagagagtgcaggttccctgggggcgggggctcttagctttccctccatatctgctaaggtgcacacctttctctgctgccttccaaaatcatactctggggcgcactgaaagggtgctctgagtagctctccccggctcctggctgaacttgctccaggcagagatttgaagagattcagaaagcaggaaccacaggcagagcagctggacagggacccccacccctgtactcccttcggccctggaatgctcctctgcatggagacagcccagctgcactgggacccctcaccccaccctggggccaggggctgtgtcctcgacttccacgcagagcagcccgggcagcttagaggagggagcagaaggagctctgactgagaggggtagacccctcccagaggcatccccaccctgccccaaagaggggagcagctggagacggggcgggaacctcctctggctatatctaagcagccccgggaaccatgcgcttcaagcgtttgatcttgacgggccctgggcttggcattctattccgtgacgtctccagctgttctcttgtgaagagtcacgtctgtgctcttggctaggatggctcaaatattataaaacatacagctttgctaattaaaacagcatgacattgccttataggcaggcagatcaccaatggaacagctttttaaaaaccgcatgtaactccattgtatatgaagtttcgtaaaagaggcagcatctccaaccagtggggaacagatgggcggcttcatgcgtgctgcggggtgggtgggtggccatgtggaaagtgaccagactgcacccacttgtcacatcacacaccaggatagactcccagtgggtcagaaaaccacttgggtacctaaagaaagcgcctggaattctttaccctgagagcgaagaaacttttctatgacttgaatgctagatgcgtggaggagatttatgtgtttgaccacataagaaagaagcaaccttggctgggtgcggtggctcacgcctgtaatcccagcactttgggaggccaaggcgggcggatcaccttaggtcgggagttcgagaccagcctgaccaacgtggtgaaaccctgtctctactaaaaatacagaattagccgggcgtggtggtgcatgcctgtaatcccagctacttgggaggctgaggcaggagaatcacttgaacccgggaggtggaggttgcagtgagccgagatcacgccgttgcactccagcctgggcaataagagtgaaattccatctcagggaaaaaaaaaaatcttaatgggaaacagccaattgccaggctgggggaagatgtgatgtttcacgaagggttaatctgtttactacagaaagagtttctgaaaacagaagaaaacccacagccagcaggagatgtgaataccactcacaggacagtgacccacagggggaccttgaacatgtgagaaggtgccgccttcactcctggcgagaggggtgtcgaggaaaatgtcactgaggtcccttctggctggcagaaatcctttggcatttgctggtaggcatgcaagagggtagactctgtgaggaagggatttggcaacatctagcaaaactgtcttcactgacctgtgacccagcaaccccctccccagaacctacctgaaggcactggcaaaggcaggagaagctgcgtgtgcagggctgcttgtgaaagtactgtttggaaaactgcaaatgcccattgtaggagactggttgaatcagagatttgtggaatattatgcagctgtaaaaaaggaatgcatagatctctcttattatgaagtgattatcaggatttatttaattatttttttcaggcagggtcttgctgtgttggcaagggtggtcttgaaatcttggcctcaagcagtcctcccacctcagcctcccaaagtgcttagattacaggtatgagccaccacacctggcgtatcaggatgctttttaagtgaaaaagcacagtgaataaaaatatagcagctattcttcatctgataaaggggaggatgcaagtctggatgtatattaaaaacgaaagcaatggaagcctccaaatcttaaaagtttacctcaaaagggtggcggggggggaggtggcatatggaatcaagatgcctctgaatgtacctggttttatagatttcactttgaagccatgtaaatcaatagcttgcgtaatttttaaaaagctgttcgtaatcgcttggtgaaaaatccctaaataaatcttaaccagaaaaagtagtccctcaaaattgaaatgaaacaaatgagcctaaaaatgtgtgctgaattagtggcttaaccacccagaaggactgatttcaggtgacatatttctagcgggttactgctgaagacaaatagagctgcatgcagtggccacataattgttgtgatactatttgttatattattctaagagtgctgcatgggaattgcaggttaaggtaagtaattgtgttggtatcaccaagaatggaggttttacaaaatatgattcacatgtaaacagaattaaaaacaaaaaccgtatgatcatctcaatagatgtagaaaaaaacttttgataaaattcatcatcccttcattaaaaaaccctcaacaaaaataggcatcaaaggaacatatctcaataagagccatctatgacaaacccatggtaaatgtggtactgaatgggtaaaagcgagacacattccccttaagaataggaacaagacaaggatgcccactttcaccactcctattcaaaataatactggaggtcctagtcagaaaaatcaggcaagagaaagaaataaaaggggatccaaataggaaaagaggaactcaaatcatctcccttcaccgatgatgataagattctatacctagaaaaccctaaagagtctgccaaaagccttctggaactgtaagtgaagtctcaggatacaaaatccatgtacaaaaatcagcagctttttttttttttttgagatggagtctcactctgtcacccaggctggagtgcagtgatgagatcttggctcactgcaagctctgcctcccaggttcacaccattctcctgcctcagcctcccaagtagctgggacaacaggcgtctgccaccacgcccggctaattttttgtattttttagtagagacggggtttcaccgtgttagccaggatggtcttgatctcctgaccttgtgatccacccgccttggcctcccaaagtgctgggattcaggcttgagccaccgtgcctggccaatcagcagcattcttatacaccaatgatgttcaaactcagagccaaatcaagaatgcaattccatttataatagacacaaaaagaataaaatacccaggaatacatctaaccaaggaggtgaaagatctctacacaagagttacaaaacactgctgaaagaaatcatagatgacagaaatggaaaaacattccatgctgatgggttggaagaatcaatattgttaaaatggccatacggcccaaagcaatctacagattcaatgctattcctatcaaactaccaatgccacttttcatagaattagaaaaaactattctaacattcatgtagaaccaaaaaagagccgaaatagcaaaaaaggaactaagccagaggcatcacattacctgacttcaaactatacttcaaggctacagtagccaaaacagcatggtattggtacatagacatatagaccaatggaacagaatagagaactcagaaataaagccacacacctacagccatctgatcatcaataaaatcaacaaaaatatgccatggggaaaagacttcatattcaataatggcacagggataactggctccccatatgcagaggaatgaagtcagactcctatctatcaccatatacaaaaattaaagacagattagacgtggccaggcacagtggctcatgcctgtaatcctagcactttgggaggccaaggtgggtggatcatggggtcaggagtttgagaccagcttggccaaggtggtgaaaccccatctctactaaaaatacaaaaattagctgggtgtggtggtacgcacctgtggtcccagctacccgggaagctgaggcaggagattgcaccactgcgctccagcctgggtgacaagagcaaaactctatctcaaaacaaaaaaaaaaaaattaaaaaagattagatgtaaacattagattacaaactgaaaaaatcctggaagaaaatagtcttctcaatattggccttggcaaataatatatagctaataagtcctcaaaagcaattgcaacaaaactaaaaattcacaagtgggacctaattaaagagctgctgcacagcaagagagactgccaagggaataaacagataacctacagaatgggagaaaatattagcaaactttgaactgacaaaggcctaatattcaaagtctacaaagaattaacaaatcaacaagcaaaaaaacaaccccattaaaaagtgggcaaaagggccgggcgcggtggctcacgcctgtaatcccagcacgttgggaggccaaggtgggcagatcaccaggtcaggagatcgagaccatcctggctaacatggtgaaaccctgtctctactaaaaatacaaaaaaaaaaaaaaaaaaaaaaaattagccgggcgtgggggtgggcgcctgtagtcccagctactcgggaggctgaggcaggagaatggcgtgaacccaggagacggagcttgcagtaagccgagatcacgccactgcactccagcctgggtgacagagcaagactcggtctcaaaaaaaaaaaaaaaaaaaaaaaaaaacacaaaaaaacaaaaagtgggcaaaagatatggtagacagttcttaaaaagaagacatacaaacagtcaaacacatgaaaaaatgctcatcactgatcatcagagaaatgcaaatcaaagtcacaatgagataccatctcacgccagtcagaatggcctttgtttaaaaagtctcaaaacaacagatgctggagaggcagtagagaaaggggaacacttacaccctgttgacgggagtgtaaatgagtccagccaccatggaaggcagtttggagatttcccaaagaaccaagagttgaactaccattcgatccagcagtcccgtgtgctgagtttatacccaaagaaaaattagtcgttctaccaaaaagacatatgcacctaaacattcatggcagaaagacatgagtcaactcaggtgcctgtcaatggtagatcgaataaagcaaatgtgatatatatacaccatggaatactatgcagacgtgaaaatcatgtcctttgcagcaacatggatgcagctggaggtcgttatcctaagtgaattaatgcagaaactgaaaaccaaatactgcgtggtctcatggattataagtgagggctaaacatcaaatccatgtggacataatgatgagaaccaaagacactggggaaaacaaaagtggggaagggggaaagggaacaaggttttaaaagttacctgtgggtgctgtgcgcactacgtgggaaaccggatcgtttggactccaaacctcagcatcatgcaaaaaacctttgtgacaaacctggacttggacctcctgaacccatttaaaaagttgaataaaatggaaacttttggcatgggagaaaaaaaaaaaaaacagatgtaagttagaagaggttacgcaaaaatcctccatccctgcatttgaatgaggactatcagtatgcatccaggatgacgtttacttaaatatctctgtttcctggaaaggcccaggaccaaggaccactcagcagctaagagcatctctagaccccagactgtggcctctaggtaccatttccccctgaaagaaaccagggcccctggcggattccaggtctgtggcagaagatgtgcaagctaagcctggagtattcatcacagcagaaggcagggaagttatcagaggccccctagggccatgtcactggaacttgaaggggtccttgtcttcccccttctccccaagctgaagatgcagtgggtaagcctcactgaaaataacagaggaagtggatgagctgcattgatggggttcagatcccaagttcatcctgatactgaggggcaaaaccagtggactttgatttgcatttctctaaagatctgtggaggtcaatagggagaccgctcatgatgttgaatcctggcaagcaaacggagagaatctgacatgtgtcccagtcgtgattaacctgtgaactgtaactcggggaaacccagtagctgatggggttgcgtccttctttgggactcccgcagatgcctgaggcggcagtgctgctgaagtcctgccaggctccagctcctggtgaggtcagggattccgcatgcagcgtcacagctgccaacctctccaaagcagtaaaggccttcggacagtgcacagaaagtgctcccatccacaatgcttccttgcctggatggatggatggatggatggatggatggatggatggatggatggatggatcgatcgatctcaccaagcctcgtgctctaagtacaagtttactggaaatactcgggccagaggaacgcgctaaatgatactacaggaggccacttgcagaatcccagtggtgggggatggctctgtaggacacatgacctgatttcctcagtaagtcaatgaccaagaaataacggagagaaggaggaaagaatcacctatccaccaattgtgacatatggccttagttaggtcctcaataaatgatgacaaatattggattaaattacttctggtttgctgcatgttccatttttgcccatgccgcacctgccatggtgcatttctgattcccgtgcccagttgggaggctttggggttgttgggatgcttttgtgaatggcttccttccttcccaggcacaggggctttatggggctctggagcagacagaccagagtttgcacccagctcccagctggccatgttacctcaactgcaaaacgagagacggacttccttgggacgcggtggtggggacactgtggtctgtctcctctgggcgccccgtggcgcccggtggtgtgaggttaggatgtggggcgtggtgtccagggactgtgtggcctgcctggagctgggcagagacaaagcatgcatgtgacactccctgacttcaggccataacaggggcaggggtggggggcaatcagggttcctagaggacaaccccatgtagttcctcactgcagggcttggagggagcaggtgaaggcttacctgtcttaggtaatgaggagctgtgcgggtctgagacagctctggttcctttaagggtatgtaggggtcactgccagtctgtagctccctctgtgggggcaggctgtggcactgtggcgactggcagtactgacttcctctaagccaaccgggcagggacaagtcagcttgttgttccgtccacagtagagggcggccctgggggtgaacggctgaccgtgagggcgtggtccctccccccagaccaccccggaggccccctccgccctcctgcctacaaagagttccccctttgtgttgagaggcctgggtctcagaggtagatgaatggagtcgtgaaatcaggcagggattcccttctgcttaaaacccactctccttcccatgcagcacaggtggccaaaacctgcggctgggtcagaggactggtttagtaagaatttttttttttttaaatgtggttatctgctagccagaaaaggtgtgtggtttcgcagtctttcagacaaactgaatttaatagtagctgacgtgaacccctgtttctcctctaggctccagagccgcaccccagtgcaggtgtggaagctcagttcctccaaaacccagacaggccttggtgtcctgactgccacccccagggggcccctcactcgagtccttgcttgcagtgcccatgggcagcagaggtgtccggagatgcaacagggcccagacccctaccagcctgtggcccagctgggggcaggactccggggcagggtgagtccctgcgtgacctgattctctgtgggcaggccgggcagggtggctgcagggcggcggagcctgtgctgctggcctgcatttctctggctggacagatactgcgcccatatccctggtctttcaaagggctctgtggctggtggagggcagcaatgccccaagggaggagcaggtgcccaagcccccaggtggccctccgggtacaggtacttgtttactctgtggcatcagtcctgcttcccagctcaaggccctggcctccacaggcctcctccctccctccctccctccctccttcccttttttcctgtggctccaaggcccacagtagaaaggctccagtctgtgtccatgtgttttggaggcctctcaggtacagggactgtcagcccagctgtaagtggaccttggaccgcaaatttgcatgggcccctttgccaaagccctgtgcccactgctggggaacgctggggactccgctcttgtggggcagtggggctgggtgggagcaaccccccatccgggtggctgtggccgaggcccttatgagagggtggtaggtgtgtctccacagtgggggaccagatctctctctggccccaaagactgcttcaagcctctggaggagcactttgccccaggctggggcgtgactgcttctggttgagggttgctgcctgtgcaggtggccctcttgtcggtcttgtctgctgcatgggggtgtggcctcctgtggatggcccctgtcctgggtggtactgctgcaggacctgggtttccgggggtgtccgggagtcggatgggcctcactctcctggcctccactgggtccaggagtggcgatctgtgagccaatggccgtggctgggggcagcctggggtgttgagaggccctgggcagccaccttgcctctctgagtttgtcctcatgtgtctctggggctggaactcggtgtccgacctggtgatgggtcaggtgtgatcaggtgtgtggggctcggtctgcatgtgcagggctgtttgaaggcctgtggggccatctgatgccccccttttcttcagccttggagaggatggcttctcaggccgcctcgcagcagatttgtagtctggttgctgtcgttcctgaaatagcctctgaagctctgtccgggaagggaaccttgagtgtggaggagataagcctgctgactgggtgagccggccggggcgggggtggcccctcttcccttcctcccctgcagcttccatggcctggggctgtgagaggcccgggaaggcactgtctttgcgcctgcacatgtgtgtgtctggagtgtaggatggcactggtgccgggcctggatttactcagcccagatcacggctgcttttgtttacgtggcccctgctctcacccacaactccaggtttctggctctcgggaatttgaggcctgtggctgctgtggaccctgggaaagagcctgtgcttcctgagccagtgcggggcctggcatggagtaggtaccccgggggtggacagataggcagaggaagggatgggcaggtggatggggggctgaattgtggtcagttatgggtggcgggtagatgggtggacagctggatagatgaagtactgggtgggtggagagagaaaggggtgggtggacggagggatgggcagggagagaaatggatggggcatgctgcttccagcacccactgggtgcagctgtctgctgtctgctgtcctgggggaaggtctggagagggcctctcggtgagtgtggactcagccagcctagtcccaatacagctgggatgcattgctgctccttccgccatcccagcagctgtccagagatgagacccagccccactgtgtctttctgggattcacaagaatccttccctgggctgagggggcgttgctgtgggtgtatctcatggagagccccaaggagccagggaggagccttctggtggtttgggttctggattggtgggtgctgggtgggtcttcatggctgttcttggggctgccaggcctgcaaggtagacaggcctctggacttgagtgtggctgtggacgagggcagcgtcgccatcagaggcgatgtctagggccaccccctctgacttgcctcctcctccttctgacttgcctcctctctctgacgggcctgctcctgagcttgacacctgcctgggggctcccggcgaaggccgctggtttctagaatgcaccatctcttcctggcatgacgggaaccacctgtgacattgccaccacctcgctgtaatctgggcagcagctgtcatgatcccaccatgtgccccccgtgaggcccccacctgttactgagtggcagggacgtgctcccacacccccatgcgccatcctgcaggtgctttctgctgacttctgtgtgccctggggcctgctctcttggtaggggttgaccctgcctgtgacttagacagcttggagggccaggactgaggggagggggcggtggagtgaaggggagggtgggcgctgctggcaagaaccacaggcaaagagggtgccgggggcagggaaggcctggaggtttgaggagcagaaagtagacccttgaccctccctgggctggtgagtcggggcccagcccagagtgacagggaccaaacctgggtccatgtgccgtgcccagcctggggttcaggtttcttccccgtgagctgagcagacagggagggtcttgggggaaggctgtgggcccttgggtggaagagtcttgggtgaggcccctgaactggtaagcggggcagcggcggcagggggcccagggaagtggggccagtcgggggtcctcaggggtccttcagggatatacctgctgtcagggtgtggggagtgggaagtgggggacggggtggattccaggattccgggttgtgcttggtcagagtggggaactggacgctccgtccctggctcagcctctcccggctgtgaccttgggggaccattgactttactgtgtgcctggagagcctaatccctacctgccagtgggtgacacagaaggcaggaatgcagaaggcctttcagaagttctcactggcctgcaaggtagaggctgttttctgctgaggatacatttgccccctctatcccccagatcggcggctgctcaaggagcctggtacagctgcacggaggcgcagcacccacaggacaagtggtggaatgttctggttgtccttggtgcaggtggcgggcggggctggggggctctgtagccttcctggcttcggtcccctggacaggctccacctccctcttatcgtggcccctttggcaggctgcctgccacctcaaagtcacgctgccctgggcaccctgcctcttccggggactggggctggggctggggcagctgtgtttatgggtgtactccctgtgctgggcactgcgctgagctcaacacacaggggctcggggaggtctgtgggtgcccaggccgagatgtgaaccctgagtttgtgcaactcgagtttcagagtggcggcctctgctcctcacaagacattgccctgcgagggggtcagccctgaagccggatggcccggcccccgctaccacgtggaggctccctgtaggtgcttgtgtagatgcccccgtgcggggacttgtttggctgatggatcagggggaaggttctccccacggtgtgaggcagcaccgagggctccgtgcccagcaggctcactgtcggcagttgggtctggtttgataaccgtggaccggggtgacaggccctgactctgcagagcaggactgtggaaaatggacactgatgctgcccggtggatccaggcagggccgggatgtttgcaggacccacgggacaattagaacgactgggcctgactggcacagggatgtggactacggtgcttgccatcagcagatacaagctgtacgcagtgggccgcaggcgctccctgggccggaacacatggacgtccaggtgtggaatggcccggacagcagataacaagccttcgtcgtggtcacccctgggtgtgggctgtgggttttaatcttttcatttttgctcatctgaattttctaattaaaaatatattgctttttaaaaataataaaagatcatttaaattaaaatatataagtgaggagaggctggtaagaggattctggagtccctggagtgtcttctggcatcgcatggatgagaactctgaatgaattgagtgtgatttgacctaggagagtgccggggtgggggcaggtgcactgtggtcctgggtccacatggtgctagggtcccatgggctcctggcccctggctgctgcccccacattgggccctgcaccaggcatgagtcccatgtcctgtccttggggaggcctgggggacaggagttgggggggtgggcagtgcctctgtgtggcagattccagcttctctcaggggccaggattacatggtccgtgttggactctgggatgctggtgggaagaacagtctgggcgaggaggaaagggtggctctgctgacccctcctaggtgggctggggctgaggcggatcccactgtggggagctgcccagagatggaaggagctggagtccacagggcgcttctcttctcttttcctgtgtgttaaggtagttcaaagtcctcctgcccgaggaagtaagacagcaatctctggggtcctgggcaccaactctgggcactgatgggctggtccagtgcagggagctgccccggccgcccccgtgggtgcaggccatgggctcttgtttcctttcccccatctgtaaaatgggtaacggccgctccttcaggggctgttagccacatgcttagaccgcaccgagaaaatgcagtccctccagagctcctaaccttccatgggccacaggccccttcccagaagtttttttattttttatttttttttgaagcagggtctcactctgtcgcctaggttagagtgcagtggcacagtcatcactcactgcagtgcgacctcctgggctcaagctggcaccgtgaccccttctccaaggcctgccaggctggcctccagtccaggtgtgaggccctgaggccctggctgcagctggaagctcttgggcagtgcactgtccccacagcggactgcctcctgcagccaggtggccttaggtgatcctccaaggtccagccagccaggatctgagtcaggaggaaccacggcccccaccagggctgagactcctctgagctcgtcacttgtcttggttgggtagaggcctgagagggtggacacttgcccagggtcacacagcttgtgcgtagcagagctccctgtccggcccctgccccgtgctggcccctctcacaccttgctcacgctaggtgccttgtaccagtgcctgcttgggggtggaattggagaggggaggggtgggcgccgagctctgcctcccaccagcatgcttcccagagcttcctgggagaaggtttacggaggagtggccttgtctggtgtccctctgggtagagcctgtgttccgggcaggctgggaacaatgaatggtacagatccacggctccccttgggccttggtgggctccagccatgcctcctggaaggccatttggagcctggctggcaggcaggagctgtgtgctgccaggcgggtctagatgtggttggttcctggctgcacctgccgggctcatgacctgccctgtcctttccttggggagcttggtgacggctcaggtcgactcccaggggcccgcccttcagggcctgcatgagtgttctcgggctggctatgggggcattgcttcttcctgtcctagccgggacctgcccatccacccagggggctcagggacgtttttgagttttcctgaggctttgcctagggagtgtcgctgaggaagctggaacagtgaccttcgttgttgggggaggagatgcaggcaggctgtggcccagctgccccattttgtagctggggaaactgaggcccagagtggagaagcgatctccaaaggggaggtgacacatggctgagccccgcctgatgggtgcttgctggggggagaagtcctggctgggacttcccctccccaggctggggtttgtcccctactttgcaggaggaggggggctcccagaagagagtgagttttgagggaacacagtgctgggggtcccctcctgggcctggggctgtggttcttagaggggcaaggggctggcccctgttgctggctgtggcagccacagccttctgacccttgctggcctgtcgtggagtggggttcaagatgctatcactgacatctgcccaggctcgggggcttctgtgtggtgccagccttgcccgggggcacagccatcagcaggccagaagtcctcaggagagcttgctgccaggctgctgcctggggccaggcttcagatatgctggccagccttgtccagggggcctcctgccaggtgggcagagggagagggccttcctgtcctcatgagaacagggctgagctccatgttccttagcctcccttggcctcagtcatcctatctggaaacagggatcataatagttttagtttatagagagcgagggcctggcccctgcgctcttcctctgtggtctcctctgcccgctcccagaacacctggcctcctgctctgagggccagccctgggttgcagcagtgagcatgacctggccacagtctaggggctttggggtgggtttgtgggcagctgggctgcagggggctgtgggagcctgagggagtgccttccaggggaagcccgacagatgggggcactccaggcaggggcaggaggtgacctggaggtcggaggagcaagctgtggctggagagccgggcagggttggtcagcaggtccgagggcctgggcctccctggggtgagggccagggtgcctctgcaggggtggaagtgggctgtgagggggtctgggtttatctccccattgcacagggctccatggggtgggctgagccatgagcgcccttcgtggcaccttggtgtccggcagggaggcaggggcccaggaggagggcaggactggcttcaacggtgtcggcctctacccttttggtcctcacggaggaggctgctccctcttccctggagcagccagggatggtgtggggccctggtcccctggcttgatataggcttctgcagaggatatggtgtggccgggggctcagctgagaagccaccaggagacagatacagcctcaggaagtggttttgtatctctgctgagaaccacaatccgagtcacatgggaccattgagatcacgtcagggtgcaggctggggaaggctgggagctggggtttggcaaaggcgttggggtgctcttgtgctggacaggctgctgcccaccgggcctggcccaggtgaggtgagagacacctgccccccacgtcaatgcctgggcacacgggcccagtgcacacagccagcaggcgtgcgtcttgcaatgggggctgtggggacccctttgctcccctgatcccttccctgcagacccaggccaggtggattcaaggtgtggggcagggtaggagctgggcactgctggatggcatgggccacccgcactggggctgctgtgacctccgagtccaggcactgccttccacctggttagggacagggcagggaggctgatgggctggcccagcgtggggacctgcccagtggccctgtgggtgcaggccatgtgcctctgcatttcctttaccccatctgtaaaatagggataacagcagcttcttaaagggctgttagccacgtgcttagactgtgcccggaaaatgcactgtctctcctgggctcccaacctttcacaggccacaggcccattcccagaagtttattttttatttttcgagacagggtctccctctgtcacttaggctaagagtgcagtggtgtgatcttggttcactgcagcctcgacctccctggctcaagagatcctcccgcctcagcctcctgagtagctgggactacagatgcacaccaccacgcctggctaatttttgtattttttgtagagatggggtcttgctatattgcccagtctagtctcaagctcctgagctcaagcgatctgcctgcctcagcctcccaaagtgctgggattacaggcatgcactttttttttctaagtagctttacggaggcgtgcttggcatacggtaaactgccccagtttaaagcagacagttccatgagtcctgacatttggaggccctgtgaagccagcatcagcagagtgggcacacccatcaccctcacagcgtccccctgtccccacgaccaggccactgctgccctaccatcaggcacgatggatgggcttgtgccttgtggaattttatttggatggactctggcagccaacgctggtttcgtctggcttcttttattcagcgtcatgattttgagctgtgtgtctgttgtgtgtgtcggcctgttgtttgggtagagcctactttgccgatccatgcacctgttgatggacatgtgggcggctgtatcccatttgggctctcacaaatgatactgctaggaatagctggagtctctgtgcgagcaaatgcttttgcttctcttgtgcaagcaagtggttgaactgctctgcagcccgctgggaagtggaacggctgtgtcatggggtgggtgagggcttcactttctaggacactgacaaaccgttttctaaagcagcaatccccttttgcagtccagcagctccgtgcgacagctctagttcctctgtctccttgtcaacacttggtgtggtcggtctttaattttagccaatctaacaggtgtgtcggggccctccctggcattcctggtgactcactgtgtggggtcatcttttcagctgcttagttgttgtccacatatcttctttggtaaagtgtctgtcaaattgtctgttaagaaaacgtgggtggtttttcattgaattcaagagtttttttttttttctttattttgagagagaatctcactctccgtctcccaggttgtagtgtggtggcgtgatcttgcttggctcactgcaacctctgcctcccgggttcaagtgattctcctgcctcagcctcccaagtagttgggactacagatgcccgccaccatgactggctaatatttgtattttagtagagacagggtttcaccacgttggccaggctggtctctaactcctgacctcgtgatccacctgcctcggcctcccaaagtgctgggattacaggcatgagctacggctcccggccgagatgttacatgtttctatattctggaccaagtcctctatcagatacctgctctgtgaagccttcccttatcccttgctagtccttcagttcttttaaacaattttttttttctttttttgagacggagtctcgctctgtcacccaggctggagtgcagtggcgcgatctcggctcactgcaagctccgccttccgggttcatgccattctcctgcctcagcctcccgagtagctgggactacaggcgcccgccactgtatccagctgattttttgtatttttatagagacagggtttcaccgtggtctccatctcctgacctcgtgatccgcccgcctcagcctcccaaagtgctgggattacaggcatgagccaccacgcccggcccttttaaacaacttgtttttagagctgcggtctcactctgtcgcccaggttgaagtgcttggtgctatgacggctcactgcagttccaactcctgggctcaagccatcctcccgtctcagcctcctaagtagctgggaccacaggcgcatgtcaccacgcccggctgattgttaaattttttgtagagctggggtctggctatgtcgctgacaatcaaaatgaggacttgaagcatactcctcaaatcatcgaggtttattgagccaacgtgagggcacgcccaggaaaaactccagtcacagaagcatctgtggctgctttttccaaagaggtgcgtaggaggtttcattcatatttatatgttttcttgaaaaggggaggggcatcaagtgagacaaatgattatatacttgcgagactttagttagagcccagtaaatctacattttacagaagacgtatattggaggaaagagggagcatggaagcgtatatcccagggaggcggaagaacatctcgttatctcgtctcgcctttgttctgtgcctgggaaggaagacaagccggcgtcttatgaaaaggctggtttctgttcagccctttgggaagaaaacccaatgacagttatcaagggagggggtgtgatgatacgtatccaaccgcacatccatcatggccctgaactcagcttccagggtttctctggggttccctcggccaagtggggatccactcagttaggtgggggggggggtgcttagaattttatttttatttctcattgcccagactggtctcaaaaccctggtctcgatcaatcctcccacctcagcctcccattctcttaatagtgcccttttagagagcaaacgttttgactttgatgaagtccagtttatcaacttgttcccttatggattgtgttttttggtgctctcagaaatctttccctaaaccaagggcacagattttctgttttcttccagaaattttgtagtgtcaggtttcacactgaggtggatattccttttgagttaatgtctgaccagctgggaggtgtcggtggaggctccctttctgcccgcgggttccagcacatttgctgggatggccctcctccctccacagcagagttctacccgccctcaccaccctgtatcaactcatctcatcgatatctcccaacggctggggaacaagggctgactcggctgcaatcatcctgcagccagactcggggacctaggactctgaacctccaactggtgtggcttcagggtccccaacttttcagaccccacctctgtgttgctctgcaagtggggatcagcagggctgtaccccaaatgctgcttgcttctcccgccctcctccctctccccatctgctcttggctgcacccccaaccctgacccaagtgtccttcacgctcagcaacgccacagcctctgacactccacggcactaaagtgtcaagagacccaggggacctgcgagatccatctcgccccacacaccaccaggtccccaggacttggaggatgctgatggcccagctctgggtcctaagcatggcagtatcacagcctcacaggcacatgtgtatgtgtgtgtgtgcacgtgtgtatgggtgcgtgtgcacctgtgtatatgggtgtgtgcacgtatgcacggatgtgtgtacacatgtgtatgggtgtgtgcatgggtgtgcacatgtgtatgggtgtgcatgtgtgtataggtgtgtgtatgtgtgcatgggcgtgtgtatgtgtgcatgggcgtgtgtgtacttgtgtatgggtgtgtgcatgtgattgggtgtgtgcatgtgtatataggtgtgtgtgcacgtgtatgggtgcgtgtgcacctatgtgtgtataggtgtgtgtgtttatgtatgggtgtgtgtgcacatgtgtataggtgtgtgtatgcgtgcacctatgtgtgtataggcgtgtatgtgtgcgcgtgtgtaggtgtgtgttcatatatatgggtgtgtgtgcacctatgtgtataagtgtgtgtgcacatgtgtataggtgtatgtatggttgtgtgtgtataggtatgtatgtgtgcacatgtgtgtaggtgtgtgtgttcatgtatatatgggtgtgtgtgcacctatgtgtataagtgtatgtgcacatgcgtataggtgtgtgtgttttatgtatgggtgtgtgtgcacctttgtgtgtatatgtgcatgtctatgtgtgcacatgtgtgtaggtgtgtgtgttcatgtatatatgggtgtgtgtgcacccatgtgtataagtgtatgtgcacatgtgtataggtgtgtgttttatgtgtgggtgtgtgtgcacctttgtgtgtatacgtgcatgtctgtgtgtgtttgtgggtgtgtgtgtacctatgtctgtataggtgtgtgtgtttgtgtctgggtgtgtgtgcacctatgggtgtgtgtgtgtatgcatgtgtgcatgtccctcacagggcagagctggaaagaactggagaggctgaggctggtcccttcatctcagggtgaagcacctttacccagagaaggagggtcgtggcctgggctactttgtgggctggagtcctggtctctgtcactgaaaaaagcaaggcagagcgtctgggaggggtgtcatgcggggctttctgagtcactggctgcgtgagatgtgagtaggtctgtgggatagggagctggccagggacttgagctccctgcctgctatgacctcagtcagcccctgcccattgtcaggctccttccctgtctaggggtacccagtagagctgcccagccctgccactccagcttgtttgaggaaaaagtgcaaccatgctgtgggtggaggcagatgtgattctgtcctcagaggcatgggggtgactccatggctctgagccaagttgcagctctggggcccttcttgatactccagggccccccatcaccccagcaccgagatgggcatgagcagaggggctcatggtgatggggtgggcgtggctgggagaagcctgcatatgaaggcctctgtcattggaggagactgtcccatgtccctccagatcatgtccctgagtggggagcgccttctgggcagagtggcacacagggtcccacccatctcaagtccatgggattaactcccctgtgctggaagctgcaggagctgctgcctgtggctgaggagaggccaggacgggccaaggagagcaggcaagagaaggggtggggctggcagggagggggctccattaattctgatgtcatttattgctgttcctatatttgtataataaatggaagaaaatagtggttgggggcttgctggggactcagggagggttggggacctccagggcttccattcgacctgaggcccatggtgcagtgagtcctgcctggagtcccgtccagcaggaggcaggagagctggtgtttggagatgtgaggggctgggccctcccaggtgagcgggttgggaaaggaaagggtctgtgctgggaaatccaaggggcaaggccgtttcccgtcctggtccgtcgttgagtcccctgccgtgggacagcgctcagcatggcacagacgctcagccgtgtcatgtggcttgtagagcgagggtgtgcggccggcatcatcctcagggaactctggagggactgggcctcagttggcctggcctggcgcggggctgccagccaagagccttcctccatcccattgagagccagggcaggtcctggagatggcagcctgcaggttgaagcccccgacagctgggggaggcattgctctgcacaggtagggccatggggcccgctggccagggtggccattgctcagtggcaccagctgggcagacagccgcatgcgctcaccactcgccctccacagatgggagcctgggagagccctgcctcccggaacggacatcctccttcaccaaatccgcaaaataggcctgatgccaggaacggggcactgcagggcccttgggagggaggtaagcgggcagccgggccaacctgctgcttggggaagggctgtggctggccccagcctcctaccgctggcccagtggtctctccacacatcacccagtgtggagtggttttttgtctttctttcgaaacaggctttcctcactgagggctcaccatggggctgtgctggggacactggatgtgtccagggtccgtcaagaagcgttgggggtagtcagggtctcagggaccactctgctgtcctcgagtctcctggtggtgaccagtggtgactcttgtggcgcccgggccacagctactttgttcacctcctaggagggaagagggcgagggtgagcctagggcagatgccagggcagtgaggctcacgtgggtctctttgcctgatgtgccggtgtccaggctgcagtgggcacccgagccctgtgggaagcctcctgggtctgcagctgagcaaaacagcagccgccagatgatgggccctaagtggctgcagatagcaggcaccattaaatgcagaggccatctgaggctgcaggctcagcacaggtggctttggtgcccttagggaggggcagcggtggagcccaggtctctgaaacatttatgacttcatgcgtcagctggaggctctttcaccgcccagacaaaaggcccttgcgtcagagtgttccatgtggggcgggagcttgggctgagagcttgggcccctgctcccagagaggcccagagctggggtggccacacctgctgggaatgctgctggtgggactaggttaaggcgagaaggaggtgtccatggccaggtggattagtgcagattgtgatggtgtggtggtgctcacggtgggggacttgcctatgggaacctcatcacagccccacatcgggcccttttacagatgggaaaactgaggcatggggtgcatagctagtgaggagcagagccagatgggaaccaggcgtcgacttcagagctgacctttgtgcatttgtgcattgtttgtgttgtgattaaatacacgtaacgtaaaattgacctttttaacccatgtttcatggtcttcggtttactcgcagtgctaggcgtccgacacgtctttctaattcctgaacatttccatcatccgcaagaggaaattagcagtcacccctttcccccatgcccccagctcctgacaaccacaagcccactttctgcccctggatttagctattctggatgtttcatgtgcctgaaatcatggcaaacgtggccctgtgtgtctggtttccttcaccgagcgtcctgtcttcactgtccgccgtgttataacacgcaagggaattcccttcctttctgagctgagtagtggtctgtggtgtggatggactacgtgcagctgtctctgcctttggctgttgtggctagaggctccttcctgaaagcctgatacttagaatggatttaaaaacaaattcaaatgtgtgttgcttatgaaaatcacaaaattaagtatgatgccatcaaaatgaaaaaatggctaaagattttcaagcacacacacctaaagatagcagacattccattcaaccttcatctcaaagaattagggcaaggagggcgattctaaatggctggagacatagtcagctgtgaagctgtaactttcatgaagacagtgacgtggtttgtcactgcccggatctcatcttgaattccctgtgttgtgggagggacctggtggggggtaattgaatcacggggacgagtctttcctgtgctgttctcgtaatagtgaatacgtctcataagatctgatggttttaaaaagaggcattccgctacacaagctctctcatgttttgcctgccaccatccacgtaagatgggacttggtcctccttgccttccgccatgattgtgaggcttccccagccacatggaactgtaagtccaattaaacctctttcttttgtacatttgctcagtcttgggtatgtctttatcagcagtgtgaaaacggactaatactgacaataaattaaaaactatttaaaatgcaaaggaaaatataaatttaaatcacctcttcgagtctctggtagatcaagaaaacaaaaataatctgaattattgatatagttaaattaatagatatatcaaactttgtaacttaaaagcaaaagatgtaccttttacagtgttcctggaacactcacaaacattgatcatatactagactgcaaaaacttcaagacattctaaaattaagaacctatgctggatatctctgatttcaacgtatgtttaaaatatatgttattaattacaagtttaattaatgaaagtctaaagaagaaaagtctacttagaagtaaaaacatcagcaatattactgtgtaatagatctgaacattaaaggggcatatatgcatatctgtacaccgaggcaaatttatagctacaggcattttccttttttgaaaaaagtaaatatgtaagttaaaaagttcacagtaagaaaagtgaatgtaaataagagataagaatagaaaataataggaaacaggaaaacagacttgagggttctttttgggaggtgattcttggttctttgaggaaaacaatatatatcttataatttcaatcatggaaaaaccccaagtatatatctaaatttagacatgagaaggctctttggcaatcgatttagaaaagttttgtttgtgtttttaagacagagtctcactcaatcacccaggctggagtgcagtggtgcaatcttggcttacagcaacgtctacctcccgggttcaagcgctcctcccccctcagcctcccaagtagctgggtttacgggcatgtgccaccacccctggctaactttttgtatttttagtagagacaaaggtttcattatgttggccaggctggtattgaactcctgagcacaagtgatccacccacctcggcctcccaaagtgctgggatcacaggcatgagccactgcacccagcccagtttttaatgtgacagtactttgtaaaattgtactccagtgaatttgaaaaatgttgtgagatggcttattctttgggaaaaaatgttaagtcaaaattaggaagaagtggagacaatctcagtatgtgtgagatgaatctgaaccctcatcagaacgtccacagctgacggtgaacacattggcaggtgagatatgtggagacatggcacgtggtgaaaatgcttggcaaagtgttcaaggcaggatggagataccgtatgggcattcactggacagtgttttcatcccgtatgtttgaacaatttttaatgtgggatcaaaggtaggaaatgctctttacaaagtcatcaaaaagttttttctggaaaagcctccagcccacggtgacctaggttcttcccaccattgaattaggatgccgtctgctactgagagagccagtcatgttagtggctcaatgggcagggtgcccaggttagctgtgaacaaagtgatctctctgctgcctcactagcagagagaaaagaaaactacagaccagtgatatgtacacagagagcaatgaaaatcctcattatgatggcagactaaacccatagtgtgttaaaaatgaccacacatgtaggctaggcacagtagttcatgcctgtaatcccaccactttgggaggctaaggtgggaggattgcctgagctcaggagaccagcctgggtgacatagtgagaccccatctctttttattaaaaaaaaaaaaaagaccatacatacacacatgcacacacaacagtggtaatggattataattcatgaaaaaagaatctatgcatccacagggacacacccatgtatataaacaaataagtggaagaaaggaatccagttctcacgttagaatcaacagggctggaaggccatcaaggaaaccccgtggcaggggcaggggttcaaagagctggtggttgtagtctcagtgtctcccaccaccacttactagttacaaaggaaaaagaatcactttctagaggcaaagctggcgacaccacccgagccaagtgatccaagttaacatcaccaggaatgggacaggccagcttcaccaccctccggatggacagcctcggtagcagaactcctgccaaagacacagctgtccagggtcgaatcatccggagacacagggcaaacccacatggagggagacacacacagtggcctgaatactttgaaaatgccagggccaaaaaacgtagaaggctaaataaagtaccgttcagggtgaaggggaaggaagaaatgtgatgcctaagtgggagtctatgattccactatgttatgtattagtccattttcaaattactgataaagacatacctgagactggataatttataaagggaagaggtttaattgactcacagttccacatggctggggaggcctcacaatcacagcagaagatgaaggaagaacaaaggaacatcttacatgatgacaggcaaagagataatgaaaactgagcacaaagggtttccccttataaaaccatcagatctcgtgagacttattcattaccatgagaacagcatggaggaaaccacccccatgattcaattatctcccacgaggtccctcccatgacacgtgggaattatgggagctacaattcacgatgagatttgggtggggacacagccaaaccatatcattccaccccggcccctccctaatctcatgtcctcacatttcaaaaccaatcatgccttcccaacggtgccccaaagtcttaactcatttcagcattaactcaaaaatctgcagtccaaagtctcatctgagaccaggcaagtcccttccacctatgagcctgtaaaatcaaaagcaagttagttaattcctagacacaattagggtacaggccttggataaatacacccatttgaaatgggagtaattggccaaaacgaaggggctaaaggccccatgcaagttcgaaatccagtggggcagttaaatcttaatgctccaaaatgatctccattgactccatgtctcacatctaggtcatgctgatgcaagaggtgggttcccatagtcttgagcagctctgcccctctggctttgcagggtacagcctccctcctggctgctttcacaggctggcattgagtgtctgcagcttttccaggcacatggtgcaagctgttgatggatctatcattctgggatctggaggacagtggccctcttctcacagctccactaggcagtgccccagtggggactttgcatgggggctccaaccccacttttcccttcctcactgccctagcagaggttctccatgaggaccccacccctgcagcaaacttctgcctggacatccaggcatttccatacatctctgaaatctaggcagagctttccatacctcaattcttgacttctgtgcacccacaggctcaacaccacatggaagctaccaagagttggggcttgcaccctctgaagccacagcccaagctgtaccttgacaccttttagctatggctagagcggctgggacacagggcaccaagtccctaggctgcacacagcatggaggccctgggcccagtccaggaaaccatttttgcctcctaggcctctgggcctgggatgggaggggctgctcctaaggtctctgacatgccctggagacattttccccattgtcttagtgattaacatttggcttcttgttacttatgcaaatttctgcaggctgcttgactttctcctcagaaaatgggtttttattttctatcacattttcagactgcaaattttctgaacttttatctctgtttccctttcaaaactgaatgcttttaacaacacccaagtcacctcttgaaagctttgcagcttagaaatttcttccaccaaataccctaaatcatctccctcaagttcaaagttccacaaatctctagggcagtggtaaaatactgccagtctctttgctaaaacatagcaagagtcatctttaatccacttcccaaaaagtttctcatctccatctgagaccacctcagcctggatttcattgtccatatcattatcagaattttggtcaagcccttcaacaagtttctaggaagttccagactctcccacattttcttgtcatcttctgagccctccaaactgtccaacctctgcctcttacccagttccaaagttgcttccacatttttgggtatctttacagccgcaccccactcccagtaccaatttactgtattagtccattttcatgctgctgataaagacatacctgagactgggtaatttataaagggaagaggtttaattgactcacagttccacatggctggggaggtctcacaatcatggcggaagatgaagaaagagcaaaggcacatcttacgtggcagctggcaaagagagaatgaaaacagagtgcaaggggttcccccttataaaaccatcagatctcatgagacttaattcactaccacgagaacaatatgggagaaactgcccccatggttcaattatctcccactgggtccctcccacaacacatgggaattatgggagctacagttcaagatgagatttgggtggggacacagccaaaccatatcagagttgaatcctgtctgggaagagatggctgcaatagccagtgtctgggcagctgatgatgtgagagtgtgaggtagagaactgtagtgtgcaatagagacctgtagtgtgcatgtcagtgttgtttcccgattttgacaacagtaccacatggttacagaagagaacacccttattcctaagaaatccatgaggaggcgtttagcagaaaacaggcatggtgtctccaagggctcagaaagattcaaccaaaagagggaagtctggagagggacaggatggagcaggacgggggcagtgtagaaaccgcaggcaagtctaagcagagcacgtttgggagttccttctgctattcttgcaacttctctataagtttgaaatgaaatcatataaatcgaaagttagaagagaattaccacatcatgttggatttcactcatagccacgagaacgggtggtggtctcttctgcagtgaactgatgcgatgtgtgatgtcactagttctcatccaaagcagatgacaattccagttactcctcaccagacataagaaaatgcttttagtagatcagtttttctgattgtaaagttcagaaatgttaatcagagaacgtgcagaaatttttaaagaagaaaagtaaaatgactcatcgtaccaaaagccagagatgccagcttttagtttcctgctagtctttttctcggcgtgtgtgtgtgcgcgcgtgcatgcacatgtttctacttggtctttgtgtgtgtgttaagggcgtgtacacacacagtgcagtcaggagtgagttgcacgtctacagctaggctgcttccccgaggctgtgtggccatcagccaggcgtccccaacccccaggccatgaagcactaccagtccatggcctgttaggaaccaggctgcacagcaggaggtgagtggcaggtgagcaagtgaagcttcatctgtatttacagtcactccccatcactcgcattaccgcgtgagctctgcctcctatcagatcagtggcggcattagattctcacaggggtgtgtaccctgttgcaaactatgcatgtgagggatctaggttgcctcctctttataagaatctaatgcctgatgatctgtcactgtctcccatcacccccagatgggactgtctagttgcaggaaaacaagctcagggctctcactgattctacattatggtgagttgtataattatttaattctatattacaatgtaataatagtagaaataaagtgcccaatgcaagtaatgtgcttgaatcatcccagaaccacccacaccactggtctgtggaaaaactgttttccatgaaaccagtcactggtcccaaaaaggttggggaccacggccatcggctgtttgctttatgaatttgtgcctcagtttcttcatctctgaaacgggaacgatgggagccctcacctcgtatggtggtttgaggattgaatgaactcattgtccagcacccttagcttcttgccagctcaggaagtgctgagcagggtaacccctatcactgcgtgtgtgtgtgtgtatatgtgtgtgtgtgcatacttgcctatgtgtgtctgtgcaaatacttggtaaaattgagagggtactagacaactcatttgtatcttcttaccttttgacacatggcagacatgtctcacatctgttcttcctccaaatgtgacctttcaatggctgcctggcatttcccctgtgttattgaacgtaatcaactctctattgacggctgggttatttcctaattgactgctgtaaatagcattgtgatgcaaatccttgtacactcatttttgcctggaactcaagattatttccttgggtcacatttgcaggagaagactgacaggatcaaagggttcctgcatttttatggctctgacacctttggccaaatcaccttccgggagtgttttcctaatttagcttcctactgtgctgctggacatcactgactccccccgccaacccccaccccacactgcaccacaaagctgggtattatcataaaaacactgccattatgatgaagcaaaaatagaatatccttcctcctcttagtgaggggagtatgtttatgtttgttgagctctttgtattttagccacccattcactggcccacctgcccctggtgcacctgcagcagcaagactgtcatctaggttgttggggaaaccaggagtgagtggagcacgagggtcaccctccaggaagtgacctgcaagagaatggagagagtcatggaccggcatggcgtggtaatgcatggtgcgtgtctcttagcagtaagaccttgagaaggagccaggcagggaggaatgggagggtgaaggagtgccttttgtggaggggagtcggacacagatgggatttcagcagagacctgatggaattgagggagtgggtggtgtgtgcttctgcaggaagagcacccagacagagggcatggcacatgcaaaggtcctgtgttgggaacgtgcttggtgcatgtgaagaactgtgcagggaaggtgctggagataggacgggagggccacgagggttaagatcctgagagcaatgcggggggtgcgagtgatgagggacaacatcagtcctctcttggcttctgtactttaataaaatcattttgttttgaagcaattttagacctacagaaaagttccacgacagtactgagagttcctgtggactcctagtattaacatcttaataacggggtgtattgaccaaaaccgacacctgatacattaccgtgaactcaactgcagatctgattcaaatcccgcgtttttctagcatccggtttctgttctgtgatccccacgttgctttcagctgccaggtctcctttcgtgtcctgcagcctgtgccagctcctcagtctctctttgtctttcgtgaccttgatgttttagataagtactgggcggctgttttgtagaacgtccctcggtttggattctctgatatgctctcatgattagatcaagattgtgcatttttggcaagaacaccgcgggagtgttgttgggtcccgaggagtccctgtggcagggctgtgtgaggtcagcatgtcttagggcgggttcatttgaccttgaccactcaggtaggagtgtgtcagctgggcttctcagctgtaaattaaccattttccgcttcataattagtaaacaccttgaggaagctacattgagacattgcagctgccttttttctcctgagattttgccccgctgattttagtgcccatcagctggttttgcttgtgacaggcaaagtctgtggtgcttgccaaatggggatttgtttatttcccactttctttctatgtttgttaatttggattcttctccaggaagagctgtcccctttgttctggttatgtatccagtggcttatgtatatcagcatggtttcatagatacttcttttgtgttatgggctataagccaatgctattattatttattttcctccatttatttatttatttagagacggagttttactcttgcacaggctggagtgcagtggcatgatctcggctcactgaaacctctgcttccggggttcaagtgattctcctgcctcagcctcctgagtagctgggattacaggcacgtaccaccacgcccaactaatattttgtatttttagtggagacggggtttcatcatgttggccaggctggtcttgaactcctaacctcaggtgatccacccgccttggcctcccaaagtgcagggattacaggtgtgagccactgcacccagcctcattatttattttcattgctcaaattgtgctggcttttgccccagaaacaaccttccattcagcttccatgcccctttggtgggccctgtcttttcttggacactgccttcctggcaccccaagatgctctgggctcagcttgtatttccttgcctcagtcttgaaatcacccacttctccaaggagccagggttccttccattggagagtggtctttagaaacccaggcctgggtgcatggtgtgctcatcgccactgtggacctgctgctctgcgcccactcggccgacggagctggggaatatgtgtatggcacccccacgtctacgcttctgtgttcatctgcagatatattcatacatgagtgggctcatactgtctccaactccagttctgccccagtggggccaattctctctctttgttgtaacacctttcttcaatagtgagaaacctggctctctcaccttcacctgctcgtccaaccccagctgcaagggaactggctccatacttgctgatgcgtgcccccatgagaagtgactgaccacccagagcctggcgcctgtgcatggcgtctgtgcacggcgcgtcttgtcttcagcctcactgcgtcccatcagtgcttttccccacggtgactttgagtatttctttacttctgtactcccttcagtgtgattatgtcattcatctgtgacatgtttagatttatctgttaggttggtattccattttgggtgtcccccgattctgattgtttttagttacttatctgggggtctgtgtgaagggaatgtaaagctgctgtgactcctggagtcagaggtgcacaaagagtgtcctcagaggagagccaggcgcccaccctgccagcccttccctccccactccatcccccacccccccaccctggacaaaaccagctcttcagcctttcatgtctctcttgcaggcctctcgcacagatgagaaaatacacgtgtgttttcctgtatcccctctttcttacaaaaagggaagcacactatcaatactcttgtagatctttaattgcggtaagatacactaatgcaaaatttaccattttaactatttttaagcacacagttcagtggcatgaagtacattgattttgttatgcaaccatcaccaccatccatttctagaattttctcatcctcccaaactgaaactccatccccattaaacaccaactcccccattctctcttccccagcccctggcacctaccatttacctttcgtccctatggatttgactaatccaggaacttcataaaagtgggatcattgagtactctatttgtcttttgtgactggcttatttcacttgggcataatgtcctgaaagttcactcatgctgtagcatgtgtcagaatttccttttccttttcaaggctgaataatattccactgtatggatagaccacattttgcttatccattcatcttttgatgaacatttgggttgcctccatgttttagctattgtgaataatgctactatgaatatgggtgtacaaatatcttttcaacgccctgctttcaattcttttgggtatatacccagaagtggaatttctggattatatggtaattatagttttaatttcttgaggaaccactatgccgttttccacagtagctaccacatcctcaccaacacttgtaatttctggggttttttaatagtagccattctagtgggtgtgcagtggtatctcattatagttttgatttacattttcttatgagtagtgatgttgagtatcttttcatgctcttattagccatttgtatatcttctttggagaatatctcctcagctcttttgcccacttcattaaattgagaggtttgtttttgctgttgagttttagaacttctctatatattctggatattaatcccttatcagatataggatttgcaaatattttctctcattctgtggggtgcctttttactccgttgatagtgtctttgtacaaaaatttttaatgttcacgaagtccaagttgtctactttttgttttgttgcctgtgcctttggtctttgtgttagtccatttagcattgctataaaggaatacctgaggctggtaatttataaagaaaagaggtttaattggcttatggttctgcaggctgtacaagaaacatggtgccagcacctgcttctggcgagagcctcaggaagcttccaatcacggcagaaggtgaagcgggagtaggtgtctcatatgatgagacagggagcaagagaaaggaggttccagtctccttttaacaaccagatcttgcatgaactcattacctaatcatggggaatctgcccctatgacccaaacagcacccaccaggccccacctccaacgctggggatcacatttcaacatgagagttggaggggacaaatatctgaactctatcaatgttatatccaagaaatcatagccaaatccaatgtcatgaagcttttgccctatgttttcttctaagatttttatagttttacgttgcacatttagatatttgatccattttgagttaatttttgtatatggtgtgaagtaagggtccagcttccctcttgcatgtggatttccagttttcccagcaccatttgttgaaaagacagtccttttctcattgaatagtcttggaaccctagtcaaaaatcatttaaccatttatgccacggtttatttctgggctgtctcatgttccattggtttatatgtctgtctttttgcctgtgtcacactgtcttgattactgtaagtttatagtaaagttttgaaatcagaaagtgttaggcttccagcttggcttttctttttcaatattgcttttggctattttaagttccttgagattccatatgaattttaggatgggtttttctatttttgcaaaaagtgtcattgggattttgagagggattgcactgaatctataaatcactttgggtagtattgatatctcaacattgtcttctaatccatgaacatgggatatgtttccatttatttgcatctttttaagtttctttcagtaatgttttgtgggttttgctgcagaagtcttttacctccttggttaagttaattcctaagtattctacttgatgctattataaattaaattgttttcttaatttcatttttagattgttcattgttagcatatagaaatgcaactgattttgcatgtttaccttagattctgtaactttgctgacttcatttattacctctaataagtttttggggaatctttaggggtttctacatatgaaattatgtaatctgtgaatagaaatagttttacgtcttttttttccattctggatgccttttatttcttttaatttttttcttgccaaattgctctggctaaaattttcagtccaatgttgaatagaagtggtgaaagtggtcaccctggccttattcctgaccttaaagggaaaaatttcagtctcatcattatgatgttagctgtggattttcacatatggtttttattatgttaaggtagttcccttctattcctagtttgttgaaagtttttaataaggatgttgaattttgtcaaatgctttttgtatcaattgagatcatgtgatcatgtgactgttatttcttcattctgttaatatgctcttttacatggatttatttttgtatgttgaaccatccttgcattccaggactaaatctcacatggtcatgatatgtaatactttaactatgtttctgaactcagtttgctattttgttgagaattttgcatcagttttcataagggatattggtctgtagttttcttgtagtctttgtctggctttagtatcagagtaatgctctcctcatagaatgagttagaaacctttcccctcctctttaattttttgggaaagattgagaaggatgggagtttattctttaaatatttggtaggattcattggggaagccatcaggtccaggcttttctttgttgagagttttttgattactgattcaatctcctcactagttataggtccatgaagattttgtatttctttgtgatttagttttggtaggtttcgtgtttctcagaatttgtccatttcatctaggttatccaatttgttgatacacaattgttcacaatactctcttataatcctttttatttctgtagaattgatagtcatgtccctattttcacttctgatttcagtagtcttctctcttttttacttagtccatctagctaaaggtttgtcaattcttaaaatcttttcagagaagcaactttgatttaattgatttttctctattgtttttctattctctattttgttggtctctgctgtggtatttattatcttctttcttctgctagctttgggtttagttcttttgctagttccttaagtggtaaagttaggttatttactggagatctttcttgtttattaatgtaacaatttatagggagggagtggagcaagatggccaaatagaagcctccaattgtcctccccaacaggaacaccaaatttgagaactatctacacaaaaaagcaccttcataagaaccaaaattcagataagcaatcacagtatctgcttttaactttatattgctggaagaggcactgaagagggcaagagagacagtactgaatcactgacagcactgtgcctcccatcccccagctatgtggcatggagagagaatctgagagcttgggggagggaaagtgcagtgctttgggactgtccatcgagctcagtgattccctgttgccacagaaagcagaaccaggctaaattcagcccacacccagcacagagggagcatttaaaccagccctagccagaggggaatcacatatctcaggggtcagaaactgagttccagaaaaccttgccaccacgggctaaagtgctctggggttctaaataaacttgtaaggcagtctaggccacaataactgcaattcctaggcaagtcctattgctgagatgggctcagagccagtggatgtggggggcacacaacctagtgagacaccagccagggtggctaaccccaggcagcacagctcacagaaacaaaagtgactcttttcctctgcttaaagagaggagatggagcagtaaagagaacattgtcttgcatcttggataccagctcaaccacagtaggagaggacactgggcagagtcaatgggcacacatttcaggccctggctcttggacatttccagacacaccctgggccagaagggaatccactgccttggagggaaggacctagtcttgtcagaattcatcatcagctgactaaagagcccttggaccctgaacaaccagcagtgccaggtagtatcctgtgggccttgaatgagattctgaaatatactggcttcaggtaccagcttgaccacagtggggtagagcaccaaatgggctcttggggtccctgattccaggccttggctcttggacagcatttctggacctgctctaggccagaagggagcccactgacctgaaaggtgagtccacagcctagaagccttcaccacaagctgactgaagagccctcaggccttcagtggacaaccatggtagcctgacagtactgcctatgggcctgtagtggtggtggccacagggagaggctcctttgcctatggaaaggagaaggaattctgggtatgactttgtcttgtgctactactgagtgccagcttagcctctgtagtataccacaccaggtaggtttctaaggtctttgactacagacccttgctcctggatggcatctctggacccaccttggacttgggggaactcaccaccctaaagtgaaggacaaaagcctggctggctttaccatttgctaattgtagagccctggggctttgagtgaacataggtggtagccaggtagtgcttacagcgggccttgggtgaaacccagtgatgtgttggcttcaggtctgaccagcacagtcccagtggtggtggccacaggtaagcttgtgtcactcctccccaagcttcaggtggcttagcatagagagagagtccatttctttgggagaaagtaagagaagaaaacaagagtctctgcctcgtaatgcagagaattcttctggatcttatctaagaccaccaaggcagtattttttttaatatttattttttgaaacagagtttcactcttgttgccaaggctagagcgcaatggtgtgatctcagctcaccgcaacctctgtctcccgggtttaagcgattctcctgcctcagtctcctgagtagctaggattataggcatgtgccatcatgcctggctaatttttgtttgtttgtttgtttgtttgttttagtagagacagggtttctccatgttggtcaggctggtcttgaactcccgacctcaggtgatctgcccgcctcggcctcccaaagtgctgggattacaggcgtgagccactgcgcctggccccaaggcagtatttttatgagtctgcaagaaccacagtgttactgggcttgggatgctgcctaatgcagatacggcttagatcacaacacccaagtccctttgaatacctggaaagctttaccaagaaagatgggtacaaacaagcccagactgcaaaggctacaataaatacctaactctttaatgcctagacaccaatgaacaagaccatctaggaaaacatgacctgaccaaacaaactaaataaagcatcagggaccaatcctgaagaaaagagatatgtgacctttcagagagagaatttaaaatagctgttatgagaaaactcaaattcaagataacacagcgaaggaattcagaattctatcagataaatttaataaagagattaaaataagaatcaagcagaaattctggagttgaaaaatgcagctgacatattgaagaatgtatcagaatctcttgataacagcattgatcaagaacaaaaaagaattagtaagcttgaagacaggatatttgtaaatacacagaggagacagaataagaacgaatgaagcatgatctagaaaatagcctcaaaagggcaaatctaagatttattgaccttaaagaggaggtagagaaagagataggggtagaaagcttattcaaagggatactaacatagaacttcccaaacctagagaaagataccaatattcaaatacaagaagattctagaataccaagcagatttaacccaaagaagactacctcaaggtatttaatagtcaaagttccaaaggtcaaggataaagaaaggatcctaaaagcagcaagaaaaaaaagacttataattgaactccattatatctggcagcagagttttcaatggaaactttatgggccagaagagagtggcaggacatatttaaggtgctgaaggaaaaaaaagaaaaaaacttttgctctagaatagtatatctggtgaaaatatccttccaacatgaaggagaaatacagaccttcccagacaaacaaaagctgaggatgtcatcaacaccagagctgtcttacaagaaatgctaaagggaattcttcaatctgaaagaaaagggtgttaataagcaacaagaaatgatgtgaaggtacaaaactcactggtaatacatacacagaaatacaaatagtattataacactgtaattatggtgtgtaaactactcatatattaagtagaaggatgaaaagaagaactgataaataatgactacaacaacttttgcggtacaataggcagtacaataagatatagagacaaaaaaacttaaaaagcggagagacaaaagttgaagtgtagagattttttgttttactttaagttctggaatacgtgtgctgaacgtgcaggtttgttacatacgtatacagtgccatggtggtttgctgcacctatcaacccatcatctaggttttaagccctacatgcattaggtatttgtcctaatgctctccctccccttggcccccatctccccacagatcccggtgtgtgatgttcccctccctgtgtccgtgtattctcattgttcaacttccacttatgagtgagaacatatggtgtttggttttctgttcctgtgttagtttgccgagaatggtttccagcttcatccccacaaaagacatgaactcattctttttttatggctgcatattattccatggtgtatatgtgccacattttctttatccagcctatcattgatgggcatttgggttggttccaagtctttgctattgtaaatagtggtgcagtaaacatatgtgtgcatgtgtctttatagtagaatgatttataatcctttgggtatatacccagtaatgggattgctgggtcaaatggtatttctagttctagaatctagttctagaatcaccacgctgtcttccacaatggttgaactaatttacactcccaccaacagtgtaaaagcgttcctatttctccacatcctctccagcatctgttgtttcctgattttttagtgatcgccattctaactggcatgagatggtatctccttgtggttttgatttgcatttctctgatgaccagtaatgattagcttttttttccatatgtttcttggccacataaatgtcttcttttgagaagtatctgttcgtatcctttacccactttttgatggggttgtttttttcttgtaaatttaagttccttgtagattttggatattagaccttgtcagatggatagattgcaaatattttctcccattctgtaggttgcctattcactctgatgctagcttcttttactgtgcagaagctctttagtttaattagatcccatttgtcaattttggcttttgttgcaattgctcttggtgttttagtcatgaagtccttgcccatgcctatgtcctgaatggtattgcctgggtattcttctagggtttccgtggttttaggttttacatttaagtctttaatcatcttgagttaatttttatataagttgtaaggaaggggtccagtttctgttttctgcatatgactagccagttttcccagcaccatttattaaatagagaatcctttccgcattgcttttttgtcaggttggtcaaagatcagatgattttaggtgagtggtgttatttctgaggtctctgttctgttccattggtttatatatctgtcttcataccagtaccatgctgttttcgttactatagccttgtagtatagtttgaagtcaggtagtgtgatgcctccagctttgttctttttacttaggattgtcttggctatatgggctcttttttggttccatatgaaatttaaagtagttttttctaattctgtgaagaaagtcaatgatagcttgatgggaatagcattgaatctataaattactttgggcagtatggccattttcatgatactgattattcctatccatgagcatggaatttttttccatttgtttgtgtcctttcctttccttcagcagtggtttgttgttctccttgaagaggtccttcacatcccttgtaagttgtattcctaggtattttcttctctttgtagcaattatgaatggggattcactcatgatttggctctctgcttgtctatttttggtgtataggaatgcttgtgaattttgcacattgattttgtatcccaagactttgctgaagttggctatcagcttaaggagtttttgggctgagacaatggggttttctaaatatacaatcatgtcatctgcaaacagagaaaatttgacttcctcttttcctatttgaatactctttattttttcgcttgccttattgtcctggccagaacttccaatactatgttgaatgggagtggtgagagagggcatccttgtcttgtgctggttttcaaagtgaatgcttccagcttttgcccgttcagtatgatattgcctgtgggtttgtcataaatagctcttgttattttgagatatgttccatcaattcctagtttattgagagtttttggcatgaagggatgttgaattttatcgaaggctttttctgcatctattgagataatcatgtggtttttgtcattggttctgtttatgtgatgtttagtgatttacatatgttgaatcagccttgcatcccagggatgaagcccacttgatcaccatggataagctttttgatgtgctgctggattcagtttgccagtattttattgaagatttttgcatcggtgctcatcagggatattggcctgaagttttctttttttgtgtgtcgctgccaaattttggtatcaggatgatgctggcctcataaaatgagttagggaggggtccctctttttctactgtttggaatagtttcagaaggaatggtaccagctcctctttgtgcctctggtagaatttgggtgtgaatccgtctggtcctgggctttttttggttggcaggctattaattactgcctcaatttcagaacttgttgttggtctattcagggattcgactttttcctggtttagtcttggagggtgtatgtgtccaggaatttatccattttttctagattttctagtttatttgcatggaggtgtttttagtattctctgatggtagtttgtatttctgtgggatcagtggtgatatcccctttatcattttttattgcatctatttgattcttctctcttttcttctttgttagtctggctggcagtctattttgttaatcttttcaaaaaaccagctcctggattcattgatttttttggaagggtttttcatgtctctatctccttcagttctgctctgatcttagttatttcttgtcttctgctagcttttgaatttgtttgctcttgcttctctagttcttttaattgtgatgtttgggtgtcgatttcagatctctctagctttctgatatgggcatttagtgctataaatttgcctctaaacactgctttagctgtgtcccagaaattctggtacgttgtctctttgttttcatttgtttcaaagaatttctttatttctgccttgattttgttatttactcagtagtcattcagtagcaggttgttcaatttccatgtatctgtgtggtttttagtgagtttcttcatcctgagttctaatttgatcgtactgtgttctgagagactgtttgttatgatttccattctttggcatttgctgaggagtgttttacttccagttatgtggtcaattttagaataagtgctatgtgatgctgagaacaatgtacattctcttgatttggggtggaaagttctgtagatgtctattaggtccgcttggtccagagctgagttcaagtcctgaatatccttgttaattttctgtctcattgatctgtctaatattgacagtggagtgttaaagtctcgcactgttattgagtaggaatataagtctctttgtaggtctctaagaacttgttttatgaatctaggtgctcctgtattgggtgcatttatttaggatagttagctcttcttgttgcattgatccctttaccattatgtaatgctcttctttgtctttttttatctttcttagtttgaagtctgttttatcaaaggctaggatcttggccgggtgcagtggctcatgcctgtaatcccagcactttgggaggctgaggtggttggatcacgagatcaggagatcgagaccatcctggctaacacgatgaaaccccatctctactaaaaatacaaaaaaattagtcaggcatggtggcgggcacctgtagtcccagctactcggcaggctgaggcaggagaatggcgtgaacccgggaggtggagcttgcagcgagccaagatagcgccactgcagtctggcctgggcaaaagagtgagactccatctcaggaaaaataaaaaataaaaaataaaattaaaaaaaatggctaggatcacaacccctgcttttttttttttttttttttttttttgtgctttccattgcttggtaaatattcctccatccctttattttgagcatatgtgtgtctttgcacatgagatggatctcctgaataaagcacactgatgggccttaactctttatccagtttgccagtctgtgtcttttaattggggcatttagcccatttacatttaacgttaacattgttatgtgtgaatttggtcctgtcgtcatgatgctagctggttattctgcacattagttgatgcagtttcttcatagtgtcattggtcattattttggtgtggttttgcagtggctgatactgctttttcctttccatgtttagtgcttccttcaggagctcttgtaaggcaagcctggtggtgtcaaaatccctcagcatttgcttgtttggaaaggattttatttatcctttactcatgaagcttagtttggctggatatgaaattctgcttgaaaattcttttctttatgaatgttgaatattggctcccactctcttctggcttgtagggtttctgcagagagatttgctgttagtctgatgcacttctctttgtaggtaacctgacctttctctctggctgcccttaacgttttgtccttcatttaaaccttggagaatctgacaattatatgtcttggggttgctcttcttgaggagtatcttagtggtgttctctgtatttcctgaatttgaatgctagcctgtcttgctaggttggggaagttctcctggataatatcctgaagtgtgttttccaacttggttccattctccccgtcactttcaggtacagcaatcaattgtaggtttggtcttttcatatagtcccatatttcttggaggttttgttcgttctttttcatcattttttctctaatcttgtctgcatgccttatttcgttaagttgatcttcaatctctgatatcctttcttccacttgattcattcggctattgatacttgtgtatgcatcacaaagttctcatgctgtgtttttcagctccatgaggtcatttatgttcctctctaaactggttattctagttagcagttcctgtaaccttttatcaggttcttagcttccttgcattgggttagaacatgcttctctagctcagaggaatttgttattacccaccttctgaagcctacttctgtcaattcgtcagtctcattctccgtccagttttgtgcccttgctggagaggagatgtgatcatttggaggagaagaggcattctggtttttagaatgttcagcatttttgtgctggtttttcctcatctttgtggatttatctgcctttgctctttgaggctgatgacctttggatggggtttttgtgtggggggtcccttttgttgatgttgattttgttgctttctgtttgctagcttttcttctaagagtcaagcctgcagtcctgcaggtctgctgcagtttgctggaggtccactccagaccctgtttgcctgggtatcaccagtggaggctgcagaacagcaaagattgctgcctactccttcctctggaagctttgtcccagaagggcaccagcctgatgccaaccagagctctcctgtttgaggtgtctgttgacccctgttgggaggtcttgcctgctcaggaggcatggggctcagggacccacttgaggaggcagtctgtcccttagcagagctcatgcactgtgctgcgagaatcccccttgtcaggatcagctgctctcttcagagccagcaggcaggagagttcaagtctgctgaagctgtgcccacagccaccccttctccaggtgctctgtcccagggaaatgggagttttatctataatcccctgactggggctgctgcctttctttcagagatgccctgcccagtgaggaggaatctagagaagcagtctggcctcagctgctttgctgtgctttggtgaattctgcccagtccaagcctcccagcctccttagcactatcaggggaaaaccgcctactaaagcctcagtaataccaaatgcccctcccgccaccaagcttgagcatcccaggtcaacttcagactgctgtgctggcagtgagaatttgaagccagtggttcttagcttgctgggctccatgggagtgggacccactgagtgagaccacttggcttcctggcctcagccccctttccaggggagtaaatgattctgtcttgctggggttccaggcaccactggggtacagaaaaaactcctgcagctagttcaatgtctgtccaaacagcaactcagttttgtgcttgaaacccagggccctggtggtataggcacatgaaggagtctcctgatctgcagattgcaaaacccatgggaaaagcatagtatccaggccgggtatcacagtcccgggtatcacagatgacgggttgatgggtgcagcaactgcatgcaaactgcatgtttgcagttccctcggctgggggagggaggtctcccggctccttgcacttcccaggtgaggcgatgccccacctgcttctgtgtgccctccgtgggctgcacccactgcctaatcagtcccaatgagatgaacttggtacctcagtcagaaatgcagaaatcacccagtgttgatctcactgacagctacagactggagctcttcctattctgccatcttgccagatgtaaagtgtagaatttttgattttgtttttttgcttgtttatgcaattagtgttaagtcatcatcagtttaaaataatgagttgtaagatattttcaagcctcatggtaacctcagatctaaaacatatggcagacacacaaataaaaagcaagaaattaaagcatgccactagagaaaatcaccttcactaaaaggaagacagaagggaagtaacaaaggaagagaatatcttcaccagaaaacaaataataaaatggcaagagtgagtccttacgtatcaataataatattaaatgtaaatgggctaaccttgccaatcaaaagacagagtggttgaatggacccccgcccccacaaaaaaagacccaattatctgttgcttacaagaaacacatttcaacctataaaaatacacatagactgaaaattaagggcttgaaaaaagatattccgtgccaatagaaaccagaaaagatcaggagtagctatacttgtattaggcaaagtagagttcaagataataactataagaagagacaaagaaggtcattacatcatgataaagggatcaattcagcaagacgatataacaatttcaaagaaacatctaacttaatctgcactgtagaccaaatatacctaatagatatttacaggacatttcatccagcaattccaagagaagaatacacattctcctcagcacatagctcattctcaaggatagaccatatgttagatcacaaaacaagtcttgaaacattctaaaaaattgaaatactatcaagcatcttctctgaccagtacagaataaaactagaagttaataatgagacattttggaaactatacagacatacacatagtaattaaacaatatgctcctgaatgaccagagggtcaaggaagaaattaagaaggaaattgaaaattttattgaaataaattacaatggaaacacaacataccaaaacctgtgggatttgtttgtgtcttttttacttccttgagcagtggtttgtagttctccttgaagatatgaacagacacttctcaaaaaaaagacatttatgcagccaaaaaacatatgaaaatgtgctcatcatcactggtcattagagaaatgcaaatcaaaaccacaatgagataccatctcacaccagttagaatggcgatcattaaaaaatcaggaaacaacagatgctggagaggatgtggagaaataggaacgcttttacactgttggtgggagtgtaaattagttcaaccattgtggaagacagtgtggcaattcctcaaggatctagaacccaaataccatttgacccagtgatcccattactgggtatatacccaaaggattataaatcattgtattataaagacacatgcacacatatgtttattgcaccactattcacaatagcaaagacttggaaccaacccaaatgcccatcaatgataggctggataaagaaaatgtggcacatatacactgtgaagtactatgcagccataaaaaaagatgagtttatgttcttttcagggacacggatgaagctggaaaccatcattctcagcaaactaacacaagaacagaaaaccaaacaccacatgttctcactcataagcgggagttgaacaaggagaacacatggacacagggaggggaacatcacacaccggggtctgttggggggtggggggcaaggggagggagggaattaggagaaatacctaatgtagatgacgggttgatgggtgcagcaaaccaccatggcacgtgtatgcctatgtaacaaaactgcatgttctgcacatgtaccccagaacttataaaaatcctgtgggatacagcaaaagcagtattaagagggaagtttctagttaaaagcacctgcatcaataaagagaaaaacttcaagtaaacaacctaatgatcttaaagaacaagaaaagcaagagtaagtcaacctaaaattagtagaagaaataataaagcttagagcagaaatacatgaaattgaagtgaagaaaacaagacaaaagatcaacaaaataaaaagttggtttttttttttaaaagataaaattgacaaacctttagccagactaagaaaagaagagggaagatccaagtaactaaagtcagagacaaaaaaggagacattacaactgataccacagaaattcaaaggataattagtggctgctatgagcaactctatgccaataaattggaaaatctggaagaaatggatacattcctagacatgtgcaacctaccaagattgaaccaggaagaaatgcaaacctgaacagaccactaagcagtaatgagattgaacctgtaatttaaaaatcttccaacaaagaaaaccctgagacttgatggcctcactgctaaattctgccaaagatttcaagaactaatactaatccttctgaaactattatgaaaaatagaggaggagggaatacctccaaactcatctacaaggcccgtattaccctgttaccaaaaccagacaaagatacatcaaaaaaaaaaaaaaaaaaaaaaaaaaaaaggaaccacgggccaatatccctgataaatattgatgcaaaaatcctcaacaaaatactagcaaagcaaattcagcaacaccttaaaaaagatcactcttcatgaccaagtgggagttatcccaggaatgcaaggatagttcaacatatgcaaatcactttatgtgatacatcgtatcaacagaatgaaggacaaaaccacatgagcatttcaattgatgctgaaaaagcacttgataaaattccacatcccttcaacataaaaactgtcaaaaacctaggtatagaaggaacatacctcaacataataaaagccatatatgacagacccacagctagtaacatactgaatggggaaaaactgaaggcctttcctctaagacctggaacatgacaaagatgcccactttcatcactgttatttaacacagtagtggaaatcctagctagagcaatcagacaagagaagaaaataaagggcatccaagttggaaagaaagaagtcaaattatccttgtttgcagatgatgtggtcttatatttggaaaaatctaaagaccccacaaaaaaactattagaactgataaattcagtaaagttgcaggatacaaagtcaacatacaaaaatcagtagcatttctatatgccaacagtgaacaatctgaaaaacaaatcaagaaagtaatcccatttaaaatagctacaaataaaatacctaggaataaacttaaccaaagaagtgagagatctctacaatgaaaattataatacactgatgcaagaaattgaagaggacccaaaaatggtaagatatttcatgttcatggactggaagaatcaatattgttaaaatgtctgtattgtctaaagcaatctacagattcagtgcaccccctatcacaataccaatgacattcttcacagaaatagtaaaaacactcctcaaacttatatggaatcactaaagtcccagaatagtcaaagctatcctgagcaaaagaacaaaactggagggagcacattacctgagttcaaattatactacagagtcatagtaaccaaaacagtatgtactgacataaaaacagacacgtagaccaatggaacagaatagaaaacccagcaaacaaatccatatgtctacgacaaactcatttttgacaaaggtgccaagaacatgcattgggaaatggacagtctcttcaataaacgatgctgggaaaactggatgtccatatgcagaagaatgaaactagacccctatctctcaccatataaaaaaaacaaatcaaagtgaattcaagaattaaatctaagacttcaaactatgaaactactaaaaagacattggagaaactctccaggacattggagtgggcaaagactgcttgagtaatccctacaagcacaggcaaccgaagcaaaaatggacaaatgggatcacatcaagttaaaaagcttctgcacagcaaaggaaacaatgagacagcctgcagaatgggagaaaatatttgcaaagtgcccatctgacaagggactaataaccagaatatgtaaggagctcaaacaaccgcacaaggaaaacatctaataatccaattaaaagatgggcaaaagacctgaatagacatttctcgaaagaagacaaatggatgaaactggaaaccatcattctcagcaaactatcgcaaggacagaaaaccaaacaccgcatgttctcactcataggtgggaactgaacaatgagaacacatggacacaggaaggggaacatcacacactggggactgttgtggggttggggggaggggggagggatagcattaggagatatacctaatgctaaatgacgagttaatgggtgcagcacaccaacatggcacatgtatacatatgtaacaaacctgcacattgtgcacatgtaccctaaaacttaaagtataataataataaaaaaacaaatgacaaataaataaatgaaaatgtactcaacgtcactgatcatcagagaaatgcaaatgaaaactataatgagatatgaccccaccctggtcaatatagcttttatccaaaagataggcaataatggatgctagtgaggatgtggagaaaagggaatccttgtacactgttggtgggaatgtaagttactacaaccaccgtggaggacagtttcgaggttcctcaaaactaaaaatagagctacctctgatccagcagtcccactctagttatatatccagaagaaagaaaatcagtccagcagagaaggatccgcactcctgtgtttattgcagcactattcacaatagccaagatttgggagcaaactgagtgtccatcaacagatgaatggataaagaaaatgctgtgtatacacgcaacggtatactagttagccatgaaaaagaatgagaacatgtcatttgcaacaacatggatggaactggaggtcactatattaagtgaaataagccaggcacagaaagacaaactttgcatgttctcacttatttgtgggagataaagattaaaacaattgaactcgagatagagtaaaaggatggttaccagaggctgggaagggtagtgggggttgtgagggaagtagagatggttaatggaaacaaaaaaaaaatagaaaaatgattaaaacctggtatttgatagcacaacagggtgactatagtcaatgatttaattatacatttaaaaataactaaaagagagctgggcacagtggctcacagctgtaatttcagcactttaggaggccgagtcatatgactcacttaaggccaggagttcgaggcctgcctggccaacatggtgaaacccccttctctacaaaaaacaggaaaattagctggacttggtggcatacacctgtaatcccagctacttgggtggccgaggcatgagaatcactcgaactcaggaggcggaggttgcagtgagctgagatcgcgccactgcactccagcctgggtaacagagtgagactgtctctaaataaataagacgaaaagagtataatgaggttgtttgtaagacaaggggtaaatgtttgaggtagtagatacccccatttacctctatgtgattattatgtactgtctgtctatgttagaatatctcatggaccccataaacctatacacctactatgtacccacaaaaagcaaaaagaaaaagagcttatgggtatcaatttttctgttagtaccgcttttgttgtgtcccagcaagttttggtacattgtcttctcatctttatttgcatttaagtattttctaatttcccttctgattttttttttttttaatttaagtcccaggacacatgtgcaggacatgcaggtttgttacgtaggtaaatgtgtgccacggtggtttgctgcacctgtcaacccatcacctaggtgttaagccctacatgcattaactatttatactgatgctctctctccctctgcccccctttttctttgattcattggttaagagtatgttgtttcatttccatacatttgttaatttttccattttacttctattattgatttctaagcttatcccattatcgttggagaagatcctttgtatgactggcatctttttgagtactttgagacttaattcgtggcctgatctctcctgggaacatttccacgtgcacttgggatgcacatgcatgctgtggtcatgggtcgagtgttctctgcatgttggttagatctaggtggcttattgtgttaagtcctctattctgtaacttatcttctgcctggttgttctattcattatagagaatgtggtactgaagtctctcaccatcattgtagaactatttctcccttcggttctgtaaatttttcctttgtgtcttttgatcgttagctgttagaggcataaatgtttacaatggttatctgtaacatcttcttgcagcctcgaacctttaagtgtgcagcgtcctcttttgtctcttgtgacctttctaggtttattataaaaccatttttggctgatgttagtgtagccactctgctttttgtgtttgccatttgcatggaacctctttctccactctttccaccctttcactttcaatctttttgtgtctttggctctaacgcgagtctctagtagacagcatgtagctggatcatgtttatctattctgccactgccgatatcaccttttgatatacagactttacattttcataaaatttaatttgtccacgtgcttagcccctgtgatccagcaatcccactgctagttatatatccaaaaagaaagaaaatcagtccagcagggacagatgcgcactcctacgtttactgcggcactgttcaccggagcctgtgccttcaatgtcgtattcaagaaatcatcctcaaatccaaagtctttctattttctcctatgtgttcctattgctttaggtcttacatttatacctttgacccatattgagttaattttttatatccagctttattcttttgcatgtagatactcagttatcccaccatcatttgtcgaaaagactatacgtgaactttttgaatttgcttttctcacgtaatagtatttcctagagaccactacatatcagttcgtggggtccttccatattcttttttacagccaccccatactttatggttggatgtgccatgcttattcaaaccctctcctatttatgggcatttaggttgttctgatattgtgcaatgataaataatgttgcaaagtatagccttatacatatgtctattgtattcttgaaacaatgttgcaaagaataacttcgtaggtatggatgttcctattgttggaggtgttatcttcagggtagattcctagaaatgggagtgttgggctgaaagagaagcccgtagttttgttggatgtgaccaaatttccctgcagaacggttgcacatttgcactcccccagcaatgcatgagcataccggttttttttacagttgcgccagcagcgtgctgtcacaccactttttgccaggtccatagctttgttttaatctgtatttctgtaattacattgaatttgaatgttttccctgtgtctaaaagtcatgtgtgtgtgtatttgtaaatcgtctgtcttctcatttccaacttcttccattgggtttttggttcttggtctctcaatttttaagtcatttatattgtgggaacgtttgtctggactaatgtgaattgttttcccagctggtcacttgtctttgactttgcttatggtgctttttgctatgagaaatttcgcatgtttatatcatcaaatttatcatgcttctttctactgactccggattcagggccacagttgagagctttttcctccaccgaggttaaggggaatccactgtgttttcttctggaggtttggggtcttgtcttcagcatttagctccttgtccgtttggagtttgctcttgtgcatgatctaaggtaatcttttctcagagagtggcctgagacctcttccttagaagttcaccccactggctggggccttcacgaggcccctctggcctctaagtggagcatggagtgtggggtcatcgggcaggacacgagatgcgcaggaggctgtgactgaggtggctgtgggatgggacggcgtggtttgctctagagggtttgaaggaagggtgagaagtcaggaccactgctgtagaaaacagggtttgcaggtagataaggtggcgggtgcagcgggaggaagagaaaaggatgctgctgggacccctcgcacctgggaggatgcactttctgtttctgacatgggtcagggttggggcgaaggagtccagctggggacatgttattttggaggtgtttgtgaggcagccaggtgaggtgggttgaaggcagtaagacctgcaggtgggagctctggggagagagtgcgggctgggctcacaagttaggggaggtgtcagtgtgtaaatgacatgagcgcaggggctagacagggcctcctgtagcctgggtgggtggaagggcagagggcaagggccaagtgatggcagctgtggaggctgagggcaaggaaggcaagtccgggaggttgggtgtcctgcagcctccacaggggcaatggaggaagaacaaaggactctgtgttgagccctcctgagaggttttggaactggccttgacttggtgatgtggggttatgagttttattccacacacgtatgtgggagtctgggtcctggtgggtcccagccccgtacatggaggctgggaccctgccctgaaacctctcagacacaaacacccagctcggccccacagagctggcctgggccccagcaggggtctgtgttgccttggccccacggcagtggagctggggtttcccagggatgctgctgctgaaggtgaggtttgcaaacactaggcatgcatgtttgaggtaccacaacctccaccaacccatggtggtcaccaagggtctttgggctcctgtggggaccatactggcttgtctgacttgccgttacccggcggagatatgtcttggaaagactttaggccaggagcccatcattgtcctggaacctgggcttggcagggcaagctttggggagcactgtccagacagtgccctggacactgcacctcaggtcaggacacagctcccgaggcctggctgctctgcatggggaggagtgtgggtcctgagtggagtgtcccatctgtcatgcagagagggtgatgatataaccagctgggtgttcgcacctgagaggtttcggggcagggtcccagcctccatgtacggggctgggacccaccaggacccagactcccagactagcaggtgggcttctcagagcacagagggtgtgggtgacccagatatcctgttgttgctcagagacccccagggaatccttgaagatggcagtgaccacctggcttcctctatagaaactccccgaatgggagggatgggaaagactgttgaactaagctttttaggaagaaagccatcaattcccctgctctcatacaggcttgaggagggctaaggaaagtcacagttgaatgcatgctccctccacacccatgtgcctgatgcacacagcctggcccttgtgggcactggagggcaccctacagtcacagaggcaaacgaagaatgtagagctccagctggatgagggccgtggggaaggggcacagccctgggcaagggtgtgcagagtctgcatgggatttgactgagcaatctggaaggcttcctggaggaggagctattgctcagggtgaaatagaggtcttgaaattagtacaacacatgccccatactggggaatttgggggtccctgggggaaggactctgttaccaaaagcacacagcacaggttgggagagcaactatctcaaggcttttatttgctgtttcatgaaactgaaaatttaagtttttaatatcacatattatttcatgaagagtggcttcggactttggggtagggtctggtaggatcccagggccccttcccttggcatcatcattgtttcccctccatgttcaagttcagcatctctgcaccccttgcctggcaaaccccatcttcctgtccaaagccagacttggctccctttgctccagtgagtggccgttggctgggaggctgggtctgtgctgtgtggggggtgtttggtgtcctaggaggagtctctgtcctgagcagagacagaggaaggcagggcagcctgctcagaggatgagcccagctattctgggaagcaggcaggaagtggcagctccaggtccgggtgtgagggcagtagtgcaggtcgtggtcccagatggccacggaggtgtcagcgtttcactcccagcacgtcacgccacgtccctttcctctgctttgttcctcctcagctgtgaactgtctgggactgggccaggagacagtcctgggatagggaaagaaaagaggggcttccgggggtggggagcggggctgggcggctgctggctgagccaagtggactgggaggtgtggacagggaaccctggcggggccggccaatggtggcgtgatgcagcctggcttgggaaatgcccatggaggtgacaagtgacagccgggaacagacccactgccagggctgcctctctctttagatatgtcctggcatctgactttggtttcctggtgtttaaaggctaattgggatcggtcgtggtgcctcaggcctgtcaatccagtacactgggaggccaaagtgggaggattgcttgagcctaggagttcgagaccagcctgggcaacatagcaagaccccatctctaaaaaaaaaaattaaaatattaatactagctgggtgtgctggcacatacctgtggtcccaactactcgggaggctgaggtaggagcatcacttgagcccaggagttcaaggttgcagcaagctatgatcttgccactgcactccagcctgagtgacagaacgagaccctgtgtctaaaaaaaaaaaatttttaaataaataaataaaggtttgttggacatgttagctcacgcctgcaatctcagcatttggggaggctgaggcaagtggattgcttgaggccaggagtttgagaccagcctgacctgcctgggcaacatggtgaaaccccgtctctactaaaaatacaaaaattagctgggtgtggtggctcacatctgtagtcccagctaccctggaggctgaggtgggaggatcacttgagcccaggagtagaggttgcagtgagctcagattgtgccactgcactccagtctgggtgtcagaaccaggccctttctcaaaggaacaaacaaggctaacatgttgggctttctctgcttctgggcaatgtccgtgaaattgaagccgcactggtgttgttccacccttccttccagctggtctctgaggcccaggccagatgcttctctggttagcagcagattctaggccagagcctgcctccaggtcctgggaaggctggcacgctcagatgcactcctgggcgtggccttcctccgatcacagtgtgagcgaatctccctgcccatcactctgctcccctggcccagaccaggccatgcctcagggcttctgcacgtgcagttttctctgcctgcagggtctgtccctagctctctacccgattcagatcccacaccagctcctggggcagccctcttgccctgcctctccccgagacgtcaccctttctcttttccccattggtggtggttttatgtgttcatttacggtttattttctctctccctgtgtctgttatctgtctctgcacccctggagcccagcgtggtgccaggcacacactacgtgcctcctgggttgggggcagcagggacaaaagccaggcatgggatgtggctcttgtgggatgcaccttgggtgtgactgtcacggaaaaggaggagacgtggggtggggaagggggcagcccctactgttcctggcagcagggccagaattgagagccagaggttgccactggagggcttcctggggaggcagctggcaccgcctgattcctgtttctgaatgccctctcactctcccccacccccatggaaccagaaccacctcgtcaggcccagcagcccttcagggtcagtctctgcatgggtggtaatatggcttacctgagtcctggtcagtctgtggcctgggagtccaccctccatgactagtggtttgtggcaggtgacgggtgagtggtctccatgctcccagccgctgtgtagaggtgccaacctgcccctcctgccagagctgggctcctgttgggcgggactgaggataccgagacagaaataaaactgctaaatgcatctgttgttgaataattcaatgccccatgccaggcctgttgcaaaattagccacttcctccctccaggcccatgagtgactcctggatttggtgaaagccaggcctagtggaattgtggcccggaaggttctctgggagctgggaacctccatgcaggagcccaggggagggggtgcttggccacatgcgggcccctcaatctgccctgtggagcccggcctggcctgcagccccctgtgcagggaaaaacccgcggttttccctggtggagggcacaggtcagagcgggcatggacagggcatgaggaagcagtgcagaggaagcgtgagcatttgtctcgggccagctggagaaaggaaatggggctgcttcctggagggcagagacatcaggggctgcgctgtcgggctcggcgtgcaagatttgtgtctcatcccagggttaggtgcctcccaaatgccagggcttcccatgggccatacacactcagtcgaacaagatttgcacaaaacctgggccataagctcgctgagcacttggcctgcccagccggtgacaatgagaaccgcacatgctcagccttccctggactcagggccctacgggtgctggagccggggcgggagagggccgcaggctgcccctgcctctgcatcctccccgtcgatgcctggggccactgggattggcagaaaagggatgcccccgagatgggcagccaggagaactgtctgtctcctatcccaatatgcctacctccctctctgaatccccatttccccctcatccttgcccccacacacccagatttgcaatgggacacacggccacctgggatgacaacccctcccagtcttccctcaagacaagtgtggccatgaccgcatggggccagcagggtgtgagttgaagtgtcccgcagtggcttccggggatgtgcagccctgccctgaggccctctggccgcctcttgctctctgagcagggatgtccgtgccttgggcctgaggctgagctgggctaggtccctgggtgtctggggccacactctctggtccagcctgctgttacaggggatgcctcagggccaccactggtcatggaggctgggggcgcctgcctgtctgcccgcctggagttcaggtaaacaaccccactgaggaggcacccctagccgtgggagttggcgtgtcctgctccccagggcggtctgtccccttggcgagatccttgctgtgtcagcagagggttttcctggcccagggtcttggggagcagatgatggggctttaggagctctggctctgggaaggcagtggaccctggagcagggatcttgggaggatggagagttggcggctcaggaaggaggctgctcaagccccggcctgctcactgggaagagcggtccttggaggagagagctcccgaggagaaagccatgatgctgtgctgcgctctgggccaccaggtcttgtctggggggaatcctgaccctgtgtgatgtgagtgcagggactcccccaccctccgaccaggacctttgtactctcctggccgtgtcattgcacaactccaggggccgtcactcacctgagccctctttgctcttcttggctgttccctgatatggccacgcagagactatctctaagtgtcagttctggactcagctggaaaggtttcatgacctcaagggacccatgggacttgagggtggggcagctgtttgccctgtggatcaaaggggagtgtctgggatgggatccacctgccctgccctcaaagtgctgggcagtccctcagagccatagagcctagggggtcttgggccctcttccccagggcatggcccaggcacctgctggcctgaggtccctgctgggcccaaggcatccctgccgtgttcagagttccacaggcaccagtccaccatgctggggcctactgggagagacagccacccgcctgctgtcgggagcctccatcaccagagcctgggggtgtcccagccaccctggccgctgtttctctgcctccgcaccggcctctctcctgagttccatccatccctgcaggttgggttctcctctctcctctgggatctgcacaggttgccattctctctgcctagactgggcctccacctctgagaagccctcccttattgccccttccagtgggctgggagagggaggaaggccaggtgcagaaagagaattcacctgcccggctaaagccccacctgcctatttcaaggcctctgatgccccccggcctgcaaggtgtgtgcatggggcctgtcccatgctggctcacccagctgctcagagaggcaagtggctcccgggccccacagtgacactgggggactctttgtctccatttggggggtgtgcaggtcactcctggtgccctggtcagcttccccaacctgagctgccctcagctcctggcttggccctccacggagtgggagatgcccccctcccctgccattatcgtaccttacctcgctggcggccatggaggcagtgagaagagccgagggagctggccggggcgcatttccgtgcaggacactggctgcctcccagctcactcttagcctggtcatagagcccggcagcatcttgccaggtgcctgtggtcccagatcctggggctgccccatctctggaatattgaggtgtggctggggctgatctgaggatgaatgtggctcaggttgccgggtgcccttgacgcattcccatgtcccagtggggaaaccaaggctcaaggaggccacacagcagctccatttccagggacacccagtgttctctgtagtgggtaggaggtttccctatacaggagaccaagctacagcaagaaagacttggccgggcgaggtggctcatgggcgcggtggctcacgcctgtaatcccagcactttgggaggccaaggggatcacgaggtcaggagatcaaggccatcctggctaacactgtgaaaccccatctctactaaaaatacaaaaaattagcccggcgtggtggcgggcgcctgtagtcccagctactcgggaggctgaggcaggagaatggcatgaacccgggaggcagagcttgcagtgagccgagattgcgccactgcactccagcctgggcgacagagccagactccgtctcgaaaagagacttgggctagatgtgaggagggactttcccaagtagggatgaaccctgaggacccacaccctgagccgccagtgggtcgtgttgacctggcagctccagggcacctgaggccttcgctgtccttccgcacctcgcccccttcccgagtggaggtgctctgggagctctgcctgcttcctcaagtctttcttgtttttttatgttattttattttagatttgaggagtacacatacttgtctgttacgtgcgtaatggtggggtttgggcttctcgtgcgcccatcagccggatattggacgttatactcaataggtaatttttcaaccctccccctctcaccctctccacctcccctttggagtcccagagtgacctttctccgtctttctgtccaagcatcccatctgtctagcttccactcatgagtgagaacgtgccgtgtttggttttctgtttccggtagttcacttaggatcatggtctccagatccatccgtgttgctgcaaaggacatgatttcattcacttcttggaggctttaacgcctgccctgtgtgagggagggcggagcccctggcccaggggcggggaggcctgtccacccctcccacccgtccccgaggcccctgctgcccagcaagaccaccaccctctgctccaggacagcgcagccgccatcagtgggggtgaggggacaaggctgctgggaccaggcctcgcccaggcagagcctcgccatttctggggtggggggtgcacaggtgcatctggtctgcccagcccctcctcaccctaggcaggcctctcacagagacaagacgagtgtcctagggcagatagggccacatccatggggtcacttcagtttgtcctcccggcgccttctaaatatactctctgtgggtgtcttatcacagcccagggagccaggcttggtgtggccggccctgggagcacagagccccgttcccagcagccctcggccctggggggcttgtgctctgccgggccacctgcaccctccgggccccaggagaagctcatgcctttcctgcttgcaccccagagcctggccacccctgtcctctgctgaggccctgaccacctctatgtgtgccatggctgcagtgacagcccagaccccaggggccgggcatcccacagctctcctcactgagcccctgggcctatccgcccacgcccaggccagggctcctgctggaatctccctgtggaaggccaggctgcctggatgcccaccactccaggcttacttctgggttgtagttttcggggtgcttcgaggtgctgtggggacctgtgatgctgtcagggagacccggagtccagttctcgccaaccgctcgatgctgtgtgacttgaggcaggtcccttaacctctctgagcttcctcctctcctgtgaacaaaggatgggtccacttctcaggcttctcatgaagtttagaggcgacaggaggaggtgggctttaaatggctcagtcccagcgtcccctcatgcctgggaccgctgacccaccgggattcttgggggccaccatagagcctgtttttaaaggggatgtggcggccagctctgggggcacacgttcctgtttgaattctcaatctccgggctcaaaattggcccccagaaagcctttgagatggacagggagctggaccttcccaattcggttgcccttgcttgatgtttacatgccactgttgggtgctcctgattgtgtagcgggtcccctgaaaccaacacacaggtgcagacacccacatgccatcctgccagagccctgggttctcagcaggactctttgccgggatcctcatgctacggccaccacctgattttgtcgataaagttttattaggacacagccatgcccggccgaatattgccacagaggccacctgccccaccacgcctaggacatttcctctctggcccagaggtgtgccagggctgcactgggctcttctggtggggagggacattgttctggcccctcctgatctctcccccaccttgccacgaccccccagagtttgcctggtgtcaccgggaagcttcctggctgcccgagggtcccccagcacctgtccctctagggcctctgaagggctttgacgtgacactcgggatggcatggcagggccctcaagcacggctgtgttcaccccccaggctgctcctggaaaggagggatcagggcccaggctccacgctccgcactgaggtgtggtcgagggccctgggcgtccgggtgagatgggaatgagcccttggtaggtgccaggcggggccagccctcatccccactgcaaggcctgagcgtccaggagccccgtgcgcagctggacccatcagtccccaccctgcagggccgttgaagagggaatgcacacctgtcacctcttggtgcgggggcatccaggttcctggcgatggggatggggtgagatgcacctgatggacctccaggtgggaagctcctgggacaccctggagggctctggtgggagacatggcattctgtctgcaccgaagggggctcagggctgagaagccctgggacgggttggatttggggcgcgttccccagggccccacgcgtgttgagtccccgctgcgtcactgtctggcctgtggcgcctcacctctctgtctggcaggactcaggcagaatggaagtaaaggcaggaccttgtcccaggacatccaggcatgtggcgtggcaaccaggtgggatggcagggtttccccctggcaggatccccacctcctgcacctgtcctgacttggtcttctggggcagcccctaagacgcttcttcagggaagagggaccggtttggccagtgggaccatggccctgggagcatatgcctgcacgtcctgcccgctcacacctgcctgctgggggggccatgcctgcgcccgcagctcacgtcagagcccaccccaggaggctcccagcgatctgtcaacctgtgctgttggcatgcagcctgggggtgaggggtggcggaacgctgcctcagtaccacgtcctgctcaaaggccacttgcgagctaggctgagcctgtggtgtgcggtgggataggaaggaaaagaacagagtctaaggagcctaactcacttccagattcacccggaggcctgcatggaggaggcggcactgagacttcattcaccgagcttgagggtttaccctaacattcattcacaccatcagtcattcagcaaacacttcacaaacgtgcatcccacgcctggcactgggccttcggagggagggaatgcagctggtgggcccctgcctggggagcccctgctctggtcggggaggcagtggtggcagtggctgcctggcggtccatgaactggtgcaagccagagccggaggcctcctgagagcctggcagggaagcccaggccagggcctccgcagaaggagggtttggggtccaggcttcatgtggggggtcttgtaacatgggagggtagacgctgccttgggacaggagagacagaggcggggggaccaggggagtgggctgcagttggggtgcaggcctggtggccccggcagggggaccagcctctggggaggtgctgcaggcacaggagttctgtgtggacccagccgaaagctggcaggaagggacctgtttcttggggttcccagtccagatctgtgttggaaaaagtgtcagctgaaaccccaagaggctggggacagccttggtcctgctgtgggacacaggtttaatctccagatggctcctggataggcgggctggcggctctgtctaacggggacagcacacttggggcttcgggagacaatgagggcagaaatcttacccaccggccacaccaagtcacccattgttgtgtcccttgggctgggatcccatggctttcaagaactttttaaagaaatgagactcagctgccgcggaacaagccacaggtaaagagtataagacagcgtgaggcatggggtggccacgggagccctgggccaaggaggcccagtctggtggggaggcgtccattcacccggagctggacggggaggaccaggctgtgggtctgtgaagcgggtgtgggatcacatccacgctccttctgtggtttgtgccctgttgtggctgccaggggaggggcttccaaggccctgccaaccagctgggcagtgtggacaatggcagacagggtgctgtgtgggggcctgaggggcaatggttggggggcagctgttgccgttctggtgagaagtggcggtccctgaagggctggggtgctagggagcctcatggacctactcccgacgtggcagctgcctgctgcagatgggccagccatgtcccgcctgtgccgggaatcaccacccccagctcccttctctccaacatgacagggttcgggtgatgccctgtgggctgaatggtgagagaggcgtccctgtgctgacaccagtgggcgtggacgtgaccctctttttaaaagaattttttcagatgcaattccattaaggatctggaggtgagaggatgaaaaggaaactctgagctttgagtacatttttaattatgttttaaaaattaagacatgaggccgggcatggtggcttacgcctgtaatcccagcactttgggagactgagttgggaggatcgcttgagcccaggaaatcgaggctgcagtgagccaggatcataccactgtcctccagcctgggtgacagaacaagactctgtctcaaaaacaaaacaaaacaaaacaaaaaaccaaaaaacaacaacaactaatatatgtttttgaccaatacctaattctgttgtttaagaattcaaaatctaccaatagtgatcataagtaatgtattaaatacttacatagtacagcaggtgttggcccccccccacaacattggtttccatccctggaagctgcaaatgtgacctgacatagaaaacacccctttgcagctgaggctgagggtcccgagaggcgtgattgcattatccagggggcccaagtccagtgacacgtgtcctcctaaaagacaggacagattcaacaaaggaggatccggccacatgctgcacagcacgggagtgatgccgccacccacccaggacgcgggagcccgcagaggctggaaggctgaaaagggccctgtcgcccccaccccccaggatgacgtatggcctgatgtggcattcctgcctcaggaccatggcaccaagtggtggcgctggggcccctggagtcggccagtctgggcacgtcccatgctgtgtctgagcctcagtgtccccatcgattggtagtgcctcctgaaccccaatccagggggcttctggggggcagcctgggaccagacgtgcctcaccagggcttctgtctcctcaccaggacttccatgatgtgacaccttccacatggggttcagagcggggaacctgtgcctagtgtccagcccagcgtggggccctcggtgtgggccagggctcacccctttgggaggggtcgggagatgcctggcccaggctccatccatgcagagccaggaagcaggtgaacctgtggggaccttggcgacctccaaaccctgctgaggctgcctgctgacagccactggtgaggggggtgacagccactggtgaggggggtgaccagctggtagctttttctgaggtgcagattcagccctggggaacagccctggcaggctgtgagacctctgcccctgggcgtccacatcccagggctctgagctcagcagccctggagccggcagccacatcagggatggagggagacctgctggtgaccagtgagtgagcaggggaagcctgtcctctccagcgcccagtgtttccttcctggggcacatgggatttggaggcatttggagtctcccaggatgacttttttttttaagcccctagaagtggtttggggtttaagcgtcaatatttaatctcttgaagttacacattcaaggccctatcctgccttcggctttaggttcgcttcacaaacccattgtctgcttatcagcctggcgaggtcccgtccccagtaggggtctttgaacattgctcgatctcattcaccagccacggggaacattttgaaccctctgatgcttgctctatgaatgttgtttgctttaaaaaaagttttttttttattgtgataaaatacacataacacacaatttaccgtcttaactctgtgtcaggtcacggcccagtggcaataggtacatttacatggttgtgcaaccgtcaccaccatccaccccaaaacttctctcccaaactgaaattctgcacccatgaaatcccactccctctccccggccccgccatcctgctctccgcaaccgtggatccgtcctccccatgtccacagatcccctctccctcggccccgctgtccgcttccctgcgacggtggatttcgctgctctgggcctttgcgcttctgtgactggcactgtgtgttatccggtgtcctcaaggtgcctctctgctcatgtccttccatgcatgatgctttcagactgacaaaactcttcaagtattaacgtaatttttaatgtttacagattcaagaaattaagcatacggtcacgagagtgcaaagttctgtgaaacgctccagtggttacacgccccggggtttcagcttcgaccctgggtgagttccatggtgcagtggcttccagctggagttctaagggcaccccttgagctgcccacgtgtctttgcacgtgaagtaggtggctctctttaaggttcctcaactttattgggaaacatctcagggttacaaaacgccccccatgggctaaagaggctgtcactcactgtgtgtggggcctgtccccgagtgggcatggaaggccagagtcccggcacagcccccacccggactggatttgcttggcgggtcacctggatcaaccaggcccatttaggagcaccactcaggggccctagtgtgtgcggcagggcaggtcatggagtctccagccttcagctcgcgttagccccaggccatctgagccgtggagcccacccaggcccgctgcctgcaccccgggggagccctcccacagcgtctcgggctatgaccctggcagggttcctgcattctcctgtgttcccgggcacccggggctgagatgttgaaatgatgtcggataattcaccgggtgccttcggggctggtactcgccgtcactgctcctgaggcctatttgctgtcaaggggaacaagtaggaggttgttttctggggtgcggtgggctccccgctcatgcagctccccgccccccgcatgaccacgccctcttgggagctcgggtgggacagcattcaggggaccacatgagctgggggggggtcggtgtcttctctcccccaccccttcgctagcctgtcctgcttcccactccgagtccaaaacacgcataggattcgtcctctcccagggccttagtttcccggctctgcagagtggggggctgtgactgcctggccttggagctgaggcagagggggtggtaggtggccctgcagaggcaggaggggacacaggcaccccaggccctgagtgcctcaagggcagggaccccagctcggcacctgtgaggttcccagctccgcccgagacaagaatagataaagcggtaaataagataaaactctttttatctggagtagataaaagtaagctttgtcatataattccttctgaggctagcacggtatatcaaaatatcggaagaatcatttagccttcagaatatggcaaggctgacagccagcctggcccatgggcacctgtccccaccatctgcctggcctgcgggggaacgttcctcagcccctgctggctcccaacccccgggcctggagccctgtcttctgcctcagccgcgattccactgcacgggactttcccaggcacctctgcccaggtagttggggtggacgcccacttgggtgcacactctgtgggggctggtccaggaccacccatgtgcagtcttccctggccacatcctgtattctcccgcaacgcccagtcaagaatcttcctgctgcagtaactccacatatctgagccagctgtgtctcctgagcacaggacatgggcaggagaggcccctgcagctggaatccgcgccatgaagcccaggcgcgtggtatttgcagccagtcaccaagttttcaagccctcacctgcggcctgtgagtgcccaccctgcacatggtgctaaccagcatccatcactgctttcttttttaatttaatttaatttttttttttttgtggtggagtcttgctctgtcacccaggctggagtgcagtggcgcgatctcggctcactgcaacctccacctccctggttcaagcaatccccctgcctcaatctcctgagtggctgggattacaggagcacaccaccacccacgcccagttaattttttcatatttttagtagagacggggtttcaccatgttggccagactggtctcgaactcctgtcctcaggcaatcctcccgcctcggcctcccaaagtgctgggattgcaggtgtgagccgccgcgcccggccccaccactgctttctatgctgtggccgaggtcaccaactgccactgtgatggacggctgtcacccaaacagcacgagaatcgaaaagccgtgatggcagatgcagaaggcagcgtcgcctgtggtcttttagaagggcagctgtgaagtggggttatctcagcttccacattgcatcacggtgcccctgtgaagggcagaggagctgcaggtaattctgttcgctcgcctctgccttggaggaagtttacagttttttttttttttttttttgaaagtttaaagctttcaacctgggcctggaggctgcagggtcagcagacctgggtcctgcccatggcccccttccctcctcaggcctccatttgctcatctgagagtggggggagtgcagcgccttccgtgcaggtcactgagaggctggggcagtggcgtggattcgggtgcatgactcgcagacatggctgtcgcttggctgaacggtggcccctgaggtgtctgtgtccttgtcctgtgaacaagttaggttgtgtggccaaaggggctttgcagggtgactgagggatggctcgtgagaggggaggttgtcctgggttacccgggtgagccctcactgtgattgtgaggattcttctaagagaagcaggaggatctgagttggaggaagagacgggaggatggaagccaggctcggcgacgggaaagctgctgtgccaccctcaccgcagccctatccctgctcacgtgcaccaagaccagagcctggcaagtcgtctcataccgagggtcaaaggggcccagggcccagcctccagggaccccagccatgccgggtcagggaaccaggctgcagtcctgtgtctcctcctcagtttaccccaattgtgacctcagaagcccttggagcctcagtttccctacttgtagcatgtgtttgatgatagtgtggcagtgatgtcacagtctggcagggtctcgtgggggtctgtgttactgtctgcaaagcactggctgggccagtggtcagtgagcaggggcgtgggtagcgggcagtggcctgcagtccccaggagcacttcctgttgctgaacagacagcaacttagtggatccttcccagggcccctggtgggtggtgggttttgccacatctttgcagtagacagcactggcagcttccggcttatccaaggcctcagggtgaagtcgacgctcgctgctgattccctgctggacgtcaggtgacacttccctccacagcctgggaagaagcacctgtgggccacttctttgtgttgataaggaaactgaggcaggggagctgcctgggtcaccagtgggcactgcatctccatgtgcagatggtgccctggccctctctgcacgccgtgggcctggggagcaggcaggtggcatcttctgccccgggcagcccggctctgcttcctcgtggctgagccaggctgtgtctaatctcacttccctgctcactgcaaatcaaaacaaacagacgtccaggaggattaagtgtggcagtcatggcggagggagccctggtagggtggagagagccaacagttgcaccagcaaggggcagagacccagcccagccctgggggctgcagggtgtggggacagggcctgcagcttggcacaaagactcttctaagaacctggagggaaccctgctccggcagtgggcagcatgctgtgtgcaaggtgagccagtctgagcccattcccagtgcccggaatggtgcccagtgcagatgggcactcacccttccaaccaacctttgcttgtgtccccgtgagatccacagattcaccctacggagggctccccacagggttggcccggaggctccagctgtgtctgttgaacaaattactctgcatccaccgcgtgctagcgctgtgcggattatagtcccagagacagatgagagcaggggtggtcagtgtaggagcacccagagggagcctggcagggcctggacatcctgtccaagctggccaggaggagtcctcagagccaaagcagtgtggagggtgggggtgcagagagcgtccctggctggaagcaccgcgtttgcaaatgccaggcagcttatgcagccagcgctttgggcaggcgggagtcagggggactgaggcccaaggaggggtagggctgcatgccagccttccaggtgctcctgggaaccacgtggctgatcagacttgtgctttgggtcgaatgtcccagtgggggagtaacctcagggagcagaggaagggtcatggtggtggggatgaagcagcagcattggggcttagagattaaatgaaggaagtcccacggggctgatcacctactgtgcaccaggctgcgtcccgggcatggactgcagcccacagccccactcttggggtgctcatggtctagggggtggacaacagactctggtcccagcgatgatgcttgagtataaaggacacagttggggtgttgtgggggccagggtcagacatcagagctggcctctgcctatgagacagggcccgctggcaggaccctcaagctgggcttttaggctgggcagcagcaggtgcacgggccctgaggtgggccgggctgggcacagtcaggactggcaacaagggccgggaggagctggggtgatctggggccatcgtggtgtaaatactggggcacgacatggagggttcactgactggctgggtgtgtgggctgggggcgccgagggtggaggtgggcactgtggtcagggggagatgaggatggatgggcagggtgcagacaggggctggctgggttcggctctgcaggtagagctgaccagtgtggcagggacagggtgtcggtgaggcaggtggctgaggaaatggtagctgcaggttttggccccagtcccagcagcgggactatggctgtggggagggaggaacccagggagggggcctgagcaggtctttggctgagtgagccctcaagggcctttgggtagggctaccagaggccaggaaaggattgtcctgtccacaggagcttggggaagggggtggggggccagagccccaccttccccagaaacctccgtgcagcaggaggatgagccgaggcaggctgtgctgggaggtagcctgtttgttgtgggctctgggggcctggggagggtgggctgggctgtccacatctggacaggtggaagaggatgggttctgggtggggctgacttcaggaggctggatgagaggcaatgcagggggccttctggctgtcctggggtgggttagaagccactcaggatggcaggatctcagggagcggagggagcctggggcaccctatgccaggcagaggatctatgccggggcccccagggtctgtgtgtggctttctctgtttgtgtctcccctggccctgggggccatgtggccatctcctggctctccggtcgctgaggatccacgggggtccctggagtctccggagcccgtgggaatccccctagaggcgggaggaaggccgggcgggccctggagggtacgtttgcagtggcagcagctccctatctttatggttccggcgatcagagaaggcggcccgtcttttctctgcgggcccacaggcccagaacgttggccccagggtggggctctgtgcgccttccctttcatgagttctgtggctcggcctcggggccttggaaaggaggaagtgaaactggaggagagcggcccacagcctgccgcctggaggctcctctgggaagcagacgcttggtgcaggtgtcaggacccccacctggcgggctggcttctgtgctgtgaccaccaacacccctgccctgggccctgaactcctggacagggggcgttgactgctctctggaagtgatttgtaaaatcagctttgtagagacgtaattacacactgcagttcatttgtggctctagggccctaagtggctctagaatgttcagagttgtgtagccaccaccaccatccacatccagaacgtttaattaccccaaaagaaaaccccacgcccacagcagtcccgccctggggcagccaccagcctgctttctgtttctgtggctctggctgtccagggcgtaaccacactgcaggtggtcagcaggtggtcacctgtctgtgtctggccttggcgccatgtttctcggacccatccacgtggcagcatgtgttggtgcttcgtcccttcccgtggcgggacggcatccctcgtgcggacctacctctagtgtgtgcttaccagctaatggatgactgggttttcgaagcactgtctgttcctacctgggggcggggctgaggccaggggcccctccactccccaggtgcatctgtgggatgggcagaggccgtgatgctgactgccgtgtccctgtcttgcagcttcctcatcgtcctggtctgcctcatcttcagcgtgctgtccaccatcgagcagtatgccgccctggccacggggactctcttctggatggtacgtagcatctgagggcatggctggatgtcatggctgccttggaagctggcatctccctggcgctgggccccataaggtggggggcagagccactcccagccccttgcccacacattggtcctgccctgatacagggggcacctccccagcccccacacttgccaagtgacttgggatgtatgtgccacaggcgagggggaccaaggactgaggggaacctggagctggtggtctgaaagggcttcctggaggaggggcttccaggctgggctggaaggaaggaaggaggaggtagggtagagctggtgtggccagcaaaggcctgcccgagccttcgtgtccctggggtctgggtgactctgttcctgggttatggctggcacacaggccctgctggtgtcccagcagcagcccccaccccaggcacctggatggtcccttccattggcctgagcggtgtctgtgccatttctgccaggcaggtgctgagagcagggcagggcaggctcatagcctggtgggaaaccccaaagttgatctggccgtgaggctgcctggaaggtggggtgcagggggccagctgtgtctggagcccacggggtccccacggaagccacctgaatgtgggccgtgagcagcaggactctggcaggactgggtctagcacctctccgtggccaggcttttgtgttttcctgtcttgtcgtggaatagttctagtatctacaaaggaagagagtgtcacgactcagctcccggcatgcacaggcagatctgggctggtttcatgctgctttctggcactgtgtcttcctggccaggggagcccgtccctccggggtccagagtcctctcgcgatggcctcggcagtggtatccgtctcatttctagggagtccgttttacctttcctttgttgcttctggaccttgagccatagctggaagaactcacctgtggtttcctccagccctgaccaggttaactgtgtgtgctccatggtggctgggagtttcctgggtaagtggtgtgaggcacaggcctgctgtcactcttccctcgtcttcccagttctcccagcactatgttttccacagtccatctgtcctgcctgactggaggggccgtcttctctgtaaaccagacgtccagaggcagtaggaagggtctgctttggggtttttctattctgtcccactggtctcctggacttttcctttaccagggccctactgacttggtggtcccggtactaaagtcaatttcatgatgtcactttgtgcctcggcagggctttctttttcgggggtttcctggtggcgcttgcagccttgcttttcccagtgaacgttgccatcaccttatccagccccgggaagaaactcgaaggccgcgggtgaataaactgggggagactgacatctcggtggtctccaggagcatggtgtgtgtgtttatgggcagcattttatggtttcgttatgtagattgcaggcagtttaagtctattcctcatcataataatattgagagaataagttgttattgttgccatcacatagggagtttctagtctatcatgttttccaggcactttcctggcgtctgcgaaagctgttaatttctgctacagcctgtggtcctgctacttctcgtgactgtggtcgtagaagtttttccctctgtcctttgcatcttttgcgtttccagataagggatgcctgccaggagggcagattgctgcttgggtctgtccagagctgggggtggtacctgcggccagcggggccctcctggcttctgtgggcgggccggctgccaggcggggggtgcgcacctcccgtgctcaggaagggtccttcaggtccgatgcctggcgtggttttacggtgaccatgtggattctggtcaggggtctttcctgcttctgtgaggtgctcctgtcagtgaggggccccccttgccttcctggaataaacccccttggtcctggcgtgtgagtttcatgtcctatcacattgtactctcatgctttgttcagacttttgcactgccctgtgaagtggggtgtgtgtgtcatcttgtggtgccatcttggttggggtgaggccgtccttcccccacagggcgatgtccaatacccttggcagcatgggcctcatgttttatggggtccccaaggtacctgcccaggatccccaagtcctcctcacccaccacagacctggctctcagatgagcacccagccaagtctctggccatgtctagcaggaggatgttctgccccggccaactgacagggttggctcaactgcaggagtgggcacggcatgtcctttgctggttctgccatggggcgggtctgtggggggtccctgacctggtagttgtccctggagggcctggggccaaggatgccagtggttcccaggctgtgagagccgcgctgccaaacattcccctggagagtctccgtgtgaggccctttgtacctctgcaggtgtgtgtacatgtgtgtatgtgagtgcccacatgcacgggaatgtgtacacgcatgtgcgtgtttatgggtgagctgtgtgcttaagtgtgcatctgtatctgagtattatgtaagtgtgcatacacatgagcacgtggggactttcacgcatgtttggctctgtttcaatgtgtgtacatgtgtgcacatgtgtatctgagcgtgtacatgtgtgaatgtggccacatataggcacattgtagtgtgcgcctgtgagcatgtattgtatgtttatgcatggctgtgttgtgtgtatttatgtatagctatgtgtcgctgcgtgtgtgtacctatgtgtatgtacgtgtgttcatgcctgtgctgtgtgtgagacgtgagatcctgcctgtcccgtccctcacgtactaacctggatctaggtggttagcccctcgcccccaggtggcctgggacttgcctggttttaaatggagccccggtgctaacgtgagcccacccaggtgctcctgcccagccagggctgtctgtcagcaccacagcgtccaagttcaggtcctcacttcctaggtggttatctcccaggcagctgggagggcgaagcctggagaagcctgcacccaggccggccctgcagggaccttcagacgtgccctgggctccacatgcccgtctgcagctcgagaattagacgtgttctgggctccacatgcccgtctgcagctcgagaattagacgtgccctgggctccacatgcccgtctgcagctcgagaattagacgtgccctgggcttcatgtgcccgtctgcagccctagaatcaccagcagcaccccaaggcccccatgcggcatctaaaccaggcaggggacaggggcatggagcagaccaggtagggttgctccctaggatgcagccctgcccaggcaggagggcagaccctacacagtgctgagctgtgcccccagggaagcctccaagatggtcctcatcccagcagccctgcccactgtctgcgcatccctggggtctgtgcgccacctggtggctatttgctgaactgtggccacaaacccctggtcagcaggaaccggccctttcactgccctgcagctccctctcctccggggtggcatggcagagaagcagcccgtggccccaagcatagagccccctttctgctgtagtcccccttgcagtcccctctgccttttccactgcttggaaggcagagagaccctggccgcctcccttgtccctttatctgtcatgccagctgcctccctgccacaccttgcgtctcaccaggcaaccctgcaaacagcagctggggaggactttctaagacaaaaacctgatcattccagaagctccctgtgacgtttaggctacattccccaaggtggtgccacgttcaggcccatcacctgtaacactacccaccccacctcacccagcctgggctcactcactccaggccaagccttggacattcctggctgccccagggcctttgcaagccctcttctctggacctggctgtcctcgggagtgtcagcactcagcctcttgtcaggtttcaggcctctgcttggcactatcctgcacaccatccccgccgacctgccctgttctgggttcatggggctctgggaggctcacaagcatctgtctgcctcaggccattccacactccctgagggtgggaccccgtggctgcgctaaccccacaagctctgcatggcgcttcctggccgtgcatgtccctccctgcatcaaatgcataggccagagttgcccaacgaggacgacccagcttggtatgtgctcccggcttcagctgcccctgagtgatggagacaccctcccactcgccttgccacacttcccagcagtctctcgaagcactggccgcgtggaaacaaatccttcaaggggatttgagggtccaactgtcactcagtcatggccatggtgggggcacgttggggacacagcagagagtgaggcagccgtgggcctggccttgacaggcggatgtacagacacatcagggccgagactgaggcgtgggctctgggtggggagacagtgaccacttgcttggaggagggggcgctcaggtgggaggggcacagtgagaaggaggtaagctggtgctggcggggcaggcagggacccctcccagggctcacagcttccagcggacagcaggcacagggctgtggggatcagagcacaggcagaagtcacctgacagcaggttcccgaggcttcaggcctggaggagtgaggacggctgttgggttcttgattccagcagagggaggctgtgcagggttgcaggaaggacggttgggggcgcttcggggaggtacgagaagcaaaggtgtttgcggcccttggggccaggcggcgggaaggcctgtagacgccagagggcgctcgtgctacatgcaactcaggagctgctggcacccgccaaggagtgctgagcgcggggagcccaaaccacagccttggggaacccaggaggggccgggcgggtgcaggacccgcatgagggattccgagagcacgatgtttaaatgttgggggaaaaaatggatcaaagcgatgtgttcccagggagcccctgttttctcgtttcttttcgtacgcccagctttgcagtgccagaaagctgttatctcagcactgctaaggaaaccccagcgcggcctcggagggattaggcattctgctgaaccagggatatgcggtgggcctgaaaaagccatttcgggaggaatctggtctcggctggggtccggccggcaccgtgaacaccacgtgaacaccacgtcggaaatctgctgggcagggagatttcctcaaggcctcccagggaggagagccacttcctgggctgcaaagagggccccaacctggcttctgaattcagagggggctgtgtgtgcacgtgtgtacgtacgtgcatgtgcacgtctgtgtacccatgtctgtggaagtggcacacgtgtgcatgtgtgcactcagtgtacgtgtgcgtgcctgtgggtagctccgtgcgcacatgcgtacacatatgcctggtgtgtgtgtgcacacgtgtgtctgacgtgtgtgtgctttgcgtgttcttgcctgggaaggagttcccggtttgggtggctctcctgtttcttgccgaggccagctgctgctagaaactggccccctgctctctgcagtaagagaccctgccctggcccaggtgagggcctggcttttgtctccaggatcacagcttttgtcaaactccacacaaagagagaggcactcaaaagcacaacacaaacacggctagtccgcgcctttggtggtgaacataccagggaattgtcctgcaatgcctgtggttaaaaaaccccgtgagctgcggccccggaggcctaggggatgaggtcatcgctgcggcttcctcccctctgctgaggctccctccgccccgcccggtggcccacccctcccgccagctgcagcctccactgcctgggtttctgctgcgccttcagcacacagcgaggcctcagtttccctcccagctcagagcaaggcctcagtttccctcccagcagcaaagtgagaccctgtagggagtctctgggcctccgtgacggccctgggcggccctctctgtggaacaaggtcgggtcctgtcctcagcgccctggcctccacttgctcagggcgcccgcaggcccgcaggtcctcacctggtgtttttcacctgggacccgcagctgctctgatgaggagcctgctctgcgcacggcctggggcggtttcccgcagcaccatttctgccgctgccgggaaaagacgcagagcaaaggcacctttgcccaggttggggaaccagtgggtgactcaggattttcctccacccaccccgaggtctgactccctctgcagctgccgcccgctgagggttgtcttcctccctgcctgcctcgccctgcctggtgagctcctatgggtctgacgaagccccgtcctgcacacttgcttcgggggcaactccccactagactggttgcccagggacgggggtacccactccctcctcagggctgcagggtgctctgggaagagttgtgtccctctgtgggcctgtgggctcacttgcctttttgtccctgtcacttgggagctacccagctaagaccggtccccaccacccaggccactctgaggcttcagaacgcggtcgtcttctccctggcagggttgtttccgcctgcatttgttcagccagcaaatctttattaagcacctactgtgtgccaggatctatgtgcaagcagcccatgggctcatgaaaggcagagctggactgagattccgcacccctgggatcctcactgcagggccctgtgtatgtgcgggctggagccctggttcctgtctgcactgagcccctggagctaggcccagaggacttgacagatgtgggccctctgtctgcacagcccccagggcacggggtggcctgcagctctgcccagccagacttcaggtcactgccccatgagcctgtaggagaaacttctcactcatctgtcctgagacctgcctggagcccaccccagggagacagaggctctcggagcctgttcagggtgaaaggacgctagacactggcctgcaggctttgggcgggtaagggtagcgaaggtgaaagtggaccaggggcaggtggagcagggtaggcccaagtgtctgtctggggcagctggggacacccaggtgggctgaacttcagctgccacccagcttcagctgccaaggctcctcccgggtcagggtcgacccctgatgtcccggcaagagttccaagaacaaaggctcagaatccaccaagcggaacttgaagccactgccctgtggggacaggagaagtgacttggccggctctccggagcccagtgttgatcactgaggaccaccggatacaagtccctcctgccttcccctttagtgacactgaagctgttgaaatccccatccaccaggagctcctggtcctggggagccctgtgcaacccactcactgcctttcagagccctgtggcgtctctctcatgcgctggccgtagagcttcctgaaagcatctctatcacccactctgcacctgagagagggcggtcaggtgactggtaccccctgaagacctgggaccaggccccctgcctctgggaatccatcaaaatgctcccttctgaggccgctttgctgggcgtaggatcagccttgctttgagggctgtttaggagaggaaccccggcgctgctgctccccggaggcagccagtgcttgtgatgggcaccctgcctccagtgttctgcttcagggtgtgggatgcacagctgggggcaggggcgctgctgaagccacagtctcagagcctgaggcccacggggcatggcatgaagacccggtggttctgttcccccgggacagccttggtccagcctcactggccacatgctctgccgagcacacccgctgctgtccccagccacccagccccatgcacaggccacgcggcgacaggggctgctgaaggaaggctggtccgctccctgcctgtgacaggagctcaggctcagggcagcaggggcgctcagctgggccgcggctccacggtgttaagggattctagaaatttcctgctgtgccaggctgcagcagagactccggccccaccaggcttcctgtacttggtgataaacacaccatccgcactgcctgcggctcttacaggaatctctcgtgcaccattgctcaacccccgagagttatggaaggaagggaggctggggtgggtgccccgagtgccttgttggagtggaggctggcgctgccctgccccacagggtggctggcagggctcagcagttgcctggcctgtgggggcagaggacctggggagacatgctgagccctcccagcgagacactgagggtcgggagggtaacatgtgattttgaggccacccgctacagcttcttgggacctccttctctcaggcgggtctggaacccaacagagctggtttgggccacagcagtggcttcccaggctgggcttcaaaaccggacacagggcgtggctctccctcccagcctgccagagggaccgctgggcctatctccagccacgtgggtcgcgagagtcgacctgggctgcgtgatgggggaccccaggctgggcggcttaaaccgtggaggtcgccctctcacagctctggacgatggagggccgagacccaggtgtgggcagggctggttcttctgaggcccctcccggcttctgagggtggctagcaactgtcttctagatgtagtaccccaatcccccccagtccctccctttacctcacagggcatcctccctgcgtgtgagtctggagccaaatttctcctctatgtaaggacaccagtcttactggattggaggctaccctactccactgtgacccccctcctaactgatcatatctgcagggaccccatttccaaacaaggtcttactctgagtactggggattagggcttcatcatatgaatttgagggcaacccaggggtctccaaaccatggcccacagggtggctccctgtgtgtgtaaataaagctttattagcacacagcaccacatacttgagggcctaatgcctctggctgctttgtgccatggcagatttgagtcctgccatggagaccatgcagcccacagggcctaagatttctactacctgaccttccaggaaaggtttgccacgctatttatttagcaggataattttggaaagagcagttgctaggggcatttaaacttgcagtcgaattagtaacaattttattttttgggaaaatagaagtgggagagcgtgtgccccgggccagcccaccgtgccccacgtttctacagtgcccaggttggcgcagggccttttggttccacagtctgtgtctttcttcctgggtgtctgaattttgatttaatctcaggcttgtcagaacgagcagctcccaggcaccctctgccaggtcagcagtggctttcatcttctgccatttgctctgcacgtttctctctatatgcaaaaacctatatgggttttgtggggttttttgttgttggttttttatttttatttttttgagagagagagggtcttgctgtgttgcccaggttggagagtagtggcatactcacggctcactgcagcctcggcctcctggcctcaagtgttcccacttcagcctcctgagcagctgggactgtgggtgcgtgccaccatgccccgctaatttttgtattttttgtagagatagggttttgccatgttacctaggctggtcttaaactcctgagttcaaacaatcctcccacctcggccaacccaaagtgctgagattataggcatgaaccactgcactcagcctgctttgtttttatcctgagtcatttgagagtaagttggaggcagtatgaccgtttctccgtataaagcccgtgtatatcctctggaatgaggaccttcaacttagccagggtgtccgactctcaggacaccgctgtccatttcacagcctgcatttaaggctcgtcactggtcccagtgagtgtggctggttttttctcattgcacatggctgtcacgcggtttcagcttctttgacctggagcagccctgcccggccttcccttcttggtctctctcttgggcagggaagggcggtggacatggaggcttggggacagtcccctggccccacggatgttgtgtggacgagttggagggctcacaggcccctccgtggggcccagggcagaggcagcaggcaggctgtctccaccacgatggacatcatttatgccccagccaggtcccctgtcccaggaccgcggttgacagggtttggattggctgcgttcctgtctgaaggcagctgcttgggaggaggacagctgacattctttcatgcgaaatctgcttgcgggagagtcgtgaaagtgggaatcctgggctggaaccggaacgttccccgagtacataggaatcctgggctggaaccggaaacttccctgagtatacggggccttgtgtgtggaggggccctacggtgaatcgttttctgtaacaaaggcttcctctgtgcagcccacacacgggcctcacgttatcttctgcaggccagaattgtcatatatatcaagtttgttcagaacaagatggggtggggtggggggcagtgaggggcctggggcaggaggtagaggaaactgcaagattttttaaaccttctccaaaaacacgtaacccgattctgtccaagcgatttgtgagaatggggttgacacccctgggctggaacctgggaaccaccagtcagcgtctttcctccagggaggctgtgcagagggaaggcagtgagccccacctgggtttgaggaacctggggcttcaagggaggcggtctcagcccatggtgctccggccaggggtggggcagccgaggcatgagtggacgatgtcccgtcggcagcccgtggtccctctggggggcaaggtgcctgttccccattgctcctccaccagaacacctcctccagatctccgccaggtgcgccccctgaaggaaaaggggatgggggcctggctcgtgcctggtggcaagtcctcttgggccccagaaagaccccataatggccaggtagaagctcctacctgctgctgcctgaagagtctggggccctgtcggctggttccatcgtcttccctgttttcaagctacaggagcgcaatctttccagagcattgagtggctagaggaacgggcttacgctaggcaggcgctggcatcttagacaatacctgacatctttgcgggagctctggtgagaggccccacaagcgtgtgaccctgtgcggactccaccgcggcagcctgggagccaagccgatggctgtgctggccgaagggaacaccgccatggtgctctgctctctgcagccctgggtctggttggaagttgcatccctggtgaagggcggccgcggctttccagctctcccaggccagttcccgtgttttctctcccgccttccccatagtccaggacaaaagtcagaccttggtggggggtgcgcctgctgcaggggcccccaggcttctccattcgggtttagtgggattagagtgtgcggccatggggacaggtgtttcctttatgttctgcctgagggctggaaagagcctcatcagtgagtgccacgttcggtgggggtctctggtgcaggggagccggcgggccgggttgggttatgtccttgttttcacatctgaccctggccagctggagagcctcgcttgaagcgcagggcagcagctgacacaacacaacgggaacgggctgagcaggccgggcgcaggcaggcttgggggagctggcactggcactgcacgtggggctcctagggggctgctagggaagtcattgggggataataggatccaccctgtggggcccactggccatggagtactgcacagtggggtccacccgctgtgtccctgaacaaggaggtagcctgaggtctcctctgacgctgggcagcagcctggggaggaggctgggcaggtgccaggggaaccccctagagggcattacattcagatgagttctaattatgttcttggcttcccaggtcacacagagtgaaaaccagaggccctggccgtgcaccattgaagtgtgtcatcatgtgactttgcaggttggggggacagggctcggtgcggcctcacggggtcaggagccacggctcgagcacctcggatcccagccccctgttcagggccaggcctagacagctcttcccacgagattttctttctcccgggtataaaactggccaacgggatgcctggtgggatgactggggtacctggggccaggggcggccagcagcctcctcagtagcttgtgggagatgctctcaaccccaaggtcagctccagctggcctcaggaggagtggatgttcccttcaggtgtctttaggaccctggcaactggggacaatagtctcctccccaaatatgcagtcttgactcctggccacttgggaaggtgcgttctggtcctctgggcctcacagctttgtgccctctagggtggcaatgggaggcagagagcacagcctggggacttgctgtgaggggactgcatttagatttttaggtgaagccaatccctgttgggctgagaaaagtcctgggcggctgtgagctggtggtgagttttccagacttggtcatggtcaaggtagttgaagtcgggggttgaaaaacacactcgtgtccagcccagatgccttatggagaagaggatgcacaggcacacacgcacagacatatgtgcacggatgggcgtgtggacgtatgcacacataggtacccatgtggacacactcacgtgtgtgtgcacgttcaggctcagacacgtgcctgcatgcacacgtgcacacgtgcacacccagccctggacctcaggcaggcagggagagagacccccttggggccgcgttccatttgcacatttaatccagaaactgtcagcatgggaagcctggatgagaacaaaatgtcaagtgtgtgccgagaggcgcaggccagccccttttcctggcggggcgatgatctggtcagtttccgagcaccatgtgctgagaatgatgcgtgcattcagagcagcatttggtggggaacctgggggaagggcgggcgtctttatttcattttagctttctttagcggggcctgtgtctcttctcactgaccgttttctgaaactggctggggagggtcagggatggctgctgtcctcgggggagggactgagctgggcccttttcgttggttagttctcagtgtggcctacccagccaggtccctggacctggcggtggctatgaaagcctgggattgaggacaaagccatggggacgccgttttcgggatgcttgtgagcagggctttgtccccaccgttaggatactctgaacgttcccagaaagcccccttctgctcaagttctcttgcttcatctcaggctcaggtgttttgagttttttttttttttttaaatgaggacatctgttagaccacttaggagttctagaacctttggaaaaccccctctcatcccgggagtttgtaagaatttgtagtttctccccagagttcatggagcccctgtcagaggcgctgaggcccaggtcctgtggctggtcctcgcatagacatcagctaagggggtttgggggccagtcggcagcctctggaggcctctgcacccctcctgtgaaaggccggcgcagagctgcaccgtggggtcccctggcttggggtgggcctcagaggctgtcgccgtgcctgctgtggctctccatggccctggagcctgggattgcagaaagactcccagaccttgctggggaaactccaggatatgggggtatccagactcctgagacttccccgtgggtccacacacgtcaccaatcctctctgcacctcagcttcctcatgtgtgaaattcaggtcatatcaggacctcagttcctggggctgtgccgagggtgtggggacattgggcatgaaggttctcagtccagagccaatggccaagagggcaaaagggtgttggtggacgatgcctcctcccctggcgggggcggggaaggaagtgctgggggaagccggtgtaaggggccccgtgcccaccaaaggcgcgctaattgcgaaggaggggcctcagccaggaaccgccatagcctcagttttatttattctgctcactcaaacaaaaaatcagctttgttgaggtataattggcatagagtggaaggccttgtttaaaatgtaggatttgacaaatctggacatgggtgtacgccacaggaccatcaccacaattgagacagcaggcacatccgtcacccccagaaggttctcgctcccgtcgctggcccctcctccgctgctcctggctccggaggggacccctggtctgtcttgtcagtgtagacggttggcgttttctggggcttgttgtcagtgcaatcatacagtgtgtggtttttattgtctggttccatatttgagagtcatccaggctgtggcatgtaataattcattcctttttcattgctgagccgtatcccattgtacggacgcattgcagtctgtttatccacttgtgtgctggcggactctgtataaaagtgtttgtagggacttatatttcctttctgcatgggtaaatacctaggtatagaatggctggataatgtggtgagtgtatatttttaactatttaagaaactggctaactcatcaacccttgacgtggtccgtcattttcatgttagccagtctaagaggtgtgcgtggcatcctgctgtggttttaactttcatttcctaaggaccagtgatgttgaatatcttttcacgtgtttcattggcatccaggaaacatctttggtgacatatctttttaaatgtttcacccattgtaaaattgggctgtttgtcatctgagttgtaaaagttctttgtatattctggttacatagatatttgttttacacatgtattctctagtcggtggctttccttttcatttatttagtagtatcttttttttttgtttgagactgggtcatgcactgtgctcaggctggagtgcagtggcgtaaacgtagctcactgcaacctcgaattcctgggctccgaggatcctcccacctcagcctcccaagtagctgggactataggcatgtgccaccacaggtgctaactttttaaagttcttgtacagacagggtctcactttgttgcccaggctggtgtcaaactcctggcctcaagcaatccccttgcctcggcctcccaaagcgctggaattacaggtgtgagccactgctccaggcccaatagtatcttttaaagaccaaacattttcaattttatgaagtcaaatatagctttttccttttaaatatgtttcatgcttttcacattctatttaggaaatgcttaccaaacacactcttactaagattttctgctagtagttttataatttttgtgcttacctttaggcctaggatgcattttgagttaatttttctctatcatgtaagacataggcggagattcatgtgttttttcttatggatgactgactggtccagtgtcatttgttgaaaagagtatcctttacccagtgaatcatcttgactccttttaagaggttcagtttatcataaaattgtctctttctggacactctactgtgatccgttgatctgtccttttgccagtcacacactgggattgttacagccctataatacggttaaaataagttagggtaatttagccaactttgttttgctatttcaagttgtgttggttgttcggggtcctttgcatttacatataaattttggaagctgcttaccaatttttgcaaagcctggtagaattttgtttgggattgcattcaacctaaagatcaacatggggagaattgatgtcttaaccaatattgaatcctctgatcaatgagattatctatctcatatatatatatgtgtgtgtgtgtatatatatgtgtatatatgtatatatatgtgtatatatacgtatatatgtgtatatatctatgtatatatatgtgtatgtatatgtatatatatgtgtatatatatgtgtatatatatgtgtgtatatatatgtgtgtatatatatatatggttacatacctaatatgtatatggttatatatctcttataagggttatatatctcatatacatatgaggttatataccacttatttagatttttaacttctgtcagagatgtttcatagtttttagtgtataggttgtacatcttttgagatacctaagtgtttcatattttttatgctatggtcaatggtatttcttctaatctagaactgaaattcattttgacaaatttatcttgaatcttgcaacctttctaaactcatttgttccagtggcttttgaaaaaatgaattccattgatttccttatatgaatgatgttttctgaacatagagacagttttacctctttttttcaaatgtggacgcctatttgtttctttttctggcctgattgcactgggcggctcatccactgcagtgtccaatacaagtgaacactgctgtgtccccagccttagaagacacacatcattgttcaccgtcaagggtgatgttggctctgggtttccatagatgtctttaccaggttaaggaaacgtcccctctaatactattgctgagagcttttaatatgaatgggtgttaaattttgtcaaatgctctttgatacatcttttgatatgatcatgtgctttctctacttcagtctcttaatatgataattacactgattcattttcacaggttctgtattcctggataaaccacacttggtcatgctctagtattctttttgtatatcattggacttgacttgttaaaattttgctaacaacctttgcatctaggttcatgagggatattgtctatatattttcttgtaacgtctttggctttggtattagagtaatgctggcatgaggagtgagttgggaagtgttctctctcccttttagaggtggagtttgtgtagaattggtcttatttcttccctctgtgtttggtggactccatcaggaaagttgtttaggtaggcctggactttgcttgatgagaagattgttaactagattttaaattgacttaatagttttattcaggtgattgataatagttatattcagttgattgataataattatattcaggtaattgataatagttatattcaggtgattgataattatattcaggtgattgataatagttatagtcaggtgattgataattacattgaggtgattgataggtgataattatattcaggtgattggtaattatattcaggtgattgataattctatttaggtgattgataattctattcaggtgattgataatagtggtattcaggtgattgcttcttgagtgggctttggtattttgtgtatttgaaagaatatgttcatttcatctgggtgttaattgtattggcataaagtttttcagaatatcctgttactatcctttaaacagctatagaatttgtagcaatgtctcttctctcattcctgatactagtaatttgtgcctctttctttgttagtgtaatcagtcagctaaagttttagcaaatttatggatctcaaagaatcagcttttggtttcattattttttttctttttggttatttgattaattttaattattttattctgcctacttagttttaatttgttcttttttttctcgtttcttaaggtggaagctgaggtcattgaatagaaatttttttttcctttctaatacaggcacttggtggtataaacatccacaaattttgtgtttttttatcccatttaaaatattttctaatttcctttttaacttcttctctggtgtatgcattatttaaaagtgtattcaaaacatttagggattttcaagatacctttctgttactgatgtctaatttatttatggctatagaaacacttaatataatttggtctcttaaaatatattaagacttgatttagggcccagaatatgatttatcttggtaaatactccattgtgtgcttggaaagagtgtgtactgctgttgttgggaggactgttctataaatgtcaatgagactaatgtggttgatgatggcattgtccaagtctacatcagtaatgatacatccttactgattttgtatctacttgttctattaattcattcttgggagaaggatgttagaatctccaactgtatttgtggatttctctcgttattcttcagttctttattctttattagttttttgtttaatgtattttattttttgcttttgtcatttaaaaaattatttacattctttatttttcatttttgtggatacacaatagttgtacatatttatggagtacatatgatatttcaatacaagtataccatgtgttcaatgtgttttgaagcttcgttcttgggtgcattagcatttaggattgttatgtcctcttgagaagtcaacacatttgtcattatgaaactgcctctttatccctggccactttctttgctctgaaatctgctttgtctgagattaatatggctattctggctttttctttttatcattgttagcatggtatatattttactcatttactttcaaaccatttgtgtctttagactcaaaacttgtttttcatatgaagcatatagttgagtcttattttgtgagtcaaactatttttctcctgaaaagtacagctaatttgcatttattcataggactgacattcttggtctcaactctgtcattgtcttttataattacgtgtattttgtcacggttgctgttgtagttttctttacaatatgtgtattattttcttttaaaaacatttgggtaattaggaggttgtattatttatttatttatttttgcgaaacagtttccctctgttgcccaggctagagtgcagtggcatgatctcagctcactgaaacccccatctcccagggtttaagtgattttcgtgcctcagcctcccaagtagctgggattataggtgggcgccaccacacctggctaattttttttgtattattagtagagacggcgtttcaccattttggccaggctggtcttgaactcctgacctcaagtcatctgcccgcctcagcctcccaaagtgctgggatcacaggcatgagccaccgtgcccagcctgtatttttgtcctaatagttacctttatacatatgcctttcaaagtttccttggtccctggtttctcatttaaccctttacagtctggcttaccgtttttattaatctgccttaacttctacttagtgcctataccacaaacaataagctgactccatttccatcttttataagttcagacccccacaaccttgggtggactactgactacttcgcgggtaagaaatggtgagtggcatggaaggggaggggcggcagttctcagtggagcggccgggctgcgagtctctgtatggaggtgaaggtccagatgttggggtttcagggtcaagcattcctggcagagagcatggcacgtgccaagacccggatggggcgtgtgcctggcgcgggtggagggagctgtgaggagcctgtagcattcagagacaggggagcagggagcggtgggggatgaggtcagggaggtggcaggacctggcgtgtgagggcttggggcgactctggggagttagggtttcgctctgcatgacaggagcctggggcctggcatggtgtgactcagacttaacgccgcccctctgactggtagaggccaggcccaggataaggtggcggcaggcaggtctctaagcagtggcagctcagacccgaggtcccagggtcatgcgtgtttgtcctgattgcacgagtcgtgtgagcacagaaacgtaggtggaaagatggtggcttcgtccagggaggtagactgggaacgtcttttgctgcttcccttggattttgtttctcaaagtctgaatcaagcgtggcagaagaaaatacagcagaacatgggatgggaatatccatgcgtataatcggtcaggttagttgctgtattctgacttatttgaaagatttcatagcgaacaaagaaaaattccggtataactataatttttccatagcagtttatattccctttctcagccttgtaggtgtaggtggagtgtcctaagctctgggggtggggggacacgtttacgtgtctgcaaaccgctacattctgctaagacatctcaggagcccgccaagcccttagtgaaaagtttcttaaggcggtttcataggtgcgtgtggggctgttggatacagtgacccacttcaaggtgacatcttcttcttgcatctcagatagcaccaggtttgtgtgtttatgcgtgtgcacacacggtgttgggctctggcggtggcctgggggtgcttaggctgtgcacaaatgcccacgcacgtacacacacagacacacagcctgacttggcccaggtgggtgggtgtctgaggagaagttcgccattgtcgactttggggtaaagtgaggacctgtctggcgggaataaaggggccctactgtcccccgaataccactgccccagccctcctgagcccctgtgactgaaaaatcctcactttggaggatgtttggtgacaggtgctggggcccggacacgacctggtttcttcatcccaggggctgtctccagggtgggttctagagtacatccagcttccacccaagggagagtggctgggtggagagggggcaggctgagatctgagaagccaggctagggggttgtggagcaaatgatgatgtctcaaccatgtggctttaggtccccagcacgtgctagtggccatcagcaggctacagcatccagccagtgccaccaggagcccactggtgccaggatgctggggtggggctatggggaaggaagacatgtgggccagggtgcggggtgcgggacaaacctgggtccaggcacctggggcgaccctccttggccgtccttgccatcctcgccatcctctctccacacatctgacctttgcctgctttgggggcagtttgaggcctcagattttctacctcaaagcgatggaacccagaagacatggggccctcgaggagggtcccccgggggctgcaaaagcagagggagtggagtgtcaccgggtgtcccggcgtgggcaggtcctgttgtggagcctcgtgacctgctcatagcacagctgggacacttccagtgactgctcttcgaggcccggggtaggggggtgggggggcctcctcctcccaagcacctggggtgggaacaagaggcgttttgtgttctgcgtgggtggccctgggctccccaggcctggtgtgggggtgcctggggggcagtggacgtgagcagcagcacgtggcccccagtcatgagtaccccaggcccctatgcgcctccttccccatgactggccctgggtggcggagagacccctgggcaggacacccctccctggcttttccttctgcaccactcaatctgggggttccggctccttgcccaccgcccccgccacccagcgcgagccgcgtagaggagcaggaagggagccagctccacctccagtagacccagagacggggaggccagggtgcaggggactgtttgggcctcgagagggacggaccccagaactggaccccaatgtgcaggtctgggtgtggatgtatctgtatgtctttgcggagctcagatgagagatgctcagagttgtctgtagagaaccagagccgccgagcccggcctggatggacatcccgcaggcagtgcacgtccctcccccgcctctctttgccgttgccgggactgggccgtgtgcctggagtttgaactttcctgatcacggggtgagagggtctttgcagttgcagagccgtggcgtggcgcctggatttccgacacactgcagcatctgcatccttgccgtcacccctcacaccccctgctaaggtccctctgggggttgaatgaaaaggcataggtagaaggtgggagaagcccacgttctgggagcgtcgcagtggcccagacacccatgttcctccctaggcagctccatgcgcgggccccggagctggaaagcagccaagggcactgcccgccctgggagctgatgcctgacatgcatcctcgcctaggccagagtgccaggcagggtaggggaacaaatgccaacacgtgagctgagtgaccggaagagggggcgcctccctgagcaggtgaatgaagggtgctggggtggcgagttgagggccaacagagatggtgtcccggctgatgtagggtcaggggcttctggaaggagcctcacaggaagggcagggcagcaccaggctcagcccaggaccagagcgcaaatagggctggagtcccgagtacaaggcatggacaggagccaggcttcacctagcacctggctccccgggggcccagatggcaggcgaggggtgcctggggaggctgccaagtgaggggggggcacagactgagacagggtccccgtgttccatccatggggtacagctgctcccaggccagactctggcggtagcaggaggcaggggaggctgtgctgagctcagtgggtttggtggggtcatagctgcctctccctctaaatagattaactaaaaagtattgttgactgactcatgcatttcttaggttttcttattttctaatttcttcttttaaatttaggtttgtcgaggtttaagttacatacaggaaaactctccccctctgtagatgtccagttcgatgagtcctggcaaacatttatggtcctgtaaccacccccaaagtcaagatccaaggtgttcccatcacccgaaagctccctggtacccactggcggctagcccctccccgcacctgggaaccgtggacgtgtttcctgtccccatggttttgccttttccagaacgtcatgtgaatggaatctcgcggcgtgtagcctctgcgcctggcttctgtcacttagcataattcatttgaggcccatccgtgtcatggtctctgcattcagcagtttgtctccttttatttggaaaggataaaatgtaccacagtttgtttatccattcacaggctgatggacatttgagctgtctccagttttcagctgttatgattaaagctgccatgaatattgcgtgcagttttttgagtaatcatatgtcttcatttctctggggtaaatccctgggagtgggattgcgggatcatgtgttagatgcatattttcctttcgaagaaactgccaaagcattttgcaaaatggtaggcccgttttccactcttaccatcaatgtacgagcattctggctcctatggattctcaccagcacttagtattgtctgctttttaagctttgcccatcctaaaggctggagccatattccgtcatggtcttcatttgcatttccctagtgacgaatggtgttgggcatatttgccattcatatatctcctttgatagaggatctgtccagtttgttgctggttttaacaattaggttgtcttcttagaataatcatgtgagttgtaagagttgtgtctatgttctggatatgagtccttcaccagatctgttttacaaatattttctcccagtcatggctttgtctttgcattttcttaacaggatctttcaaaagagcagcagtttttaattttgatgaagttcaattcatcagggttcttctttttttttttctttagggttcatgttctttgtgttctgtctaagaaatattcgcctaatccaagattacaaagttttttctcctgttttctgtagaaattttatagtttcacatttcttgtttagatctgtgattcatttcgagtttaattttatatatggtgacaggtatggatggaggttaaatctttctgcatgtggttatccagttgtcccagagacttttttcccattgaattactttggcacctttgatgaaaatcagttggccgtgtgtgtgggttcgatttctggactttgtcatctgttctgccaggaaagcactgtcttgattactgtgacttttatgctaagccttgaaatcaggtcctgttaatcctccaattttgttcattttcaagagtgagctgttctgccagctccttcacattctcatgaatatcttagaatcagctcgtcaattctaccaaaaaaaaaattggctagaattttgattggcattgcattggatatgtagataaatttggatctcatacacgtcttagtaataccgagttttctgatccacgaacacggtctctctccccagtgcctcatgcacgtcttagtaataccgagttttccgatccacgaacacggtctcgctccccagtgcctcatgcacgtcttagtaataccgagttttccgatccacgaacactgtctcgctccccagtgcctcatgcacgtcttagtaataccgagttttctgatccacgaacacggtcttgctccccggtgtcttagatatttttcaacaccactcatcaggattgtgtaatttttagtggtgtgaaacttgctagatttgttcctaagtattttatgtttttgaagctactgaaatgatattgttttctcagtttcacttttggattatttgttgctaggatatagaaatacaattgatttgttcgtatattaaccttgcgtcctgtgactttgctcatgttacttattagtttgagaaggtttcttgttcatctgttttgggggttttttttgttttttttttttttgtttttttgtagattctttaggattttctatggagatgattgtgttgtccacaattaagtcagtcttatttttgccttttcagtccatatactatttatttcttgtttttacttgaatgcacctgacagtgtctgccagtggggagagggctgctatccttatcttactcctaaggtgaagtgaggtaatctttcaccattaggtgtggtgggagctgtagggttttagtagaagccacttatcaggccaagaagttcctcctcttcctggtttgctgggaatagagagtgcgtcaagaatagctgttggattttttgacaagtgctccttctgcctctattgagataatcatatcatttgcaacaatctcaatcaaattctttcttaatttgctagtgtggggaatcgcactgattgactttcaaatagcaaagcaaacttgcttcccttacacaaagcccacttggtcatgatgaatttttattttattttattttatttatttatttatttattttatatgtatttgtacttttttaaattttttatttttttgagatggagtcttggtctttttgcccaagctggagcgcaatggcgtgatctcggctcactgcagcctctgcctcccaggctcaagtgattctcctgcctcagcctcccgagtagctgggattacaggcgcccgccaccacacccagctaatttttgtatttttaggtagagatagggtttcaccatgttggccagggtggtcttgaactcctgacctcaggtgatctgcccgccttgaccttccaaagtgctgggattacaagcgtgagccaccatgcccagctgtcatgatgcgttttaaaacacctttttggatgtgactgacttcggttgtgtgtagaacttccacgcccacgctcacgagggcgtcacctgccatgtgttggctgttgtgtctggttttggcatcagatgccgctggcatcagagaatgagttgggaaatatttcctgctcttcaatttttaggaagagtttgtgtagaattgcaattatttctcccttaaacatttgatagctagaacatgtggaggtatctgggcctggagttttctttgtggagaagtttgccattggaaagtcagcagatacagggctatgcaggttgtctatttcttcttgatgaggttttgattgttcatgtctttgaaagtatttgtccccaaggagcagaagccccagcccaaatttggaaacaagaccatgttgtgctgacatgtcattcctgagcagcttaggggctgtggggtttgcagacctctgaatgcagccatctgcagggggaccctcctcagtgccctgagagggggcctgggctgggtggtctctgctgctggccatcccactgggcactgcctccccagggattctgcaacaggacaccgtaaggggcacgggggacaaagatcagactttctctgtttccttccagctttgctccccagggaggcagtcccttctcagaggaatgaaatttaagaagacaggccctacaatttcacgacaagtctgcttttgactctcccgtttactgtgtaaacttcagccctaaaacaacatacatccttctgaagttgttcacatattagctcttaaaacagcaaaatccgtgcacaatttcctctcaatcccttaaaacattcctgaaagggggggaaaacaactgtttaaattcaccgcctgttattaaaatctctagatttgcagaatcagagtgaggtactcagcagtcagaaaacagactagacaggcccgtgtgcacacacgcgctgacacacgtgcacacacacacgtccacagggcagcctttaataaccgcaggccttcctgtcccaacactgcgcgggcccctgaagggccggtgtgggttgcagctcctcaatctctgctaaagtaaacagggttcaaccctgcggccttctcagcactctccccaagtcaaaagaagggtgctcagcccctggtctctttggtttgccaaacttctagtgctggtgaaattcttaaatatgacatttttagaagcttcggctcctggcagataaaaataatgtcccccgctccacccccttttccccctatcccagttctagctaagacagtgatcagaggggtgcaccgtctttggggttaacagccatcagcagtggggttcccaggctgaaactaaatcctcgtttaactggcctggagacggaaacagccctgcctggggaagatgggggatttgctttaaatacgtgtaaagctgcctgccaggcggctaatggtgtctgcagccaggcgtgggcgtctccgggccatgggctcccccaccacaaattgcagggcagccggcttgggccactcctgtgtgtgcggggccctgggtatgattcctgggaggcagctcccaaactgtggggctcagcagaggattcagggcctgatttgcaggcagccccacctgcctttttgactgttcagagccctgagtgcctcccatatgcccacattttcctgcccctgggccttttcttctggtcatcggcctggagtgcctccactggcacattgagttctgccttcagagcctgggttttctggtggaatggggcaggggtaggctgatagacctcttggagagacagggcccactttcttgtaggcccacagggaccccgcctggggagagagaagcttcaggccctgaggcctatggcctggacctctctagagaccctagaacagacctctggcctggccttgctgatgacctggagcccctgggtgccagctgcagccccctgcctgtccaggagtctgagctccaggtatcagcgaggtgggttcgttctgaggctgtgagggagtgttccaggcctcccccagctactgtggaagggttcccggtcgacgcatcgcaccagaccctgcctccgcctccatacagtgccccccggcctgcaagtccatgtccaggtttcccgtttgataagaacaccagttgtatgggaataggggcccaccctaaccacctcatcttacctaatagcatctgcagcaaccctatttccaaacaaggtcacactctgaggtgtgctggagggtctaggacctcaacatatgaatttgcggggcgggggacacagtttagccggtaggaatacctacctgtcagaggattctttaatccaagggtccgtaaaccatagcctacaaacctggctgctgatctgtataaataagatttgattagcacacggccacgtgtgcttgtgaacatctcatctctggctgtttttgtgctataacagcacaaaattgtctgctggagttgttgcaacagaaatcgcgtggcctgcaaagcctaaaatatttactatctggctttagagaaaaagcttgtcaagccctgttctaaactatgaagacaatgttggaggttgctttctatacccacagagccgttgatggggtgaagggagaggggtgaaatgcagtcacacgcaaattcttatcttcctgaggagaaagccttagggagcccactacagtggacactgtctttagagagtagcagacctggctgtgagtttgaggaaccagtgaaatgagagttcagtgacatcctcaacttcatgaggatcagaacatggataacatgtggctcaactaaacaaccaaaagcaaaagggagaagtcaacagagtcaaatagcaaatataaggacagaaagagtcaaatcaaatgcctccaacttcacaccaaatgtaaatcgcctgaattcctctttgaaagacagagaaggccgtgccgtagctctgggcttttatcttttaacaaatacattgctcagcagcattaagtaaggcaaagcaataatgggtggttgaaaaataaaggaatggccaaagagaggccaagaaactgcaagctaaaagaagaaaaggagagaaaaaacagggagatcaggatgaatatcaacactgaagcccaaacaagacaagtgtgaatgagatcaggcactattagaagacctgactgtaatctttaaggcatcatacaacataaaatacataaagcaaaaactattgaaaatctgcaaggacaggaaggttaaatatgataacgggaggagattttaatgtacctcttttggaataggacagttctagtgggcacaaaataagtgaggacatggacaggtaaatgttgtaatcatgagcaatttcagattctaacagtaatttgaaataactcctgttcttgttatctatagccatgtaacaaaccatccacaaatctagcaccttcaaaatacgcatcacgcctgagctcgctagcctacagtctggcagggctcagtgggacggctcatctcccctctgcatagtatcagctggggctggagcctccacagcattgcatctacatggctggtaaggctcctgttcatgagggcttctccaaggctgcatggattcctcacatctcagaaatgaacagtccaggagacaggcagtgccagggactgagagccacctggctgtattctcctgatgcaggtgtcacagagcccaggttcagttggggaggactggcaaagaacttcataggactgtgctttaaaaccagcactatcacttcgaaccctagtaatggagttgttttgttcccttatgtctgcggaacacttacaaaaccaatcattcatgtggctacaaacaaatctaacctacctcaaaaaattgagatttaactggccatgttctctgatcaaaacccaatatcatgagaaataaatgattaaaagattggggaagaaaaatcccttacctatttgggaattaaacaacactctcctaaatagccagaaagaagagattgatgtgggaagtgcgggccctgtagggcgttatgagacgtaggccccgctgcctgccccagcccgtacatcactccagctgccccccagcaccaactgtagatgcttttattttgtaaattccatgccagtgcccacatcgcttgctggtggcttcactgtgtttgcaaatgttgtcccccacgtggattgaaattcatctattgcctgaaagtaatgaagtatgtgccttgcacactgtgtaagcatacgtgtttattcagtgcgtcctgggttctcaccccttgccaggtgatgggttgattcagtgtgctgggggtctccaggcgggggggtccacatagtttttgcttcatcagaatctgctgataagcccagttcggagcagagactagatgggccagcctgtgggcactctgcctagcgccatctgcctctcccaccccaggcaggtgtcaggtggctgctgcgccctgtgtccgcctcctgaccttgagaacacccaggtgggggaggaagtgggccgcgcttcgggaacccccaccccgccggcttgcgcagcgagctgggtcccagggctggaggcacctcattaaaccgcctgaaacgtgtgtaactctagtcggcccccgtaaggcaccggcagtacatgtgaaattaaaattactgagaggccccactctcctcccctccatgggtgggcagccttcatggggaggccaaggcccggaagccggcagtcctgggaaagatttggccccaatgataatgggcccaagaatgtgctaggcccagggtgtggtccaagttcctttcttagctaacccctccaccctgagaagcctcccccactacacccacacatggggccagctgccttgagcacctcctgctcagacccaggtgaggtacctgagtgacaaatgtcaagagtttgcagttactcccagagctacggacaaggggcaaggtggggctggaggcaccggctcagcaagaggggtcacttgagccttggcctgcagggaggttttgctcaaggagtgtcccttgagcaaaatattgcactttcgttgctctctgaaagcctaccaggcagtcttcccagaggtgcttcccgggaagcccgtggagaggatgcattcgacacccaaggccttatggaatcagtcctggggcctggagggtcgtagagaaatgtgtgaacatggctccccttaggccaggggtagacgcaggcacagggaggatcaggaaagccctggatcttgttgacaccccgggatgtgcccttgtggctacttagacgtagagcccggggcagggggagggccagcccctgtggttttagcctcctgagagtctccccagacagcccacaggggacactgggcctcatgccgcctgtcaggatggtgtccgggatgtggggaccagacgacagctgtcacccacttgcagggcccggctgcccggtggatgggaacggccatccccatgacgacccagcaagtcccttgcctctctcgctcaccaggaagaagacacgtccgggcagctggcaggtggggctagttctggagggaaagcggcctcgtgcctcccagagtcaccccgaaatcattaacggggagacaagcacacagagcagctggccgattgcagctctgaaggtcagagatggccgccagctgtgggaaggcctgtggctagggctctgctgcctgcttcctgggcaggggctccttcctccctctctgtctctggggtcccatgggaagtcagggtggggcctggtgtgtggcttccgctggtttcctgggtgtgtcttcctgcagggccaggacccccagagtgttccagtgacttcagagaggggcagccagaccaggaggagctccagaggtgccctgtggggagaggcagcgtcccaaacacgggggagggggtaccgccagcctggggacagatagcagcatctcagccatggggggccgtgacatccggtcaggagggggttagcatctcagacatgggggggagatgtccagcccaggggaatgaggggggtgatgtccatcctggggaggggtgacatccatcctggggggacggaggcgtgacgtccatccttgggggatgggggggtgacgtccatcctgggggagtgggggcggtgacgtccatcctgggggagtgggggcggtgacgtccatcctgagggaacaggggggtgacgtccatcctgggggaatggggggggtgacatccatcttgggggtactggggggtggcgtccatcctgggactggggggtgacgtccatcctggggggacggtgggggatgtccatcctggggggacggggggtgacgtccatcctgggggcgggtgatgttcatccttgggggacgggggaaggtgatgttccttctgggggggcgggggggggtgacgtccatcctgggggagacagtaacatcccaaacatgggggatgatgtccagagtgggggtcttcaggtctttacgggcccctcagcctccccttccacaccccaagtacagcacccacaaggcaggtgcctgggagggagacacacctgtcccctgcctgaagtttctcagcaggattttgggcacaaggtgggtagtgagctggtctcagcactgagcttgcaggtggagaaggcgggcccctgactttagggcgctctgggtgggatgaggacagacgtggaggaaaggagggatcccagcagaggcagcagtggatgggggagggcttcaccgcagggagagtgaggctgcgcggtgccctgcaggacagataggaactcccaggcctgtaatcccagcactttgggaggccgaggcgggcggatcacgaggtcaggagatcgagaccatcctggctaacacggtgaaaccccgtctctactaaaaatacaaaaaattagccgggcgaggtggcgggcgcctgtagtcccagctactcgggaggctgaggcagtagaatggtgtgaaccccagggggtggagcctgcagtgagccgagattgcgccactgcactccagcctgggcgacagcgagactccgtctcaaaaaaaaaaaaaaagaaaaaaagaaaaaaaaggaactcccagggtggagctgtggacagataggaacttccacagccaggaaggccaggtgacgtggagggccccaggcagctgggccagcacgggacggggcgtcaggtcagcggggctcttctgtgctgtgtgcagcatgagagtctgtaccccacctgtactcaggaccctgccccccgaggacaaggtcgcttccctcttgagcacatgggacaccaccttcctgctacactattcccatgccctttccacaggcccaggccactgttgtcatttcgccctccccacagtcctaggaggtgggcactgctggtgccccattttacaggtgtggatgctgagcacagagaggctgagctgctcgtctgggtcccccgcctgggatgccaccagtgtcctcacaccagcctgctcctgccctgtgcccatcctcctcctgcttagcgatcctttctcttgctaatgtgtgggacaaggggctctcagggggcctggccaaggtagcgggtccccccaccatactcccagtgccacccctggctgcctggagctagctgtgcaggggcccagaagccctcccctccgaggaggtgggcctgttccaggctaccttgggcgggcagggccttgggtggccagggcctcaggagggacacagagggccccactcaaggtcacgggctgcacgttccatggggcctggggaagcagccgagcagaaggatgcagcccgactaaggctgcctcagggtggcaccccagcggtgcccacactaaggggacacttggcaggggaggggctgtggcagggcagggtcatgtccccagcagtaaggccaggacagggcagccggaccccgactgtgccaccctcagcccagtggatggtgcatctcacctgggcctggccggctgcactgtggcgcctgccccaggccaggctaccttgggcggggtggggactggtactccccggggggtgggggtgagggcggaggtgagtgtggatgaggccaccagctgtgcccagcacgtcactgagggcccacaagctctcagcacaggctggcggctgagagcagctggccacaggcaggccctgggagcaaagggcgctttgagctgcctgagtgcctgcattgccctccggccagctgaccctccccggagccgaggctggctctctctgtggcttatcagggccgggccggtgtggagttggaacagctggccccaaagcccgccagccgggctctatgctgtggggaccactgcccccacagggaagcgcctggctcagcacaggcccagccctctggcttcctcgctatgggagggggtgagaccctaatcccgggtccccacagcaccctcagcctaacccctgtgtccacccctcttcagagtctccaggccccatcttggcctgatgaggcctcattgtctcctaaaaagtgtgggtacagatctcaggcttttcaagggtgggtggattcctggctccagtggaaggtccccaggcctaagtctatgggggcgccagggaggccggctgtgtttctgcatccttgaccctggccccttccacaaagctcagctctgatccttcgtatttaatcttcatcttccgccgtctttaaaattaattttcctttaaagatactgtagagcagtaacatcagagacaccaaaatagacaaaagagataatagaagagtaatatcagagacactaaagtcctcgcgataagggtctgcgaggcttcctttatgttttgcaaaaaaatctatatatttcatccagagagacaggatgtgagcgcagctggtcagaaccagttatttcaggctgccctgtgatctttcccacgtgattgattgacacagggaccttctctagggtcctaaattatgtggttccagcagcatggaacttcaaaacacattgaaccccagaaaatcttcgctatgttggagattcgccggctgataaaagcaaaacaatagataagatggccaggtcgaccttcagccttctcggagaacaccggttccacggccggttgcaacacgtttgagccaaagtgcgacctttccccgctctgttcactcggagactaaaaatcccagataagcacctgctttgctagacccttgctggccctccggcttcgggcaggtctcctctttatgccactgtaaccccacaacaccggataccagcatggggccggcctgcggggccatgtgtctcctcctgtgtgaccttgagctaccttgagcttccattttccttccgcaccatgcactgatttcccctgggttgaggttgagggtcccagggtctgtctgcctaatgacaagatttcagtaccaatagcgaagccgtcagtggcagtgactgtgccttagggtgtcccgttggcatccagggccccccatgaaggatggcaccgagcaccattcaacataagtcttgtcagcgttccgatgaaacaagattaggggaattttacagcttgcctgtgtttttccacccagggccctttgcactgcctgctatttgttttctgtcttcatcctgagagggctcaaggtctgcatgccattttgcaattgacaaatggcttgtgcttagctatttcgttgaatgctgaactaacaatagtcagtgaagattaagaactaaaggctcaaggacagctacagatgaccacagctggagtgcggcagatactcggggccgctgggtggccctgaaggcccacagaatccttttggagacctgacccgcgggagcccaggtgagcaaccgccacgggccagggcccctcgaggcactcatttcagtatcagagaacacacataacgtaaaattcaccatttcagccatttcagccatttcagccatttcacagcgtgcaatttggtggcatttagtatgttcacaaggcggttcagccaacacctgtctccggttccagagctttttcatcacctcaaaaggaaaaccatccccattgcccttctcctagttcctgacaaacatgttctttttaaacattatggtgaaatataaggccaggcgcggtgactcatgcctgcaatcccagcactttggaaggctgaggcgggcggatcacctgaggtcaggagtttgagaccagcctggccaacatggtgaaaccttgtctctactaataatacaaaaagattagccgggtgtggtggtgggtgcctctaatccagctactcagggggctgaggcaggagaatcacttgaacctgggaggcagaggttgcagtgagctgagatggtgccactgcactcctgcctgggcaacagagcaagactctatctcaaaataaaataaaatggaaatatgttttaccatcttaaccctttttaagatcacagttccttgcgaccatcgccaccatccagctccagagcttttttcatcttgcaaaactgatgaaagtctgtccccattaaacactcactccctactcccccttccccagcccctggcgcccatcatctactttctacctctgtgaatctgatgactgtagcgacctcacgtgagtggaagcagatagtatttgtccttgtgtaactggatcatttcactgagagtaatgtcttcaaggttcctccatgttgcagcctgtgtgagaatccccttcctttttaaggccaaatcctattccgtggtagggagggaccacatcttccgtctccgtcggtgcactgagggacactgggctggttcccctttttggctgttgtgaatgttgctgctgtggacatgggtgtgtatggatctcctttaaagagaccggggacagactccaaagtggaattgctgggtcatacagtaattctgttttttttctggcatgttatttaaacagactatttgttagagcagttttaggttcacagcaaaatcgagcggctggtcatttcacgctttaaaggagctgtggcattctacatcccccagcagcacacaaggtcccaacttctccggatccttgggagcacttgtcactctgtttggggtggcagccaccctaatggatgagaggtggcatctcgttgtggtcttgatttgcatttccctgatgattagtgacactgggcacctctccgtgtgcctcttggccatctgtgtatcttcttcacagaaatgactgtccaagccctttgcctattttttaaaaattgagttgttaggaactttggttttttaaataattttaaagcacacaaataagacacctgagagccaacttataacacgccccaggatggacatggattcacactcatggtagaacagagctgagggtgcagtgtgggatgggctgacttgtggccaggggaaagacccgtggcctatcttgttttggggggcagggacccagaaactcattgctttcaggccttgctagaaaagcatacagtcgaacgagtgggtccgatgtggagtgcagtggcatcagccaaggctccgaggcgtttcttcccacttcacatgtcttttctgttgtttctgcgaaggtgtctcagggaggggcagaacccatggggtttggcttcctgaccctgaacgtctttgtcccaggcccttcactgggtctggaggaaggagggtgctgtggtcctggtggctcttgtgcctgcacccgccttggggccatctgacacccacaccctccctccaggccagacccagctctccagcttcccggctgcccactagatgaccaccaaggcagggcggctggtggtgctgacggctctgtgaggcccaggcctgtcttccccacctcaccccacagggctgagacacctccctgtcccctggcagggctggaggctctggagtctctcttggttaccctctctctcccagggccacttttgcagcctggtgtccttatctcatgtctgggtcccctttgccaagggtcctccagcctttggcctgcacccactcatctggcagtaacagggccacttccagaaccaccaccatgcccaggtcatgtctgtgcatgagagtggtcagccctccatggcaggcctggcctcacctgccagtgtcctctcccacacccgaggacacctgtaccttgtcccggggcggggctctctctgccatggacgccagtcttccctcccctaagctgcgggtgacctgacctagttgagcctggctttcctcctctgtaaaatgtgaacagaggccaccacccccattatgtgggtctgtgtttgctctgtgcacgtctcggtgcccagatctgaggcccttttgtccatgaagccatctgcagccaggaggcggccttgctttagtctgaaggagagtgaccagggtaggaggggcctccttgtccctttggtctgtttgtggtctcagtggagaccaaggacggctcttcttctcgtatctacggggcagagctcagggccgcactccatcagcatcccgggccattgcatccttgaccccggggggcttgcaggcaccacatagatcttgtgagaggcgctttgtggggctggatgatcctgggtgcccctcagagaaggccctggggctggccttgttatcagtgggggagtcaggaagtaccccggttctgtacctgtagtggatggggctctcagagggattgggggtgatgggggtgctgagctggcctgagaagggtggggtaacctagggggtggagtgggggagggagagagcactcctgacacagggtcctgaggaggcaggggtgccccagggaatggggggcacctggggcccacgggaggctctgggggagactgggcggtgagcccctgggaaggaggcctcagggacagccctagactgtcaccctcagtgtggacagcaggagctatggcagctgcttgagcaaggtgggcaagggagaagtaccaaatgtgtgcaggttctggggaggagcttgaggcccctttagttcacctttggaacttaggaccaagtctgcaaatacagatgaacccagggttaggagggtggctggggcatcacccacctggggtctggactgctggaaccagggggaggcaggcctgccattctgtgagcctgctttagactggggatgtggtcccgtgaatcaggggtgggccatggcatggcgtgggggaccagccctcctccctgtccccagctgagtgtgagctccctggggtcttgctgtggccttggccctgggtgttgtcccacacagcccaggagagcgtttgaggctgatggtggtggagatagttttatctctgagcaaacattccatcttgctgtttccagcctagagatggtgaggggacttttccttggctctttcctggcctgctagcagcaccagcctaattaacctgacaagcggggcctccccagccatgcagccttgcactgccttcccacatccagctggatttggggatcagtgttgtttttaatcattcctaccaccttgtcccacaggcaggagtcctgccatcttcgaaggccagcccctaaacaggttccctgagtgttaggtcaaaataactttaaaaagacacgcagctatccacagcaatccttaatagttacttatctatttcagggtataacataagacacacctatcatttcagacctgcctaggacatgcctggagaaggtatttaagtaattttaaaagtgcatcaaaacaaggtcaggcgcggtggctcacrcytataatcccarcactttgggaggccgaagcaggcagatcacctaaggtcaggagttccagaccagcctggscaacatggcaaaaccccatctctactaaaaaaatacaaaaaaattagccaggcgtggtggcatgcgcctgtagtcccagctactcaggaggctgaggcaggagaattgcttgaacctgggaggcagaggttgcagtgagccgagatcacgccactgcactccagcctgggtgacagagcgagactctgtctcataaataaataaataaataaataaataaataaagtgcatcaaaacaagaaaaaccctgctaagggccagtctgctgggtggtggatgggtcagcagagctgggctgggagccgctatgcctccccatcaaggccaccaatagtcgggtgagccggcctctgtgccgtcatgggcaccctgtctcagctccggggacttggagctctgtgtttccgtggcctttttcacgatgaccaaacaaaggcgggtgttatggtgtccaggcccggtctccctaacgggcagtttctcagaagcaaagaccgacgagacagagctcctgctaccagagagccctaggccggctcattggaatagtcatttatttgttccttcattcgttcattcagcatgtccatgttgagcactgactggagcaggtcctgttctggggcctgggaaatgggggtggataagaccaaggtagcctcttctctaaggagctcagccggacctcagcctagagccctggtccccaggagctgaggacagaggtgggacccacaccccccccatgaggccacagagcctgcaggtgtccacaccttttgtttttgttttttgatttttgtttttygttttttgttttttgagatggagtctcactctgtcacccaggctggagtacaatggtgtgatctcggctcactgcaagctctgcctctcgagttcaagcgattctcctgcctcagcctcctgagtagctgggattacagggcgtgcgccaccatgccaggctaatttttgtatttttagtggagacagggtttcaccatrttgatcaggctggtcttgaactcctgaactcgtgatctgcctgcctcggcctcccagagtgctgggattacaggcgtgagcccccgcacctggcccacaccctttctttaccttacacccctgccatctccagtatgcacctgtccgcacacacccacacacccctgaaggatttgacrtcatgagccaaaaacatttttgcaaaaggaaagcaactaagctcccagcgtgtctccccttatccattgggcttgtcccaaacacatgccggatggtgtaagtatcattccatcctaattaataacatttgggagccagcgatggcagtgtccagctgactgctcatagtggactccctggtgggggcgtggcatgggagcaaggccagccactgtcacccagtgggagcagaagtcccctccagggcccggcttctgagggaggacarrmargagtccgcmrgaagtgggcctgagacgccgtatgcctgtggctttgtggctttgtgtggctagcgcctctcacacgtgggggctggtttcatcttccagccccacacaccttccccaagggcctcccgtacaccccggctgcctgggcgctgggctccagcctgcaggtggccgctgcactttaagtgtcacaatgggctgcacttcacatgaaagctgcattttggcaataagtccccaccaagcccactgagcctggccctgctgcatccacactatacagctgaggaaactgaggcccagctttccacttctgtgcctagggggtgggatccagctccgarggtcttcttcccactcctccaggaacctccgccctctggtgtcggtggagttgaggaggtgttggggtgtggaggggccaggtgactccctgtaagggcaaagtgatccagaggctgcccctaccgcaggtacaccaggctcaaaggccagctgtgaggctttccggggctggatctggtgggaaagtgcttatcacggagggcacccggggttcctggcgtgggaccccctctgacccaggctagggttcctggcgtgggacgccctctggcccaagctggggttcctggtgtggggccccctctgacccaagctggggttcctggcgtcggacgccctctggcccaagctggagttcctggtgtggggccccctctgacccaagctggggttcctggcgtcggacgccctctggcccaagctggggttcctggtgtggggccccctctggccaaggctggggttcctggtgtggggcctcctctggcctgggtgggcctggcctgagagctgcagcctcacctgggctccactgcctatggacatgagctgaagctgctcagccttccrgggcctctgtgcgcaggcatcaccatccgcagcaggccaggacccgggcctgctgttctcagggtgtccttcagcggaggctccagcatggctgggttcaaacaggttgcagggtctgaagccactcaaggccgagcctgcctgcagtgagcgtcccactctgtccctgcaggagatcgtgctggtggtgttcttcsggacggagtacgtggtccgcctctggtccgccggctgccgcagcaagtacgtgggcctctgggggcggctgcgctttgcccggaagcccatttccatcatcggtgagtcatgcctgccctgtggaggtcacgcccaggtttccagaccaggaaggacccccacctcatgacccctaccagatggagtcccctaaggactggggaaccccaaggccagcagggggtgactgcccaggacccagcacaggagcattggcagccctcagcagcctctgcactcagacgctgatcatggtgttgggggtagggggttggtccctcacagattcccatgagcctcacagcccagcatagcttcatggtgggccagtcaccctcggcagcctgagaaccatggtccaggcctgaggccctgccctttctggccacttgcagggctcagcacagggcccagcctaggccgggggctccacatggccaggacagaggttgggtctctccgtttagatgctgcctgcctccctatccgaggtgtctccatktccccggtcatcagggcgtgacccgtctgaccagcaagccccttccccagacgagagcagggtgtatgctcttccctggggccctggctgtggcgatcacgaaaagctccccctctcctgcactccacagacctcatcgtggtcgtggcctccatggtggtcctctgcgtgggctccaaggggcaggtgtttgccacgtcggccatcaggtgcgtctgtgccacaagctccccccgccatgccgccccaccccgagcacccctcctgagccgcgggtggtctcacgccccatccaccttgctcagatgcaaggtgccttggtgcccactgcccccgggggcactgagccatgtgctgggatgggtggagcagggtgggtgcaggcaagtgtggagggcacggctcaacccaagatgcctcaggcagccctaggctctggcccagcactagcgcctctgaacttccaggacttgggtggtaacctgaccatctgggcacacagcctgcccatctgcaaactggggtgacccaaggagccccccagaaggcagtctggggactgagggaatctggaggtacctggccgacccccagctcagccctgtgtgggcagattcagagcaggctctggggggctgcgcctgagagggagattcccaggcccctgtcgggatggacatatacccagcctccccacccagagtggacgcctgggaggggcaggggcagggacacccatgccatcggccagccctaggcccggcgtgaacagctgagcccagcctggctccctcagccccacaccatctccttcgcaggggcatccgcttcctgcagatcctgaggatgctacacgtcgaccgccagggaggcacctggaggctcctgggctccgtggtcttcatccaccgccaggtgggtggcccgggttaggggtgcggggcccaggttggggacaggacggagggagcagagcagcccacactaggacagcttgagatgcgctgaggccccgggggccggtgggtgcctgggcgcaggggtacctgaacggggcccaggatctcagagcaagcccaagcttgagcccagcctggatgctccaccccagcctggtgccagtgaccctggcctgccaggctgatggtgtgctcaccttcctctgagctgggggcaaatgaagacagaaagtcagaaatgaaaaacccaggcaaatcaaggacccggtcaaggcagggccaccagactccctcccgagggctgcactcagatgggttcaggctgcactggcccctggctctgtggggtgaggggacccttcctctccctgaggatctcctgggtcctggtccattcttggttctgtcacgtggcaggaaagagagctgggcaatcagtggagcccgcgccggcccagacagtgggcctagggcgaccccagggctgagcctcattctgggggtaacccccacccgccacttaccggagttgtgaggagtgggctatattgaagccggccctgtgcatgtgaaccgcgctggagcggcgtaggacgcccagtgatcgctgggactcgctgccttaggcgtctgcacaggaggctcccagcctgcggttcctggagcccgacactgtgtgttttctggcctaggagctgataaccaccctgtacatcggcttcctgggcctcatcttctcctcgtactttgtgtacctggctgagaaggacgcggtgaacgagtcaggccgcgtggagttcggcagctacgcagatgcgctgtggtggggggtggtaagtcggaaacttccaggcatggggacaggggcagctcaggctgaggagtgggcaggacatctgggcactggtgtcttgagacttcgggccttggcaggggcttctcacctgcacgctcacaggcctctgtccacaaacctgtgcttggagccgctggcacaggtccccacgctcagtgttgagtcctttggcatcaccatcttgaagttctgaatggtctcatccttgaacttgagatttgagagggaaatcggaggggtcactggagcgtgtgttgggggcttagcggtttcggctcccccatggctctgcctcccgccatcgtcctaggttgcccattccctgcctccaccgtggccctcaccctggcagggcccaaggagagcggcgtcagatgcatacctcgcgtgtctctgagggtccacacaggccctgtaagtgcccctgtccccaaggagccagacatgagacagcaaacaggaaagaccatgatggctcaagagaccccagcagagatcagagagcccccgtgtttccagtggatgctgggcctgcaagttctggagccgggcctgggcagtggcgacataggtgcagctgggcctagggaagcagggacccggcctgtgggcccagaggctgcccctggctgtgaaggtgggttccggccacctagagcagcccgggagccttggggaagccggtgtgcagcaggcagatcccgcactggaacaccgagccacccaaagctcagagaggctgtgcgggaggggtggggcagggtgtcttgggccgtgtctgtgggggcttccttgagggactcaggcttgcacgtgggagagggagatgttccgatgaggatgcagctgcaggaatcagggtgcgccctccgagctgcaggctccccaagtcccaagtcactggcctgtgggcccagcagcagtttctcatggctcagaggacgctggctgaggcatttttagggggcaggcctagcttgccagtgtccctctgggagctggtggctgccttcaaatcctccagtgaaagtcggcgtttatatatgcatggagctcaagggctgcttctagggggaacacgtgggtaccccgaggggagtagctggctggaggccagagtgcagggagggaatgactccatcccatctccccccacagctgcagggccaggtgggccgtccacaggccactaaggcccagggtggcaccatcacaccttggggagtggccctgggtggggaccgagaagcccaagtgccgaggtgacagggtgacccctactctgccgccacaagcctgcccccgcgtctgcccttgtctaccgacctccgggctcactcagtccgataacaggttagatggaatcgtggtagcaacaggggctgggggctggggaggaggccgtcgaagcccacacagggtgggagccaaggcctgggggccgcacgggggctggaggtgggggcgggcagggcagccgtgggaaacacgtggtggtgccaggacccagtccgtctgccccgagtcctccttccagaaaggaccggacttgctggctctcgggaccccccaccaccatcagagcatatctgggtggggtgagaagcctcccggtggctccccaggcaggcacgtgtccctgcgattgctgtgcctcctccctccccctcaaccgccgcttcccccatgaggccagacactcagcagtggctcctgacgtaggccaagtcagcaggttttctggaagcttccaaagtgctgcaatgctcagggatggcaggggcatgctgacacagctcctgggttggggcaggccccactttcggcctcttcccgccttcctgggggcctgtgtccccgaaggccccagtgtggcaggcctgagcaggtttgggcagcagggcccagcccccctgcgggagcctgcctgcagtgagtgtggatgggtagggcgtgctcgggggatggacggcccagagccaggagagttcccgggaggctggtggcaaggtgggcagtgaggagctggcggtgcagcaaaagccagtgggtactggccccggcacggctgataagcagtgcccagccttcgctgctgccctgcctgccttcccagccgcccactggagctgtgggcagcggacgctactccccagccccccagcccgcagcagagcggcactcccactcccacacctgtgcaaacatccgcccgctggccgggaacacggcccctttgtgcccggcttggcatcagtgccccggcccacaccgtcagctgcagcccgagcctcggccatcgcgcgccctggcctggccattgttcccgccaggccccgcgcccctggtcgccctgggccccccaccgcccagggctgtggggcaaacagctcccattcagctgccctgcagctgtctggggggagcggcccctgaggcctgagttatgggctgtgttcctggcatttctcggacaaacagaacttgagaaacgcaagaaggggcagcagcccagatgggggcttttaagccagttttgccaatttgcaactgcgccctgagcagttgttttctttcagctcctttgtcctgcttccttcaccccaccggggagtgaagtacgccctcgccggccaggcagccagggctgctccatgtctgtccgtccgtcggggctgccacaggcccttactgggtgggaggtggcttcctggaggccaggccattctgatcatcatgctgcatctgccccagaccttgcctggactctgtggactcctcacccctcagacacaccctgagagggtgctggagctgccacaacaaagtccgcgaactgctgggcccagagcaacagaaactcatgggctctagaggccagagcccgaagcgaggtgtgcacagggcctgcccctccgaaagctcagggagaaatttcctctcctctccccgtggctggagactccaggcgtgcccggtgtgcggccgcctctttcctctgtgtcaggccctgtctctcatgaggacacttgctgttggctttagggtccacccaggtgatccaggaggagctcatcttgattgaatcttcaaagagcctatttccaaatatcgcattctgtgggtccaggtgaatatgaattaggggggatgcagtccagcctaggacagtgggtggcccaggtggacttcctgggaaggtccctccccttgccggccaccagtttccacagctgtccagcgaaggcgccggctcagtggttgagtgtcccctcctgtccccttcgccggggtggggatacgcaacttggatgtgagaactctcgaatcccctgagtgtggcgcctgccctggctgccaaggcgtttggggagaatttaagacttttctttgcccttggaacaaaatgcgtttgtttgtgttaaagtttgagtggagggagaagcagtttttgcaaacacgggcttctctgttcagcgcccgggggtctctacaaacaggaggctgccgggctgtgtttgcccctctgcacctaaatttagaattgaaagtaaagaagctggaaccccattcctacatttcagccgccttttgaagtcgagtctgactgcctgctgttcactctctcctcacctggagcctccagaaattcccgcctccctggcaacgctgcaccctggcggggcaaggccagaaggggctgggggctggtgcaggggtgtgcgtgagggcagggcctcccagacagtcacaggccagccctgttggcactgcccagcgggaggggtggtgtcaggaagagctggggaagccaaggcgccgtgggccgaggggcggcaggacctggccacccaccgagcccctgggtcagcgttcttcctcctcctggagttccgtgcaaaggggaacgagttcagctgccctactgagtgggcctggggacagaggcagagtacgcacctgctgtgtgcctcagtttctccatctgcacatgggagacagcagtccgtctcccagggccaatgcagggcccgctgcaagggctgctgaggactgtaatcccagaggctgcaaccgatccctctgctgcggagactttccctggaccgaaagggcctcctggtgaggctgggtctccgtttgtggactcactgttgaggcgtgtggtttgcggtcctgctgtgtgccaggcaccggcaggggttcgggcagccctgtcttgctctctctgtcacagtcaggagcgagaagcatggtgtgagctggggctggcctgtggtggttcgcaggtggccatgggaagcaccgccggagtgtccctgcaggactgtttcggcccaggagcagggaggcctccttgaggaagtgacagctgagctgagacctcaagacacagtcacctgggccaccttccggcagggcgctgagcctggctgtacctcggggaagacgcggcctggggcctgggtgccatgggggtgttgacggtttcaccaccagcccgtgtgtggggctccgggcttcgtgagtgaggagaggactccatgtgacggggaggcctggccctcgtgaattggtgttcgtttatttactttctcctgctgaaaggaagcaggtttattttggggtgtgtgtctgcttttgcttttaccctgagagtttgccagcctgctggcttgttcccccacccccacctggtggcgtcagcccctttatggctgttcctgagagacaggccggagtctccagggcggccccacgggggctgggcgtccccttggaatgtgagtgcctggcctgttagagccccaggaccgctggccccacccttctctgtcccagagacagtcctgccccccacccaggggcctccctctgtccacggctccccctttcccaggccacccccctaggcccctttcctccaccttcattggccctgccctctgtagtgtcacccaggtcagtggggccctgtcctgccctgtcctgaggagtgcatgtctctgagccctgcatggggggagcccaccagctagcagaggcccagaaggctctagacaggctctagactgggtctctaagtctgcaaggggcaccaaagcactttacaaattccaggagtgagtgacaggctggccacgtgccaagccctcacccagcaggcagcccgtgagaagtgtgttgtgatcatgcaccttcccgagagggggaaactgaggtacagaacatgctggggctttgcctgaggccagacggacagggtgagaactgccccccacactcagagccacggtgccagcccagccttgccagcagggcagccacaggacttccaggcaaggtgacggtgccaggtggggcccgaggccctcactcatagggcattgtcccacatcccctggaaccactgagacaggcatcgtgccacgagaggggacacctgcctggacctctgtgtgctcagcctactgggggcactgaggccgagggcccagctctgcgagatcctgcatgggcttccttccaagccctggagaggggagcaggcctgggagggcgcccttggcccagagcctccatgaagagccaggggcctcctcatggctggggccccagcacagtgacctgggaatggctgtggccgcatgggatgtcccggagcccctgccgccctccttggagctgtggggctgagcttgggtgctgcgctctcctgactccatccttaggtgcctcctcacgggcaggctgggctctcgaggctgggcaaggtcggggcctgcaatggctgaagcagcctcttagcccatctctgccttcggggtggccacagcggggaacgtgggtcctgcaggccttggtccagctgtctgcctggccactttctaatggggagccctcagcacagtgactgcccagcctcagtttcctccttcgtagatgatcttgacctgagagtgccagctggggtgtgacacctctgggctaccccctcctcccgctcttgaccaccccttcctctggacagacgaccaccacatctccagccaggaccaccccttccttctgggcaaatgactaccacgtttccagccggggccagtgagctctgggagccagggcttggcatgcggctggagctcaggtttctgggctggcctctgtcctcccctcgaggccagccttgaggaggctacttctgaaaggagggaatagaatcccagtgtttctcagggaggaacatggggggactagaaggctccccatgcctcccgccccttcacatgggagtgaaggcacaggccagcaggagggcgggggaaacacactgaccagtggggtgtgcgttccccgctcgcccccacagttcctgccatgggcgtgactttgtgtgcctcatatggctggtgccctggcaaggagccacggcccaggagacagacatgtggatctgcattccaggtggtgggccatcagggactaatccccagcatggtgaccataaaacagcccattcctgagctgcctgtgtctgaatgcaggaaaaacaaacaggtctgcagggaggggccgtttccttgttaacttgaggatgagggtctggggccgggtctgggcagacaggcagaccaggcgaaggtggggtcctggagctgcgtcctgctgtatgtgtgctctccacggtgggcagacacccaggggcacttctggggctggcctttctctccctctcggggcacccctgccttctactgaccacccagccagccagcaggagcccacgtgcacccagctcagccccaggaggtgacacccccaccctcagcagctctcgtctgtttgggggcaggtttggaaggtggtctcgggtgtccttacgcgagcaggtggctacctcacctgctcacctgaccccaactccactctgacttccaggccagccccactccattccaccttcatcatgcagtttctgtattagatttttaaataatcaaaatatggtattttcatttaaaaagtaatgcttttaaaatatattaaaataatttaatgttgttattagaacaatgtttaatatgccagcccgtgccatttgtcttgatgcctgggtttgctggcgccccttacgcttggcacgcaaggcaggagctccccactggcctcccccaactgcttgccgcccagcccccctcaggccaattcctgcctctcagcctatcttgggtttgtcctcggctgcctcgggaggcagccgtgcccaggcctcttggtctcagggccccttggtgcccctgacggagaagcctggctcgtgggcattgtgccatcactatttaatacagtggaggcatgtaaaaacaattccatattaatttattaaaataatagacccattacattttcataatgtcatgaaaaatttctatattttccaaaacaaatattatcgaaagaaaaatatgcatttttgcaaatctccagaaagcctggctccccagaggacggggatccccacgcctgtcccggaactgtctgtgaagagcaacgtcccactgcttacgcttgggtgggagcaggagtgcctgttagtgccccccagccacagagagtgctgccgtccctgagcccagccccagcagatcatcagcacacatttgcctggggaacacagacagccctgtcctggacgcagcccttcaaccctgcttctcatacctgacccccaccttgggcgctggtctgccacaccccaccacccctgctttcttcagcctgaccttgtcctcccggacccagtgctaggaggatgtccaggcggggtgggacttgggcctgcgctgggctgctcctcaagtctcgggctgcacgtgccagccaggcagacggtgctgagaggggcccttctgcagagcggaggcagagcccggagtggaggggtgagcactgcctcagggcattggcaggggctgcgccagcccaggcacaggtctgagggatgaataggaggttgctggatgaacaagtaggaatcagcatgttcatactgaaggggtgagtgtccccccaaaaaatctggattagacagactctggagccctcttgctccaggttgcaggggccctccgagctcaaggccaggataggccagggtccctgccctgcccaggcccttctaggcccgtttctgggccacctgtgtgtgctttcttggacttgctgtagacttggtaaacagtggatgtgctgggaccctgggctgagcccctttgggctgagagctcaccaggtggaagtcactccccagggcaggactggcacagggtctccgatgccccgcccactttgcagccctgtgtctgcctctgcaactccccaccccagtgcacctgggccctctggggaaggtagcggcagcccagcctgtgcatgtgggtgcakgccctctggggaggacaccctgcagacgaggggctccggttcccccakggcccccctctctgccagccactgtcagcctcacccatggcctggcttcaccctgcagggacctggctgcgctccgtgtgcctgcgctgtgcgttcaaggtgtctgcacctgaatgtgccctgagagtgtcaggctcggacatggggaccagctcccttttcacatgaccttgtcatctgtgtgacgcacgtgcgtgtgccgggtcgtgtgtttccgtgtgtgtgtgcacaagcacagacacgtgcacgtgtggagcatcccatctctgcatggggcacgcttgtgagtgtgcacccacatacacagagccgggtggtccactgaaagggcctggcagtaaacagcttcctgtgcacattgtgtgtgtggcaggggcatgggggcatgtgtgtgtctcttaaggacagtggcgctgcagggagagctccgtgtgcagctgtgggaggtagcctgcaagcagcctctgcagaagcatcctggccataagcgaacgtgcggtcagggcactagtggggcaggggcctgggtggcggccagggctcagcagaggcctgtcccgccctgtggcctggcggcggtggctggcgttcatcactgttcgttaacgtgctcatcggtacagcctggtttcccgcaatgtggccgcttctgctacctgagcctccgagcctcctgctgtggcagttctgggcagtcgcgtgagccgtagtgcacctgcctctctgtccgcgtgkgcgcmtgtgcacccctgcccgggggtggccatggggcttctccccaccctccctcctcctcagtggctggtggaaaccacagggtggcccagggaccctggtcctcgtgggggctcaggtgggccggggtttgttcttgccttccatcagagtgtgttaaacaggcctcaggccttcctgccatcagcactgggcccatagggctgggaatccagtgggggtctccatgtggttcccagctggggcattcctgggcctgcaagcggtggccgtcacttgaccttgaccagaagccccaagccggtaaatgctgtgctgtcctgagtgtggtgcccagagcagggctgcaaagacctcccgcagccacagccatggtctgggccaccatgcctgctgtccagatgagcccaggcaggagcctgtgtgtccacagggtgagctgtgcctgagggccactctgggtctccttgttgggctcagcgccagctcctgaagaacccagcaggcagcctgcacggaccaggcccagccagggtaggctcctacgtcctgcagaatgacatttccaggctcagactggaatccccaggaagcaaacctcagatgccagcgcgggggaaagggtggggggagccttctattgtcccaccacacgtcctggacggatggctctcccaccaagaagaaggcttgagctgcatcttgtactctcagaaaagaggaaaataaaacatctggtgccctggagtggcgtcaggaagcagcgcgtcatcccagcccctgctctttgttgacgaccagcctcagtgggagctcccggtctcctgggggccggcgcacagcaacgtcggtggcccaggggcccagcctcctggggacaggcaggcagatgaggcagccggtgtggggcgagctcccaggcccacgttcccagccagcaggcctggcccttcgtgggtgctgggctccttacatgtgctggtgggacataccttgtgtgtgacgccgagagcctgggagacatgtgccatcccgcggctctgttcctggtgctttcgccgagtcacacggggtcgtcctggtggtcagggtctcttgccggcctctccgctcatcagagtggtgggtttgggttaggcagttggccctcccgaggctccagtcccatccgtggctgaccactgtccctctccctgcaggtcacagtcaccaccatcggctatggggacaaggtgccccagacgtgggtcgggaagaccatcgcctcctgcttctctgtctttgccatctccttctttgcgctcccagcggtaggtgccccgtgggtgcgttttccctggctccttggacagctggggtcctggggtggctgcacgcccctccctgtgagcagacccacttacgttcagaaccaagagggtgcttcccttctagaargtgctatactccagagccccacctgccctccctggggccctggatgcagacttcccgtttgcagtccccactggggtccttgcaggcagtgtgggaggcagcctggagtggctgtgcatgggcgcagtgtggggcaggcctgctcactcagccctgggtgggtgggcaatgctgctaccacgccccatggaggcagaatcttgtgcctggagagggcacttccacgctgtggctgggggggttttgttccatgtcctttccagtaaaccacagattgtaaggtgatgtgtctagttcacaatgcctgtatgtgggtgtgtgtgtgtgtgttatgtgcgtatgtgcataatatgtgtttgtgttgtgtgtgtataattttatgttacctgtatactatgggtatgtgtatatgtatcacatgggtgtgtatgtactgtatgtgtgcgtgcatactgtgtatacatattgtatgtgcatatgttgtatttagtatgtgtgctgtgttgtgtgcacatgtatgcattatacatgtatatcagtatgtttgcatatgtgtatttatgtatctgtgtcacaggtatgtatcctatacatctatgtgctgtatatgtgtgtgcacatgacatgtagacatgtgttagtatgtgcttgtgttagtgtttgtgtgttagtgtgggttagtgtatgttttagtgtatgttagtgtgtttgtgtgttagtgtgtgggtttgtgtttgtgtttctgtgttagtgtgtgtgttagtgtgcgttagtttgtgtttgtgtgtgtatgttagtgtatgttagtgttagtgtgtgttagtatgtgggttagtgtgtgtgtttgtgtgttagtgtgtgtgttagtatgtgtttgtgttagtgtgtatttgtgtgtgttagtgtttgtgtgtgtttgtgggttagtgtgtgttagtgtgggttactgtgtgttagtgtttgtgtgttagtgtgtttttgtgtgtgttagtgtgtgggttagtgtttgtgtgtgtgtcagtgtgtgtgtgttagtgtgcatatctattgtgtgtgtgtgtgcatcacacatgcacgtgcaccacgtgatctcctctgtagacacggagttccctagcttcagggtgggtcctttgcatcccatcaaccgtccttgggcgargcagcagcagggtcctcctcagctgargactgccttctcacttgcgaccccaatcccagtgcccagtatgaccccttcctgggcacatacagatggaccagcccacctggcccccagaatggtccctgggaatgggttagagcggctgcagccctgccccatgggactgggccccttgctggataagacctggggtataagttctgccccccatgctggcccaggacaggcaggctgggcccgaggtgggacttgggggggcttccagcactgaccatacctggccttcccacaacggtgaccggtaaccacgtcctgaggctgcacccagctggcagtggcctgtgtggacgggagcctcctgtccattccttcccaggggattcttggctcggggtttgccctgaaggtgcagcagaagcagaggcagaagcacttcaaccggcagatcccggcggcagcctcactcattcaggtgcggtgcctgcaaggccctggtcactgtcattttggtcactgttattgttgcatccagccctcacggccacctgtcagaaccatcattggcccctgcatcagcttggctggcctgtggggcatactctgcttgtggaaagccttggctgctgtggtgatggggtgagcacggggcattggagcctgtcttcctccaaagctgctcccatcaagggccatgccctgtgggctggagaggaggcacggccgtggccatgccaggagtggacgtggttggctctgaggctcccttgtgctcccattctccctcccactgcacaacaacctgagggctgagtctgggagtggggtggccaggtgattgtccccaagggaggtaggacccagctgtgcagttggtgccttctggagggcctggcatccctcagggctcgggaggccctggtgcctggaggtgaggactggcgatggatggcatgggcctccctctgggctcacaaggccagtgggctgggaaaggcagagccctggagcaacaggggcaggaaggttctggaggcaggtggggaggcaggcagtaccaagctctgggatgctgggctctggctctgtcactccaggctctccaggacccaccagagaatgggactgctctgttaacgtaagcaaggacttggcacaggagtcacttgagaattgcgtccctgtgggtctctcttgttggccactgcagggccagggctgccctgaggaacagccgctgaggtgcccagagggtgggcgttgccgggttgaatgacaagtgcccactggggatagggcctccgcccagtgcagtggctgggagcacagtgtcagttcctctgggcacactgggcctgatgtcccccaggaaggcccaggacctgggcagcccccgctggctggcgtcccccctgcagtcctcgtgagctcgctgccccaggcaaggcccaggctgtcaggggccagtcgcagtcctcctgcactcctggctcagccatcgggggggctgtgtgctcccacccttagcctggttttatggcttcacagtttctccttcctgggagaccataaatcaggcccgtaaacccgccttggtcccagcatgagcatgctggccgcccacgcctggcaggggaccacattggattcctggtcccactccctgggaaccacaggtcctttgaaaggggttccctcggaagctgcacacactgtgggaggactggagtaggggccccaggtggcaggtgtgcacaggagcagggcaggggtcatggggtttgccagggttgggggaccacgtggagtgctcagcctgtgtgtgtaacactcgggccttggaaggctgggcttgtgccctcgcctgcctgtccctgggtgctggatgggagtgagggctgcaggtgcccctcgccagctgctgtgtctacctggggctgtcacccaggagcccatcagtgtgggggaacattctccactcggccctctctcaggctcatgtggccagtgatgacaaggccaccaggacatgtcctcatacaaggccctgggagcccctcctgcccatctggacgctgcacaactgctcccccgccgggtcccctgccgatagtgtcccctcctcccacccttcccttgtggtgctgccatggggtctctctgaaatgctggcttcagagctgcacccatgtgccatcagaggctcccccaactgcaaggtggtataggcctctgggagagacctcacctcctgccagccctagggatcctgcctctccctgccccctgctcagcacctgcaggtcctgggcgacccctctttctcagcccttcctcactgtgtggccactggttgcccatttccgcattggtctcctatgcacgctgtgtaccctggcacctggggatgatgtgcgacctgcccacctttgcaagtctctcctttggctcaaggctggctcagggctggtaaagacctctgtggtgtcccagctgtgggtaacaattagcccatgaggcagtgagctgcctggtgcagcaagggaccaagccaggctgcctgggcagagggtctgggagctgggaccatgtcaagcctgtgactctgaggtcccagaccctgccacccagaggggaggggccaggcctggggaacagggagggggagctgtagcttccataagggcccccgccgggtggctcagcaggtgacagcctgtccccctgcccgacctcagaccgcatggaggtgctatgctgccgagaaccccgactcctccacctggaagatctacatccggaaggccccccggagccacactctgctgtcacccagccccaaacccaagaagtctgtggtggtgagtagcccacctgccaccagggcagggccttcttgctagcaggtggggaggccgtgggggccgcagcacgaggctgggatctcaccatgcatttggcttggtacagcctgtgtcagggagtcagcatcgttcgggacactgggccatacacccgatgctaggttcctgccatcccaatgtcccccgacttgggggtatgtaggaccggtcattccagggccagggcatgagagctccagagatagagctctgggagcaggacgggctggaaagaaggctcttcagagggcctcagggttgggctttccacaccgggcgcagtgggtggtgagcagtgggcagggggccgcgcgcagtgggtggtgggaggggagcagcaggggagggaggtgaggcaggggtgcagcgaagggggtctggaggtcacagggcagtggagtttggcaggcgctgggcagaagtcttgtgacatggctggggtcataaggggttggggctgacgctggcatggttccccttcctggcccgtgcccaccccctgtggagagacctggccttcccagtttccagctgccggtggagcctccgtgcctactgttccctgtgctggaatgttcccccagatttccacacagcctgctccctcacttcaggcgccctcttcatgccctgctggcccccagcctgttcccccgatatgcattctcccctactggtcacagcccctgttaccacctccactggcaccatcttgtacgtttatctgcttcctgctgtcctgttagcgaggccgtgagctcacagggcagcacctgggccaagccccccacgtgacccccagcagccctgccctgtctctgtgtgaagacactggagctggccccaggcctcaggtccctgtccgggtgtatgtggcgggggctgggctcggggcggctgcacaggcactctggggccggcgtagggcctggcagacgatgtccaggaaccgctaatctgttgtcttgttttttttaggtaaagaaaaaaaagttcaagctggacaaagacaatggggtgactcctggagagaagatgctcacagtcccccatatcacgtgcgaccccccagaagagcggcggctggaccacttctctgtcgacggctatgacagttctggtgagaacccctcaggcagttgggggccgcggggccgggaaggtcactgccttttttgggagcccgagcaagccagtgagtttctcccttgggctgtggtctctgacaacgaggtatgaacagacagagggtggagcttctagaaacttctgtaaaccttccaggtgccttcccctcagagtcttcccaaggaggagctggccacgccttctgttgcgagaggaagcctgggcaggtgatggggtgggtcggctccatccggctgtactgagggaagggtgtgttcctgattccagctgcctggcttcctcccagccgagcccacgggctctggttggaaagtggctagggtgacctctgggcctactggcagggacgccagagggaaggggtttggggatggggccctggaggagcagcaccaggcccgggtaaaacgtggggggcctgacgggacaggcccttctcatgcagcccaggggccccgagtctgtgcgtgatggtgtggctcggatctgcgtccctcctctcacccctgcagcgggggctgggatgaagctaccttctgcgggacctgacgattggatggcagacctgtctagggtttagatgtcctccatccctggtgaggggttttacccacgctaactcgtaagcgtggctctttgacagatgtggagagcgaggccctagaggctgggctcgtgtgctccagccacacggcgggaatacagcagtgcccggttgtggctcccacgagtgaggccctggaggctgggcccatgtgcttcagccacacggcaggaacacagcagtgtctggttgtggcccccccatgcctcccgccaacttctgctgttcccagaagtgcagctggctgagcacagacacagcaggtgacctgtggtgatgccagggcatcagcgcttggcctccccacactgctccagggcagacctggcctcctggctgcatcaggaggcacacgtgatgcatccgtcatctcgggaccagttttgagacaaacatcctatagggcaggaccgtgaactgggtagctctacagagtgtgaggggctggagacctcctgcccactggccacggatgccacggatgcccttgagagttaggagaggtggaagggaccccacttctccctgggagctccaacttctcttgcatgtgacttcagtgcccacttctggggactgtgatcccaaactgccaaattctctagcagctctcttaaaaccaaatgtgaaggattctggctttttctgtcctctgagcccagcgtggggtatttgagatagctgtgctgccaccaggacaggggcgtgcaccttgtcttcccaggagaaaacacagcaaagcctgtttgctccctagtacctcgtgcaaaggtgccatctgtggccctgctcgctgcttcctctgaggcagacatagtagtgactgtgttctgatacaaagatggcacttgcccgatgctgcactgcagcaccaatgcagaggccctggcaaatgttcgcagaagcccccgtcccagggcgtggtcccccttggaggaaaagggcacctgttttgaaaacacttggttatcatggtgccagaaagcactagtttaggccccacatgaaacagtggccttgccctcccagcatgggagagccctcatcttccaggtggtggggggagcacagcatttgaagcccactcccctttgaccacttgctgttgtccagacagacatcacgcacgtgggccttgcattggttcctgcttactttgtctctgctgacccggtttctgctccttgaagtctcagcccccttcttccatgattccaaggcatgtccctctaaggaggcttgaccccaccctggagggcctgctccccactctctgccttccatgccccatgggagggctccatgtggcccagtcccttggaggctggaccccactgttccggactctgggctgttggaagccaggccctgcctcagttgtgccaagtggccagggttctatgcctggcagaggaggtgtgggaggccaagcgctgatgccctggcatcaccacaggtcacctgctgtgtatgtgctcagccatccaagtaatatgatccattcccttctcagcagccgtccctttaccctttggtcatttctgcatccatctctccctctcggacctcttcccagtgcctgggactaacccgaatgtctcagcttaccagcagttgtaaggatgctgtcacatcttatgcatggcagagaggggacaaacccacagtgttcgcaaccctttgtgctcgcaggcaccagcccagcccgccaagctccagttcattcaggatggctcacctgcatccccacctccttggcaggaggctgggtggtgttccctgccccttggggctttcctgggcatcccatgtggaagtcagcaggcaagaccaagtccaggctcccgctccactgggcaccaggctccccaggacttagatgccatcaggattgggctgggacccgaccacatctcagtgagcccccgggacgtgctcccgcctgcccgctggagccggcacaaagggcgattgtgccaaccaatgcccagtgcccccacagctccggattcagggctgagaccattgtctccatgcaaatgggggctttctgcgcatgctaacgggcaggtgggcgtggccgggggctggggacccagcctgtgtgcggcctggagaagcatcgcttgctgcttgctgaatgcggggcagcccgaatcgatgccgtccattcagcctggttagtgttatgaagtcattagtgctgtctgcggaatgttaatgaggggcaagtgcggagaaagtcaggcgccttttgtggaatgctcctccacggagaagatttctctttcctgctggagtttgttctttcctaacttgataagtcagcccaggctggaaccaccagctttctggagcctgagctgttggcctggcccccagggacagagcgacccctgataatccggagtcccctttgcccaggaggctcttggagagccctggcttggggagaaggagatgctgatcccagggcagatgccactcctggggaagccccacagccccactcccgcaaggcgggtacgaacagccacactgagtcccccgcaaagtcaaacccaggcctcgaccttgtctggctgtgctttctgttgtgtgaacctgcaggttaggcagaagtccccttgaccctgcctcagggctgctacctgtctgcgccatccacctgcacacaagccccttcagctcgtgctctagctggtgctgtgcggtgttggccccatttatagatggagaaacggaaggccagggccatgtggggaactcctgaggacacctgtgtgtcctgacacctcactgagcctgtcgagaggcacaggcaggtatggcagtggcagacctcaggggagggaggctgggaaggtagaaggtcccccatggtagcatcagaacacagactaacctgcagcaaaaatgggctgtgtggtccctgtagagcagcctcactgaggggaggcaccagccctcatcccacgcagcagggcccgctgctgctccctcaaccttctgacctgggtggggagggaggggaatgtcagcagccacccagcccgagagccagagcacagcaggggctggccagcctagccctagagtctttgcagtgaagcgtcacagactcctcatgaaggatgcatggggacccaaccgcatgccacttggcttggcagtgtcaaagggactggggacctgcgaggatgcggtggccattgtctgtgcccagcctggggagcctgacactcacagcccggctgctgctgccttgggcgtcctgaagatcctctgtatgcttgtggggtgggggcagacacacaggcagcctcctgcccagagggtccaagcgggcatggccatccacatctgcaggtcagaagaggcctgggctggagccgcatactggccatgctgcctcgctgtccctgcctcagagccactgtattcactctgcctggaactgtctttcctggatcccaggagtcctgaaggagccgcctccatcctgagctgcctaccctgcccctcctccactccagttgtctccacagccaggtcaccattgaccaggttgtccagtcccctcctcataggggagtggccctttgtctttcaccactgacccttcccaagctggtaccatgcctaacccatggtgggtacacgataaaaatgcagggctgtgccaccagggttttgtcttgacaaagggactggaggcaggttgtcagagtagggctggccggaggtggcctcctgaatgcccctaggaggccagaggagacttccccaaattcactggtcctggaggccgcctcagaggccttttgctgctcagagaacactgggctggaaggtcgtggtctgtgacgtaggatcggggaggccacctcagaggccttttgctgctcagagaacactgggctgtaaggtcgtggtctgtgacgtaggatcgggcagcacgcacctttccacctggcctggaggtgattctgaagggcttctggggaggcgtcttcaaagctgtgcctgtgtgtgtcaccacgtgtttgccaggtgacctgggactattgtgtggtttcccgtttgtgaagtggggcagcgtgctggaggagcatgcatcacatacccagaggtccccagtgtggtctggggactcatcgttcacactcgtgtgtgtgctttctggaggcatgcgtcatggaacagcctcacctctcacttctgcacttgtgagcctggttctcacagggtcaggctgtagcctcctcctgctcccggctccgcgtcctcagcccaacacaccaagcctggcctttcatgcactcctccattcaaagccgtgtgttctgattgtgcacttttggtggctgccacaggattaaatcctgaatgctttgccagttgagatcaaaagtcaccccaactcctctgaaacctcactgggacctcaaggtgctccagatcctactgcctcctgccgtttcctgggcctttgttgcccagtattttggttttgtcttttaaacaatcctctttttgttgatgctgcatacattgagatatttactcacagacttgcagttttctgtctcaccatttggatttaatttcctttttcctgaagtctgtgtttctttcagtgaaggtaaactctcagtttcagtttgtctgaaatatttttactttgcctttattcttggatgatggtttcgttgggagaaagtaacaggttaatatgtacattttgtctgaagactctggagctgtaacactgcagtctcctggcttctgtgggtcatcaggctaattgattttcctttgtaagtgaccctccctacctctagtgacttcagaaaccttccttttgactttagtgttcagaggtttcaatgtactgtaccaaggtggtgcattatttttatttatcatgcctacactttgttgtgattcctgaatctgagggtttatgtctttcatcaaccgtggaaagtcagtaccattatgttgtagaatattgcctcccctaatgcttctgatcttttccagaaacttctatttgaccatctcattgtcttcctcagctgtctcatagattttctatctctgtctccctctgcttcattcacagaattttctatgcagtttctaactcttgagatgtttctgttccactgctttatctacccactgagactttcagttatatattttttccttccctataaatccttgtatgggggtttaatttgcttgattttagcatcttgtacctttctcatattttaaactacaacttttaatctttaggtcatttgaacatgcatattttgtaccctctatcctgtcatttcatcatctgcagttcttggagagtctaattctgttcactgtagttttttctgactcttgctcatgatggctcatttcattgtgggtttgcaatttagatcatgagtttgtgtggtggatgtttttgtttgtggggttcctatgtatcctgtataaggtacatgcctctggagaagctgcacttttgcttgtacagggtgacccagtgaaccaatccaggaccttcatgatccatgttttagatatgggatcttctagacaacctatgcagtgtaaacagaaaccccaatctcctgtgagagcaagtctaagtaacatatattgagaagagagttttattttataaaataaaactgtctttatttgcagaagacatggttatctatgtagaaaatctgatgaacatgcaagatgaccactatgactaatatatgagtttagtaaggtggcagatacaagattaatatgcaaaaatcaattccattcatatattcttgcagcaaataaccagaaattgagatttttaaaatacaggcgtgtctcattcttattgactgcactttgctgataatgcattttttacaaattgaaggtttgtggcaaccttgctcaagttgaagccagtactcacgtaccatttcaacaatcctagggcccttaagaattatgctaaatctactctgcttatgctctataatgaagcaacaaagcccgatgacagtacatctgttgacaacatggtttactgaatatgttgagcccattttcgagacctattgctcagacaaaaagatccctctcaaaatgttactgctcattgacagtgcacctggtcatccaagacctctgatggagatgtacaagattagtgttgttcttatggctgctaacacaacatccattctgcagcccataatcaaggagtaatgccaactttgaagtcttattatttaagaaatacattttataaggctatagcggccatagatagcgattgctttgatgaatctgggcaaagtaaattgaaaacattttagaaaataatcaccattctagatgaaattaagaacattagtgattcatggaagaacgtcaaaatatcagcattaacaggaattgggaaaaagttgattccaaccctcatggatgactgaggggttgaagatttcagtggaggaagtaactactgatgttgtgaaaactgcaagagaactagaattagaagtggagcctgaagatgtggctgaaatatcattagttattagagaaatgcaaataaaaaacacaatgaaataccacggcccaattattatattatataaaatgagggagatggatgataccaagtgttggtaaagatgtgtcggaggtggaactctcatatgctcccggtgagaatgcaaagtccaaagcgatgcaaccatttgggaaacagttcagcagtttcttgatgtgttaaatacatacctaccatattctacagcgattctattcctaggtatttatccaggagaaataagatcatatgcatgccaccatttgtacatggaatattcatagcagctttataaaaactggaaaccccaaactggaagcaacccaaatacccatcaacatttgaatagatttttttcaaagttgtagtatattcctaaaatggaatactacttagaaatacaaaggaatgaaccactgatatgcctacaatatggatacattgcaacataattatggtgagtgaaagaagccagacaaaaaaaaaaagagtacatggtatcttatttatgtaaaaatctagaaaatgaccactaatatagagtgacaaacaagtcagtggttatcagtggttacctggggatcaggggtagtagtaggagggaaaaggacaaaagggcacaaaaaaacttttggggcagtggatatgttcattatcataatcatggcgatggtttcatcatgtgtcaaaagttaccaaattgcacactttaaacataagcaagttatgtcaattatatctcaataaaactgtttataatatataatgtaaatatataatatatattttgcatagcaaaaaaacatactgaaaataattttttattgataacctaaagaaaccagttgccactcacctataggcatggggctaatttaattgctatataaaaacgctcttgtaaatcaagatagaagttaaaggatattaaaacagttcacagaaaaggaaataccaataattcttaagaatgaaaatatgctggatgacttcaattatgacaagagaaatgcaaactaaagcaatggggtttttgaaacttatctgattattaaatatcaaagagtttgataacactctatgggtatgtgtacatggaaactctcagtctcagtcattgatgttagaaaaataaattgatacaaacctctgtggagataaataaggcaatttcaatcaaaattaaagatgcatatgcctttgaatcattctagaaatttattctacacatatcttacacatttgcaaaataatccatcatcaggatattgatttctgcaattgttaaatagcaaaaaattgcaaaccaccgacatacccatcagtggaggtctgcttcaagtatcatatctccgttaaacagccatcaaaactgtgaagcttcactctcatcactgatgcaggacatccctgatatctgatcctagaaataacagtacatctttcagaagagtatgaaatctgccatcatgtgggggcaaatacaatggtttacaaaacaaagttttatctaccttccttgttctgtgtcttggaactgtttgaagaacattgggattatcttttctgtagaggttaaatagaattgagttgtaaaaccatctgggcctgatacatgttttataggatatctttagtaatttctttttagtctgttttatgatatgttgttctaaattagtttattgcatcttytggagtaatttattcattgctatttaatttcctcaagcatttcaattgtgttgccacttggtagcaactgattttttcctttagtgattttatggtcttctctatcatctcttcgtttttcttttcctttatgcctgaacttttgtggtttttctccttttttcttaatcaagcacatgagaaatttatgttttatttatattttattatcagaaaactatctttgtactctttgttatctatttcattaatctaagcttttatagctattaattcccttttcttggctaactctatttttgttttcttttacttaagagtcatagttcatttatttgaagttcttctactaaaggcatttttaaaggctataaattttcctctgattgcagctttagctgtgacacgtagatctgattatgaaatatgttccttttcattgctttcttgatagttttaattttgtgttttgatttttctctttagagttcttttaatgtcttcttaatttttaagcagtaaatttttatcactgttatttatttctaatttagtaggcttacagtgaaaggatgtagcctatgaagtctccactttttttaaaatgaagattttctttgtctccaagtatgaaaataacatcattatttttgtaaatgctccacagacctcagaaaatatcttctgtatttgtataacacaaagttttatttgtatacatggacagacaaaatgtacattgagatggattgtgtatacatacttattcattgcctcatttaggtctgctctgcccttagttaaaaaaaaaaaaccctaatacatctgccaaattctgagacaggaaaattaaatcttcctgtacaattatgtttctaaaaattgagtggcaggtttcatggagtggtttggagcacagcctatatggccaaccttctttagggtcatagcccagctctgccattttcttatgtggccctaagcaagctactgcattctctgtgcctcagtttccacatctgtgaaatcaggatcctaactgcctgctcccaggactcctgtgttgactgagtgagttagaacatgtaagtgctcacccaggacccatatgcagcaaacagtcttgtgtctctgtctgctgccaaattggcctcaggctctatcaataccagatctgaataggggctattctttcttttagtgtccttaatgttgtattactttccaatattcacactttaactttacagatgagtagaatggaatagatgtgtttcagtacagaacttttttcttatgtttgcttgggctcccctcctctctgttacctatgttgataatctaggatttgttgtcttacatttttcctgatgttcatataatattcaatgaaataaaatacatgtgacataatgaaggcattatcattgttttccaaactcacgggatcatatcatacctgctttctgcatcttgtttttctcaatcagtaaaatagtaaaaatgcctctaaggctgctgaaacaattttattttgatttaattctatctctaattgaattttatttctatttcaattctattctaaaatttataatctctgcttaatttcctttggtgtacatactctgtgatgttctctatcgcttaaaattcattttgttcaagaacataggttcttgaacctgtttctatgtacagaacttttatttctatgtgttaactttccaggatgtattagtttgctaggactgccataacaaaataccacaggctgggtggcttagacagcagacatgtatttctcacaattctggaggatagaagtctgagatcaaggtgtcagcaaggctgctttccctgaggcctctttccttgccttgcagatggccgccttcttcctgtgtcatcacatgaccattgctctgggcacttgcaccctggtgtttctctgtgtgtccaaatatccttttctttaagggcaccagtcacactggattagggcccaccctaacagcctcattgtagcttcatcacctctttaaaggtcctgtctccaaacatgctgagtcacgtgccgaggtattaaagaccagggcttcaactgcaaaccttgtgggacacaattcagcccgtgacacaggaataggcttgttaatttcagtgatgtagccaggttgtttttctcgttttgtctgaccttgaattccacaggcagggttcctctttcccggccggcattcctgcccaccagtcctggcagagtgacttattgtcagccaagtggggcagagtttctccactgtacctctattgaaatctagtgccggataattctttgttgagggaggaagtcctgtctattgcaggatgtttagcagcatctccggcctcagttatgaccaccaaaaacatctccacatgttgctacatgtcccctggagggcaaaattgcccccagttgtgacctgctgagctaaagcagtccctcaggattgtttcttaaaacaaaacaaactgtttatttggccataattttgaactacagaaaaattacaagcacgagatataaaaacacctacatacccttcactaagatttaccagtttactaattgttacattttgccacatttgctttatcatttgaacccctttctctacattatattcacataacatgtttttctgaaacatctgtgagttgcatactccacagctctttgcccctaaacattttgctgtgtatttctgaaaaataaagatattatctttgaaagcagtwatacagttattgacttckgcaattaaamwtcaatatwatacttggacctaatttaatgcstatggttcccattttgtcagttgccatgacaatgtcctttgtggcatwttttcctccactgcaagatccagttcagggtcagtactgcctttagatgtgtctcttcagtcttgtttaatctggaacatttctagtctctttctctgttatgacactgatattttttaaagatacagtcctgccacttcttgggggagtctgatgtttcctcaggttagatccacgttgtgtactctgtaagtgacctgatgtccttctcagtgtatcacatcctgaggcacacagtgtatctgccccttattaacgatgttattttgatcaccaaattgaggccgttatccacttttctaccttacagttactatattttgccttgcaaccaataaacaatcgggggagattctttaaggccatgcatataccctgctacttgttaaaaaaaaaaaaaaagtctctccagatttaaatgcttttggaaaccaggctttactgtggtagttgcaaaaatgatcattttccaactctagcaccccttccacgaaagtacagaaagaaaaaaaaatactgtccagttggaatggttacctcattgtggttttgatttgcattttcctaatgatgctgagcatttttccacgtgcctagtgcccaattgtgtatcttctttagtgaaatatttattcagatcttttgcccgtttaaaaaaatgagactttcaagctttttatttttagacattcatatgcagtggtaagaaataatagggatcccatgcaccctttagttagtttccgtcagtggtagcatcttctaaaaccatagcacaatatgataaccaggatgtcaacagcaagagtccagatgcagagtgctcccgtcgccacggggttcccattatttgtccttttacacggactttctcccatcccatccctccaatccctggtgaccactcatctgttctctgattctctagttttgtcttttcaaaaatgccacgtaaatggaatcacacaatacacgatatcttagaaacggggtcttttggctcggcatcattctctggattcattccggttgttttgtatcgcgacagttcattaaatcatagtgctgagtggagtttcacggtatggacatataccccagtttatttaaccattccctcatccaaggacatgtgggtcattcccagtttgggctattacaaatcagagtaggctgaacaatggcccccaaagtagccaggtcctaacgcctagaacctgtgactatcgccttctatggcaaagggcactctgcagatgtgtcaaattaaggaccttgagatggagagatcatcctgggttatctgaatgggcccggtgtaatcacaagggtccttataacagggaggcagaagaatgactacagaagagaaaaagggttacgtggccacggaagcaggggcaggaaatggcaatgtgatttgaggaaggggtcacaaaccaaagaacgcttccagaagaaaaggcaaggaaagggaagggatgctcccctgaagcctccagaaggaaccagccctgctgacacmttgatttttcgtcccctaagactcttttcagacttctggcctctagaactgtgagaaaaaaaaaaaaagcgtgtcttgttttaagccactaagtttgtggaaatgtattacagcagccatgggaaccttatacattgataaggatgacatgaatattcttgtaaggttcttgtgtgaacataagtttttatttctttgggataaaagcccaagcttgtaattgctgagttgtgtggcagttgcatgtttagttttataagaaactaccaaactgattttccagagtgactgcaccatttcacattccccattcctgccagcaaggtctaagtgatctagtttctctgcattcttgctggcatttgatgttcacactgtttttaattttctccattcagataggtgtgtagtgagatctcattgtggtttacatttacatttcctcattaggatgatactgaacatcttttcatgtgcctgtttgccatttttgtattctatgcagtgaaattcttgttgatatcatttttccatttcccaattagactttttgttaactgtcgagttttgggagatgtttatatattctagatacttatcttaagtcagaaacagggtgcaaatatttattcattgtagctttcattgtcatcatctcaacagggtactttacagagcaaacattttaaattttgatgagattcaatgtttcctttttatggattacacttctgatgtcaggtctaagaagtctttggccctggaccccaaatatcttctgctatagcttttttctaacagccttgtggagatatagtttacataccatacaattcacccatttaaagaatataattgaatggtttttagtataggcatacctcagagatattgtggttcggttccagtacactgcaatgaagcaaatattgcaataaagcaagtcacacaaattttttggtttgccactgcatataaaagttatgtttatattgtagtctattaagtgtgcaatagccccatgtctaagaaaacaatgtgcctaccttaattgaaagacactttattgctaaaaaatgctgacccagaatgaagtgagcacatgttgttggaaaaatggcactgatagacttgctcagtgcaggcttaccacacacatttaattttttaaaaacacaatatccacaaagtgcaaaaaagtgaagtgtgcctgtgtatccccagagctgtgcaactgccactccagtttgagaacatttttatcattccaaaaagaaacccagtgccttttaaatatcacccccaaacccactattccatccccctcagccctaggcaataactaatctttctctctatgggtttgcctattctggacattttatataagtggaatcatacaatgtatggtcctttgtgactggttactttcacttagcatcatgttttcaaggtttgtgcttcagtgcttctttttttttccccgagacagagtctccctctgtcgcccaggctggagtgcagtggcgcgatgtcggctcactgcaacctccgcctcccgggttcaagcaattcacccgcctcagcctcccaagtaggtgggattacgggcacatgccaccaagcccggctaattttttgtattttagtagagacagggttttaccatgttggccgagatggtctcgatctcctgacctcgtgatccacccgccttggcctcccaaagtgctgggattacaggtgtgagccacagcacctggccgataactatctttttgaagaactgaccaattatttccaaagtgggtgcctcattttacattctcaccaccagcatatgagcactgcgcaagttctccatatcctcaccaacacttgctattatcttttttcaattatagccatcttagtggttgttaagcagtatctccttttgggtgtgatttgcatttccctgtgactactcacgttgagcatcttttcatgtgtttattaactatatgtcaaccctgaagaaatttctattccgatttttcatccattctttaagttgggatatttgtctttttgtttttgagttgaaggagttatttatatatccagtaacaagtcccctatcagatagattatttgcaaatattttctcccatctgtaggttgtcttttcactttctttaaggtgtcttttgaagcacaaaagcttttaatttttatgaagtccaatatatctactttttttcttttgttccttgttctttggtgttatatctaagaaacctctgccaaatccaaggtcataaagatttacccttatgtttaccctaagaattttatagctttatctgttacgtatttatgtctttgatccactttgagttaatttttatatatgatgtggagtggaccaattgatttttctcatgtggatatcagttgtttcaacactatttgttcaaaagactattctttccgcattgaacattcttggcatccttgtcaaaaatcagttgaccatagatatatggctccgtttttacactctgattctattcccttgatctacatatctatctcatgccagtatcacattttctcgaatactgttactttgtagtcaatttggagatcaggaagtatgaagcctccaacttttctttttcaaaattgttgctattctgggtcctttgcattttcatatgaagttgaacatcagcttattattctacaaagaaaccagctgagattctggtaaggattgtgttgagtttgtagatcagcacgattccgggagtgttgccatcttaacaatattaagtcttccagtctatgagcatgtaatgtctgtccatttatttgtatcttcttttctttcaacaatgttttgtaattttcagaggataagttttgtacttgttaaacttattcccaaggtattttattttttctttattatggtaaaaatatacataaaatctactattttactcattttaagtatatagttatgtggcattaggtaaattcgcactgttgtgctttattcttttttgatgttatacatggaattgttttcttaattatattttcagattgttttttgacagtgtgtagaaatacaattgatttttatatactgattttgtctcctgcagccttactgaactcattcgttgtaattgtttcacaatggattccttggggttttctggatacaacattagatacggtttggatgtttggtccctccaaatctcattaaaatgattcccaatgttggaggtggggtctggtggggggtgtctggatcatggacggagccctcgtgaatggcttggtaccatccccgtggtaatgagcgaattcttactctggtagtttatgctaagagctggttgtttaaagaatctgctacctccctccaccttgctcctgctcttgccatgtgatatgcctgcccctctgcctttcgccatgattgtaagcttcttgaggccctcaccaggagcaggtgctggtgccatatttcctgtatagcctgaagaactgtgagccaattaaaatcttctttataaattacccagcctcgggtgttcctttatagtaacacaaaactggaccagcacaaatttatgtcatctccaaatagttctacttctttctttcagtctggattctttttcttcccaaattatcctggatggaacactcaataaatgttgaatagaagtggaaagagcagatctctttgtctcattcctgatcttaacggggaaacattcagtcattcactgttaagtatgatattatctgtgattttttttttttttttttttttttttttgagacagagtctcgctctgtcacccaggctggaatgcagtggtgtgatcacggctcactgcaagctccacctcccaggttcacgccattcttctgcctcagcctcccgagtagctgggactacaggcgcatgctgccatgcctggctaatttttttgtatttttagtaaagacggggtttcaccatattagccagtatggtctcgatctcctgacctcgtgatccacccgcctcggcctcccaaagtgctgggattacaggtgtgaaccactgcacccggccaactgtgatttttaatagatgccctttatcaggttgaggatgttcctttctattcctagtatattgagtagggctttttctcccatcatggaagggtgttgaattttatcacccaaatgcttttctgtgtcttttattctatcattaattgctatagactgaatgtgtgtgtttcctcaaaatgtatatgttgaaatcctaacccccaatgttggtattaggaggtgaggcctttgggaagtggttaggtcatgagggtggagacctcatggaatggattagtgcccttgtaaaagagacctcagtgagctcctttttttcttccgtcatatgaggacacaagaagacaactgttcatgaaccagaaagcgagtcctctccagatgctgaatctgccagtgccttgaccttggacttccaagcctgtaaaattgcaaaaaataaatttctgtgtttataagccaccagttcgtgatactttgttataacagtctgaacagactgacagaaatcgtggtgttttgtcttttattctgttgataatggtgtattacattaattgattttcagatgttaattcaaccttgcattcctgaaataagtcccatttggttataatgtataatcctttttaaacattgcttgattttacttgctagtattttgttgagggttttgagggttttacatcattttcatcacagttattgtaatgaaatacaaaaatcaatagtattcctatacactgtcaaaaacaatctgaaaataagaaaacaattctatttacaacatcaagaaagcataaagcacaatagcgtggatttacctaatgccacagaactatatacctaaaatgggtaaaataaattttataagttctcttttcatgtttttgtctggttttggtgtcagggtgatactggactgaaagaatgtattggaaaaattttccttctcttctatttttttgttgttggaagaggtcataaagaattgatattctttagatatttgttagattcactcatctggccctcttgggcttttcttttcaactagtgttctcataactaattcaatctctttaacttattacagatccattcacattttctacttatttcttagtcagttttcatagttttcatctttctaggaatttgtcaatttcatctaagttttataatttattggcacaaaattgttcatagtgttccttcataatcctttttatttctgtcaggttggtagtatacttccctcattcattcctttttccttttctttttgagaaacagagtctctctctgttgcccaggctggaatagagtggtgtaatcatagctcactgtaacctcgatctcctagtctcaagtgatccttgccccttagcctatgacaggtgtgcaccacaacaccagctgttattcaaaaaatattttgtagagatagggtcttgctttgttgtgcatgctattcttgaactcctggccacaagcaattctcgaactcctggccacaagcaattctcctgccttggcctcccaaagtgctgggattacaggtgtgagccactgcagctagcctcgtttttttgctttaatttgtaaaactgtcattcatttctgattttagtaatttgagttttctctctccccctttgcctcatgcacttccctctctgtctttcctcctccccctctttcttcctccccttcttttcttctccctctccctctctcttaccaatctatcaaaggtttgttaatttcaaagaaccaaattttggatttgttgactttattatttttatattctatattttatttctactctaatatttattattttgttttttctacttgctttaggtttagtttgctcttctttttctagtttcttgaggtggagagttggcttactgatttgaagccttattttttgatataggcattcatagctataaaattccatctttacactgctttaaatgtatcccataagttctgttatgttgtatcttcattttcattaatctcaaagtacgttccatttcccttgtgaattctttcacccattgattatttaagaatgtagtgttgtttaatttccacatgtgtatgtttccctaatttctttgctactgagttctacttttatttcattatattcagaaaaagataccttgtattatttcaatccttttaaatttatgcaggtttgtttcgtgacttagcatatggtccttcttggagaatgtctcatgtgcacttgaaaatactgtatattcaatgttggttgttgggcgaagtgctctataattaccttttgagtctagttggtttatggtgttgctcatatcttctgtttccttattgatcttctttcttgtactacacattattgaaagtggagtgttgaagtctccaactactattgttgaattggctatttctctgttcagttctgtcagtttttgcttcttatgttttagttctctattgttaggtgaatatatgtttataatcattgtatcttctcatgaattgacattttatcattatgagatattcatatttaacttcagtaacattcttaatttaaaatctcctttgactttattatagcacttcaggttacttatggttgctgcttacatgatatatctttttccatccttttactttcagttggcatttatcatctaaagtgtgcctcatatagatggaatacagatggatcctgtttttcaaatctggtctgataattcctgcctttgattagattgtttaatccattcacatttaatattattattgatataattagatttatatccacagttttacttttggtcttttctatgtactatttcttgttcctctatttctcctttgctgctttcttttccatctagtgactactttctaatataaatcttcatttcttttatgattcttcaatattctatttgttattagtgtttgctctagggcttaccttatgtatcgtctcaaaatttacttcatatttatattaatcctggtgagatacagaagttattcctgtatgagtttattcagttttaccactttttgtggtattgttacatatattacatctttattatgcgctattataatgatcatactatataatgatatatctttaaagaagctgaaaggagagcaagtatatatttctagtttctgttttattaacctccttatatcatatatttgatccacttttttggtttttatggatttgagttaccaactggtggtatttccttactctagaacagctttgctcctatttacctccttgctctttgcttttggatatatgtgaacttcctgggagcacttcctttttgcctgaagaacttcctctagtagttcttacaaaactggtctgctaacaaggaattctgtttttgtttatctgggaatgcttttattttgccttctttttgaaagaaacttttctggacacagtattcttggttggctttttttttttttttttttttttttttttactttgagcacttgggatctgttaccccactactttctgggtaccactgtttctgacgaaaagtcagctccacatttgtctccctgacaccagaacaggggagggtattaagcagagtgccacatagcctcacctcccaccatttcatccaagaatagtagttgggtaatagttcaataactcactctgaataattgatagaacaacaagacagaaaatcaacaagagttagtactattattgttgagttgtctattattgttcagttgtctgtttctctcttcatttctgacagttttatttcatatacttcagggctgtgtttttagctgttataaatttttatttctttatgacttctgtttatgatttctatttcttcctgttaaattttcccttttgtcattgtaaaatgcttctcagtatctctaataacatggtttgtttttaaagtctattttgtctgattttatttattcttattttatttttgggatggagtctcactctgttgcccaggctggagtgcagtggcgtgaccttggctcactgcaacctctgcctcccggattcaagccgttctcttgcctcagcatcccaagtagctgggactacaggcatttgccaccatacccagctaatttttagtagagacagagtttcaccatgttgaccaggctggtcttgaactcctgacctcgagtgatctgtctgcctcagcctcccaaaatgctgggattacaggtgtgagccactgcacccagccaattttgtctgattttagtacagtcactctagctttcttattactgtttgcatgtcatctttttccatcattttactttcaactatgtctttgaatctagaatgtgactcttatagaccatatatatttggatcctgcttttaaggcagtctggcaatctctgctctttattgagtttttaattcacttatatgtaatataattattgatatggaaggatttatatctaccatgttgttatttattttctatatgtctcatatcacttttgttcctctcttcctcctttactgccttctgcaggttgaatagatatgttctagagtaccattctaattcctttgttagtttatttcccccatttttaaagtgtaatctggaggttacaataagcagcttaagcaaaaacaatctgcttcaggttaataatctactcaaatatttttgtctgccctattctctccttctcagtactcttattaacacatatgttgttactccttaattccacatatgttttctactcttaattacatatatgttacaacttaattacacatacattgttacacatcctgttaggacaggggttcccaaccccagggccatggactggtaccagtctgtggcctattagaaactgggctacacagcaggaggtgagcagcaggcaagcaagcattactgcctgagctctgcctcctgtctgatcagtgatggcattagattctcacagagagcaaatcctattgtgaactgagcatgtgagggatctaggttgtgcactccgtatgagaatctaactaaagcctcccccaactggctgtggaaaaattgtcttccacaaaactggtccctcatgccaaaaaggttggggaccactatattatggtatccaatgggtatctcttcatttttcttcattatttttctttctattcttcagtctgaatcatctttatggatctgcgttgaagttcattgattctttcttctgccaggtcaaatttgcttagccgcactagtgagtttttcacctaagttattatatttcacaactacagaatttctatttggtttctaatttctatctctatattgatattatctatttgatgagtctttgtcatcacacttgcattctttaatgtggtttcttttggttctttgaacatagttataatacttactttgaaatcgcgccctaacatttggggcccttcagagataattcctatttattgctcattattcttgttcaagggtcacaattttctgtttctttgcatatctcattttttttgttaaaaacttactttagataatatatcgtagaaactctggattctagttcttctccctaaccagggatgatttctgttactcatttatttgtttgctcgcttgtgtatgccttctctgcatggattctgcagagtctgtgttctcctgcagtgtgcagccactggtgtctttgctcagttttgtttgttttaattcttatgtttgttttgtaagcctggcttcattggtgtcacccctggatcagcataacctagtggtcaagccatgattagtcagacatttgtttaaacatcttgagccagtgaatcttccaccctctgctgaggggatctatgtgtgggttgggacattcaaagttcaggcactttataactctgtcctgtattttactgtctgcttgcaaaaggtctcacagtcagccaaggataagtagatagcaggaaacctctctgatctctcctgcaagcatgtacaacttccatatctccagaattccttttaaaatttttcttaatctgtcgcttgcccaaccagtattgaaacattaggttgctgtgatgtgggttgcctccaattatttgccactgaaatccttgttgcttaacatagtgcatagggttttctatggaattcaaaatcagatgagccttctttgttgctggtcctcaagcctaccgtgcccctgagcttgggtggggagatggcagccccacgttaaatcataaccctgctattcttaggaaggcttaatattttttctttaattagcacttttcaattttatatttctttgtccagttttatcattgcttttcagggagtggttatatcaaggtgctcattccaccacctcagaagtggtccctatcttgttaattttattttttgaatacatataacattaacatacttccaaaagtcaatactaaacaaaaggagctactgagagaaatcttcctctcacccatatctcttccatcctaattccccctacccattataggtaaccagtttcagtgttttctagtttatagtttgtgtgtgtttgctctttataagacatgattattttctcatttcccaaaaaagtactattctgtatatgcccttttgaactttgcttttctcacctaacaacatctcctagaaatcactcaacatccattcacagagatctttctcattgcattgctaaagttgcatagtattccttagtgtgactgtgctataacctttcaaccaatctcttatgcttgcatgtgtaggtggtttctagatggcagctatgctcaccattctttggctttcctaccatgtctctgagatacatctactccataaatcgaatctacccccaagaggtgattctctgagggtgccacctcaaatcttagtcatttgcaagagcctccactatagctgctgctctggactacctatttctgacatgtgttctccatgttgacatttaatatagagtcttctttttctggtgataattctgtctgtgctgctttttagtcttctgtgcaccctttaaattttttaagtaacagaaaccatttcaaaatgtacaattcagtgtcacttagtacatttacaatattgtgttttttgtgtcttttctaagaatttatttccaatctcaagtcataaagatttactcctgttttctactaagaaatttatgcctttaactcttattttttggtctctgatacattttgagataatttttatatgctatgagttatgggtccaacttcattctttgatatatgaggatccagttgccccagcaccatttgttaaaagactactcttcccactgaattcttgatacatttgttgaaaatgaattgatcatatatgtgagtgtttatttctacattctctattatattccattggtctatatgtccatccttgtgtcctagagaccacattgtgtcagtaccacattgttttgattactgcagctttgtaaaagttttgaaaatggcaggcctgagtcttccaactttgttctttttcaatatgattttagattgtttggggccctgggaaaattccatttacattttaaaatcagtttttacatttctgcaaataaaaaggcccttgggattttgataagggttgcattgaatctgtagatcactgggtaatatcgccaacttaacaatatttaatcttccaatctgtgaacacaggatgtatagttctatttatttaagtcttctttaatttttgtcaacagtgttttgtagtctttagtgcagaagtctttcaccttcttgttttaatttattcctagctattttactctttttgatgctattgtaagtggaattttaaaaattgacttccttcttgggctgttcattcctggtatatagaggcacaaatgattttcttaaaataaatgttgaacatgtaccctgcaattttgctggacttgtttattagctctactagtttgtggattctttgattttctagatagaagatgtcattattgaataaagagttttactgcttcctttccaatttggatgctattcatttacctgtttgtttatttatctgcctaattgtcatggttaaaactttcagtacattgttcaatagcactgggtaaagcatacagccatatcttactctttgttatgggagaaatttttcagttttttttctcattaagtatattagttgtggatttttcacaaatcctctttaacacattttgaaagttccatgtttttatcctgaaaggttgtagaattttgtcaaatgcttgttctgagtgaattgaaatgattgcatggattttttatccttcattgtattaatgtggtgtattacattgattgatactcttgtactgaaccacccttgtattcttgagataaattccatgtggtcatgatatataatcctttttaatatgctgctgaatttggcttactagtactttgttaaataaaagattttagtatctagtttgtcttttcttgtggtatatttgtctggctttggaatccatgtaatactggcctcatagaatgtattgcaaagttttttctcctctgttttttggaagagtttgagagggattggtgtgaattcttcaagtgtttggtataattcaacagtgacgccatctgtgtagcattttcttcattggaaggtttttggttactgattcaaactttctacttgttatgggtctgctcataatttcaatttctgttttggtctgtattagtattttgtgaattcgtccatcttatctaggttatataatttgttggtatacagttattcatagtattcttttatcacactttttatttctgtaagatcagttatatcgttcccacttttgtttttttttcttatttttgtttttttttgttgtgttcctacttttgtttatgattttagatatgtgcaacttctctaattttttattagtcattctagttaaaggttttcaactttgatcttttcaaaaacaagcaacttttggttttgttaaattatctctgttgtttatttaagctcgaattcagttttatctccactcatacatattatttcattctctcttttaactttaggtttacttcgttcttctttctctggttacgtaaggtataatattaggttatggatccttcttctttttcagtgtgggcattcacagctataatttttcctctgagcacttctttcactacatcccataagtctgagtatgttgtgtcgtcattttcactttttgaaagtattttataatttcccttctgatgtcttctttgacacaataatttttaaagagtgtgtagttttatttccctgaatttgttaatttttaggtttttcttctgttacagatttctggcctcactatattgtagttagagaagatattttgtatgatttctatattttaaaatttattgagactcttttgtggcctaacatatcatccctcctagggaatgttccatgtgcacttgagaagaatgtgtagttgggtggagtgtccatatatgtttgtaggtctagttggtttatggtattgttcaagtcctctcttttcttattgggcttctgtctggctgtacattatcttgttgtgttttttttttttaattttaaaaatatgcatatttagtgtataaaacatacagttaaatcgttaacatagtgatgcaaattaatatgtccatcatctcacagttattcttttgtgtgtatgagtgagaaaagctatgatctactcaattggcaaaaattccaaatgcaatatactaactattctcatgttctacatgagatctctagacttgttcatcctatatatctgctacttggtatcctttgacctacatctttccattttcttcccccacaccttgcccatggtaaccactagtttattctatctctgtatatttgacttttttctttttaagattctacatataggtgagattatttaaaacttttcatttgtatatggcttatttaacttagcacaatgtcttccagtttcatccatgtggcaagtggcaggatctccttttttaatgcggaataatattccattgtagacatacacaccacagtttagtcatccatcaatggacacgtaagttttcatatcgtgactcatgcatataatgccacaatgaatataggagcgcagatatctttatgaggtggagatttcattttctttgggaatatacctagaagagggattagtgggtcagatgatagtatattttcaatttctttaggagccaccattctgtttttcattatgactgcaccaatctacagtcccaccaacactgtacaagagttccctaaccctagccaacacttaatagctattctcatgagtgtgaggtgatatcgcatagtaattttgatttgcatttccctgacgattagtgatgttaaatgtcttttcatatatgtgtttgccatttttataacttctttgcaaaaatgtctactcagttccactgcccattttttaattgggttatctattttcttgttattgagttgtatgcattccttataaattttggatattatcctcttataagatatatggttggcaaatattttcttctagtccataggttgccttttccttttgttgactgtttccgttcctgtgcagaagttttttagtttgatggtataccaattatttgtttttgtagcctgagcttttggtgtgatctccaaaaaatcactgccagagccatgtcgagcttttcccctatgttttcttctggttgtgggttttggtcttatgtttaggtcttttatccattttgagtttatttctatgtatggtgtaaggcagcgatatcaaatcttttggcttcccggggccacactgtaagaacaattgtcttaggccacacataaaatacactaacaataacaacagctgatgggctaaaaaaatgcaaaaaaattcaatgttttaacaaagtttacaaatttgtgttgggcctcattaaagccatcctgggcttacatgtggtctgtgggccatgggttggacaagccacagaactgggtttcctaacgtcatttatgagagagactatctttctgcattgttttcttcgtgttcttgtggaaaattggttgatcatatatctttgaatttctttctgggctctctattctgttccactggtctacatgtttgttttttatgccaggaccatactgtttgatcaatagttttgtaaaataaaccagaaagtatgaagtctccctttgtttttcagaacagaattttcagaatttcgttggctacttaaggttcttgctattccaaatgaactttagaatttaaaaaaattttccatgggattttgatagggattttattcaatctgtatattgatttggatattattgacattttaacaatattattcagattcatgagcatgggatatctttccatttatttgtatcttgtttaatttctttcatcaatgattcatagttttcagtgtacaggtctttcatctttttggctaaatttattcctaagcaatttttttgatgctatcataaatgggattgttttcttgatttcttttttggccaggtcattatttgtgtatagaaatgcaactactgttttatattgattttatatcctacaactttactgaactcatttattagttctaacaggttgctttgtcagagtcttcggggttttctatatgtaggatcatgtcatcttcatataaagataatattacttcttacttcctgatttgaatgtctttcatttctttttcttgtctgtttggttgtactagtacttccagtactatgttgagtagtagtagctagagtgggcatccttgccttgtactggttcatagtagaagggcttctgttttccctcattgattataacgttagctgtgggcttttcataaatggcattcgttatattgaggagtgttccttctatacctgaactgttagaatttatcaacaaaggatgttcaacttcatcaaatactttttgtgtgtcaattgagatgatcatgtggttttcatctttcagtctgttagtatcacattgattgctacatgtatattaaataagatttgcatgccagaaattaattccacatagacatgatatataatctttttgatgtattgttaaatttagtctgccaatattttattaaggatttttgcatcggtattcttgggttatgttggcctgtagtttccttttcttgtgatgcctttggctcacctgggtatcaaggtgatgctggcctcataaaatgtgttaggaagtattccctttagctgcatttttttttttttggaagtattccctatagctgcatttttttggaagagtttaagaagtattggtattctttgaatattgggtagtattcagtcatgaagctatctggtcctgggcttttctttgtttgaggttttggggtttttttaacttttatttttgatttagagggtatatgtacaggtctatatgttgcatggtatatggagtatactgcatgatgatgaggtttggagtgtggataagcctatcacccaggtagtgagcatagtacccaataggtaggttttcagcccacctctccattcctcccccaagtagtccccagtgtctactgatcatctttatgtccatgtttactcagtgtttaggtcccacttgcaagtggtaacatgcagtatttggttttctgttcctgcattaatttgcttaagatagtggcctctagctgcatccatgttgctgcaaaggacgtaagttcattcatgtatatatatatattttttttttttattttttttttagacggagtttcgctcttgttgcccaggctggagggcaatggcatgatctcggctcactgcagcctccgcctaccgggttcaagtgattctcctgcctcagcctcctgagtagctgggattagaggcatgcgccaccacgtccagctaattttgtagttttagtagagacagggtttttccatgttggtcaggctggtctcgaactcctgacctcaggtgatccacccgccttggcctcccaaagtgctgggattacaggtgagagctaccgcacctggccgaattcattcatttttatggctgcatagtattccatggtgtacatgtaccacattttctttatccaatccaccactgatgggcatctaagtggattccatgtctttgctgttgtgaatagtgctgtgatgaacatacaaatgcatgtgtctttttgatagaacaatttattgtcctttgaatatatatccagtaatgggattgctgggtcagatggtagttctgtttttagttatttgagaaaactccaaactgcttagcacagtggctgaactaatttgtatttctgccaacagtgtataagcgttcccttttctctgcagccttcccagcaacttttatttttttgactttttaataattgccattctgactggtgtgagatggcatcccattatggtttggtgtttttttgttgttgttgttttgttttgtttttttttgtctgttttttgcttttttgtttgtttgtttgttttttgagaaagagtcttgctctgtctcccaggctggagtgcagtggcgcaatctcggctcactgcaacctccacctcctgggttcaagcaattctcctgtctcagactcctgagtagctgggattacaggtgaccgccaccatacctggctaatttttgtgtttttagtagagacggggtttcaccatgttggccaggatggtctcgaatacctgaccccagatgatccacgcacctcagcctcccaaagtgctaggactacaggcatgagccaccgtgcctggcctcattatttgcatttctgattattagtgatcatgagaatgtttttttgtttggctacttctgtattttcttttaagaaatgtatgttcctgtcctttgccaattcaattggattattcgttttttgcttgttgattggtttaagttccttatggattctggacataggacctttgccagatgaatagtttgcaaatattttttctcccattctatatgttgtctgtttactctgttgataatttcttttgctatgcagaagctctttagtttaccactgtgatctctttgctattggtctgttcaggctttctattcctgatttaatcttagcaggttggtttttttctaggaatttgtccatttcctctaggttatccaatttgttgggatataattgttcataaaagtcccttatgatcctttttatttctgaagtacctgttgtaatatattctccattttcatttctgattttgtcctctttcttagtccaagagtttgttgattttatttttcaaaaatcaattctttgtttcaaaaattgaagtcttagttttactgacttttttcccctatggtttttctttctaacttgtctctgttctgatctttattatttccttctgttaactttggctttagtttgttcttctttttctaattccttgaggtacaattttgggctatttgaaatatctcttcttttttaatgtaggcaaggcatttattgctgtaaacttccctcttagaactgcttttgctgcatgttttgcttttggtatgttgtgttcccactgtcatttgtctgaagatatttttaagtttctgttttcatttcttctttgactctacccattactgaaagtacgttattgaagtccctaagtattattgtagaactgtctttctcactccaattctgtcagtatattttcttatattctggggctctatattttggtgtgtatacgtttccaattgcgaagtcttgagtaattttccattttctcagtatgtaatgtcctcctttgtctcctataacaatttttaaattcaagtttatttcttttattagtataattacctccagctttctttaggttactatttgtatgaaatatcatttttcattctttcactttcaatctacttgtgtctttagaccaaaagtgagtttgttatatacagcataggttgatggttttcttttaaatccattctgccaacctctgctttttggagaatttaatcgacttacatttaaagtacttacttataaaaaagaagttctgacattttgtgccttttcttttgccttacattttttaaatacaacatttcctcccttactgcctttttttgtgtttgatgattttctgatagtgtaccattatgattctctattcgattgtctgtatgtgtgtatgtgtattttaaagactttatatttttagagcagttttagggttccagcaaaattgagaggtaagtacagagatttcccgtatacccactgcacccatacatacagagcttttcccattaccaactctcccaccagagtggcacgtttgttacaacttatgaatctgcatttacacattattatcaaagtccctagttaacattagggctcactgttggggtgtacattctgtgggtttctacaaatgtgtaacatgttgatatggtttggctctgtgttcccacccaaatctcatcttgaactgtaatccccatgtgtcaggggaggggcctggtggggggcaaacttcccccttgctgttctcatgatagtgagttctcatgagatctggttgtttaaacgtgtgtggcacttcccatctcactttctttccctctcctgttctgccatggtaaagatgtgcctgcttctcctttgccttccgccatgattttaagtttctgaggcctgccagccatgcttactgtacagcctacaaaactgtgagtcaattaaacctcttttctcacaaattacccagtctcaggtagttctttatagcactgtgagaacggactaatatgcatgtatctaccattatagtatcatacagatacgtatatttacatatatttgtacattttcactgccctaaaagtactctgtgcactgcctattcaacccttcttccccaacaacccttggcaaccactgaactttttactgcctccatagcattgccttttctaaaatgcaatatgattggaatcatacagtatgtagtttcttcagattgccttatttcacatagtaatatgttttttaattacctccatatcttttcatggcttgatagctcatttctatttagtgatgaataatatttcattgcctggatgtactacagtttatctgtctactcacctatggaaggacatctcggttgcttccaatttcaacaatcacaaataaagcttctgtaaacatctctgtgcagatttttatgtgaatataagtcttcacctcctttgagtaaataccaaggatgtgattgctgaactgcatggtaagaatatgtttaattttataagaaaccactgatttcgatatactctggattcttcgggggatatgtatacacattcagaagtggaattgatggatcctatgataattccatttttaattctttgaagaaccaccaaactcttctccaccagggctgcaccactttacattcccattaatggtatatgtcaaagtggctgtaccattttgcattcccaccagcaatggatgagtgttcctgttgccccacatattggcaagtatttggtattgtcagtgttttgaattttggccattctaataagcgtgtagatatatcacatttcttgttttaatttccatttccctaatgacgtaagatgtggggcatcttttcatatacttagttgccatctgtatatcttcattggtgagatgtctgttaaggtcttcagtccattttgtaatcagattgtttgttttctaattgttatgtttttaaggttctttatatattttggatgagtcctttatcaggtatatcttttacaagtattgtctcccttctgtggcctgtcctttcatcctcttgacagtatgttttacagagcagaaacttttatttttaacaaagtctagcttatcaattatttctttcatgaatcatgcctttggtgtcatatctaaaaagccatcaccaaactaaagatcatctagatttcttcctatgttatcttctgggatttctatttgttgttgatttccaaatcttttattgtggcaaaatacacttaacataaaaattaccatcctaaccaattttagtgtacaattcagtgaatgtattagatacgttcacaatgctgtgcaatcatcactatcatccatctccataacacttgtcatttgtaattatgaaactctatatccattaaacaataattccccaacccccccaccaccgccatctcttggaaaccaccttgtactttctatgtctctgatttgactattctacatacctcatataagtggaaacatacagtacttctcttcttgtgactgctgtatttcatttaacataatggcctcgaggttcatccatgttgtggcatgtgtcaaaatttctattttttttaaagctgaataatattacattgtatgtatataccacattttgcttatccattcttccatggacatttgggttgcattgatgttttaactgttgtaaataatgccactacaatcgtgggtatacaaatatatctttgagactgcttttaatccttctgggtgtatacacagaggtggagttgatggatcagataattctgtttttaatttttgaaggaacaccaaactgtttaacacagaggctgtaccattttgcattcccactaacagtgcacaaggattccaatttctccatgtcccttccagcagtggttattttctgtttatgtgggatttttttgagacaagatctggctctgtcacttaggctggaatgcagtggcatgatcatggcacactgcagcctcaacctagacctctgggcttaggctatcctcccaccttaacctcccacgtagctgatactagagatgggtctcactatgttgcctaggctgtgtttatttttttaatagtagtcatctgagtgtatgtaaggttgtggttttgacttgtatttcctaatgactagagatgttaaacaacttttcacgtactattatccatttgtatatcttctttggagatacgtctgtccaagtcctttgcccttttttttttttttttgagatggagtctcactctgttgcccaagctgagtgcagtggtgccatctcggcttactgcaacctctgcctcctgggttcacatcattctcctgcctcccgagtagctgggactacaggcgcccaccaccacgcctggctaattttttgtatttttagtagagacggggtttcaccctgttagccaggatggtctcaatctcctgacttcatgatcctcccgcctcagcctcccaaagtactgggattacaggcgtgagccaccgtgcctggcccttttgcccatttttcaggtgcattgttttttggtgatgacttttagaagttctctgtataatctggacattaatcccttatcaggtatgtgatttgcaaatttttctcccattctgtaggttgtcttattgcttagttgatattattttaatgcacacaatgtaaatttttaaaatttatctagttttacttttattgcctgtgcaagtacaatttatctatttttacttttattgcctgtgcctttggtgtcgcatacaagaagcactgccaatgatgtaaagtttttcccctatgtttccttataagacttcatagttttaggactttgacccattttgagtaagtttttgtacacagtgttaggtaagggtctcaacttcattctcttttatacatggttaggtaaggatctcaacttcattctcttgagttaatttttgtgtatggtattaggtaagggtctcaacttcagttatcctggcaccatttgttgaaaatacagcactttccctattgaatggtcttggcactcttctcaggaatcatttgatcatgtatacaagggtttatttttgggctctctattcaattccattggtctctacatctttatgtcaataccacatagttttgattactgtagcttcgtaataagttggggtttttgtttgtttttcagacattcttactctgttgcccacgctggagtacagtggcattatcactgcttactgccacctcaatctcccaggctcaagcaatcctcccacctcggcttcttgagtagctgggaatagaagtgtgtaccattacacctggccaattattttattttttgtagagatgaggtctccctgtgttccccaggctggtctcaaactcctggactcagaagtcctcccacctcagccttcaaaagtgctgagattacaggtgtaggccattgtacctggcctgtagtaagttttcaaatcagaaagtgtgagtcctccaatgttgttcatcattttcaagaatgttttagctattcaaggtcccttgagattccatgtgaattttaggatggggtttcttctttctgcaaataacatcattaggatttttattgggattaccttggatttgtagattgttttgtgtggtactgacaccttaacaatattggccttccaatccatgaacataggaggtgttttccctttatgtctactttaatttctttcagcattgttttgtaattttcattgtacaagactttcacctccttggtaaagttggttcctaagtttgttattcttgatgcttttttcagcttttattgaggtataattgacaaattaaaagtgcatatatttaagaacatatttgacctactgtgaaatgattactacaatcaagccaattaacatataccttacatagttgccatgtgtgtgcgtgtgtgtggtcagaatacctaagctatactctcttagcaaattccaagtatagaatatattaactatagtcaccaatctggacgttatgtcaagaacttattcatctgataactctatgtttgtacccttcaacatttcctatttcccctactccctgacccctagtaaccacccttctactctccgtttctctgagttcaagctttttagaattccatatgtaactgggatagtgcagtatttgtctttctgtgtctggctatttcacttagcataatatcctccaggttcatctatgttgtcataaattgcatgatttcctgctttttaaaggatgaatatttcattgtgtgtgtgtatatatgtgtgtgtgtgtgtctgtatgtatatgtatgtgatgtgtttatttgggaatttggtgatacacacacacacactattttcttcctttctttttgagacagggtctccatctgtcatccaggcaggagtacagtggcacaatcacagttcactgtagcctcaacctcatgggctcaagtgatcctcctgcctcagcctcctgagtagctgggaccacagtcatgcacccccatgcccagctaatttttaaaattttatgtagagatagggtatcactatgtttcctaggctggtctcaaactcctgtgttcaagctatccttcaccttggccacccccaagtactgggattacaggtacaagccaccatgcctatgaatactatgttgctcatttcttgactactgtaacactacaatgaacatgggagtgcagatacctcttcaagatactgactttgttttccttagatatacccggaactgagactgctggatcatatagcagttccaattttaattttttaaagaaaatctatcgtgttttccataatgactgtatcaatttacattcctaacaaaaatgtataagggacaccttttctccacatcctcaccaacacttgctatcttttgactttttgataatagcgattctaacagttatgaggtgatatctcagtgtggttttcatttgcatttccctgatgataagtgatgttaagcacctttttatatacctgttgaccatctgtatgtcttctttgaataaatgtctattcagtcccttgtccatcttaacaggttattaattgggttattaagtttttttgctagttatatgagttccttatatatattggatattaatagcttatcagatatatggttggaaatattttctcccgctacatgtgctgccttttcattttgttgtttcctttgttgtgcagacacttttttgtttgatgtagttctaatttatttttgcgttttattccttgtgcttttgatgtcacatctaaaaaattgtcacaaaaaccaatggcaaggagcttttccctgttttataggttttatggtttcaggtcatatgtttaaatcttattcacttttctctacagtgtagggtaaggttccaatttaatttttttgcatgtggatatcctggtttcacagtgccatttattcaagagagtaccctttccccattgtgtactcttggtgtctttgtcaaagattagttgaccataaatgtgtgggtttatttctatgctttctattctgttccattggtttatttctataccagtaccataactttgaaatataattcaaaataagcatgtgtaatatctttcactttgttcttattgctcaagtatgctttagatctttaaggtcttttgtagtttctttcaaattttaggattttttttgtctatatctgtgaaaaaaagtcactggaaatttgataggcattgccttgaatctgtagatcactttgagtagtatagctatttcggcaatatttattctattgatctatgaacaccagatatctttccatttatttgtatcatcttagaatttgttcaatgtttcatagttttcagtgtctaggtcttttatctccttggttaaatgtatgcctaaatgttatgcagtccaatttctctattttttattttatctgtgcctttcatattatatccaaatgaagtcaataccaaatccaatgtcatgcagtttttgccccatgttttcttctaagagttttatagttttaggtcttacatttaggtctgtggtccactttgagttaatttttgtatatggagttaggtaaaggtctcgacttcattctctcacgtgaggatatccagttttcctggcaccatttgttgaaaagagaatccatttgccattgaatggacatggcatgcttgtcagaaatcatgcgttcatatatgaaaggatttatttgggagctctctattctttttgatgctattttaaatgaaattgttttcttaatttgtttttcaggttgtttattattagtgtatagatacgcaaatgacttctgaatgctgattttgtatcctgccactttactgagttagattattacttctaacaggttttttttgtggagtctgtagcattttctacatatatgatgtcatctgcaaacagagacaattttacttccttctttctgatttgagtgtatttatttatttttcttgcccaattcctctggctaggacctccagtactgtgttgaatagaagtggtgagaataacttgtactaggtccctcatcttagaggagaggcattcagcttttcagcattgagtatgatgttagctgtgggctattcatatatggcctttattgtgttgcagtacattccttctatacctaatttgttcatagtttttatcatggaaggatgttgaattatgtgaactgcattatttgcacttatcaaaatgattgtatgatttttatctttgattttattaaagtatcccatttcttgtatatgtacacttaactgtccttatgtactaaggataaatcccatgtttgtgatatatgatttttttaatgtgctgttaaattcagtttgatcatattttgttgaaaatttttaaatgtatagtcataaaaaaatatcagccagttattttcttttcttatattgtccttgtctggccttagtatgagggcaatgctagccttgtaaaataagttgggattgttccctctttgtttggggggaatattttgatcttatacttcccccgctacattttatttttgatgccccaaggtacaccttttaatattgcatatccattgagaaattatgaaaacaatagtaatttttaattatttttcttttaacctttatactagagttatgtgatttatatactaccattacactattagagtattcttaagttgcccgtatatttatttatcagtgaattttgtactttcatatgttttcatgttactaattatcatccttccatttaagcctgaataactccctctggcatatcttgtaaggcaagagtagttgctgataaactccttcaacttttgtttacctgaggaagtcttgtatctgtttcatatctgaaggacagctttgctgtgtaaagtattcttagatggcagttttttatctttcagaactttgaatatataatcctattgtttcctggcctggaaagtttttgctcagaaatccactgatagccttatggaggttcctgcagatgtaagaactttatttatcttgccgctttcaaaattatcttgtcttccattttttacattttgatggcaatatatctaggtgaaacctcttttagatggaaactaattgtaattctttgagcttcatgtacctagatgtccatcaatctgggaagagccccagatatgggaagttttcagccattatttctctgaattaactttctaccctttacctctctactttccttctataaatcctgtgtgaacattaactctcctgatggtgtcccataaatcctgtaaacttcccttgttaccttttcattctttatttttctcctctactggttattttcaaataatttatcctccagttgatgaattcctccttctatttgatcaagtctgctgctgatgctttctatttcacttttcatttcatgcactatattcttcacctccaaaatgtttgttttttttttaggatttctatttctttattgaatgtctccttttgtgtattaatgatttcattaggttgtctctctgttctctggtagcacactgaacttccttaaatcagtcgtttttaattttctgtaaggcaattaatgtatcccaatttcttgggagtcagtccctgaaaattattgtatttctcaggtgggtgctatgtttccttggtttttctgtttcttgttacaatgaattgaaatctgctcacttgatggagtgttaagtaggtagggtgcagcagctgtagcccagatgaggatataatggaatactcttcttgcagctccatcagctgaggtcagcagtggcaaacattacaaaggtccttggtggccaaggctgagtgtcctgatgctgtcgtgtaaatagagttgtgttaataatatccctttcagattgtttgtgattaatgtatagaaatgcaactgaaagctgggcgcagtggctcacgcctgtaatcccagcactttgggaggctgaggagggcagatcacaaggtcaggagatcgagaccatcctggctaacatggtgaaaccccatctctactaaaaatacaaaaacattagccaggcatagcagcgtgtgcctgtagtcccagctacttgggaggctgaagcaggagaatggcgtgaactcgggaggcagagcttgcagtgagccgagatcgcgccactacactctagcctgggcgacagaccaagactctgcctcaaaaaaaaaaaaaaaaaaaaagaaatgcaactgaattttgtgtactgacttactatcctgctactttgctgaattaatttattcagtttttgtggtgagttttcagggatttctacaaatatgatcatatctatgaacaaacataattttaattcttcctttctaaatgatgcctttatttcttttccatattctttggctagaaagccactactatgtttaatataatggctaaaatgcgcatcttgctttattcctgatcttagaggaaaagctcttagtcttttcaccattatgatgctccttgtgggtttttcttctaggagtctttttctttgtccttttatttttagtcaacatgtaataattgtagatatttatgggatatacacagtgatattgtgatacatgtatataatgtgtcataatcaaatcagggtaattagcatattcatcaactcaaatatcatttctctgttttgtgagcagtcaaaatcctccatctttctgtgcctaatttcatttaacatattatccaagttcatccatgttgctgtgaatgacaggacttaatgctttattatgactgaataatattccattgtgtatacataccacattctttctctgcatctgctgatggagatttaagttgattccatatcttaactgttgtgaacagtactgcaataaacatgagaatgcaaatatcttttttatatactgatttcctttcctttgagtcaatacccggtagtggattgtcaaactgtatgatagtctacttttagtttttttgacaaaacaccacagtattttccataatgactcactaatttatagtcccacaaatagtgtattatttcccttttctctgcatccttgccagcatttgttatgttttgtctttttgaaaacagccattctaactgaggtgaaataatgtctcactgtggctttgacttgcatttctgtgatgagagatgttgagcattttttcacatacctgttggccagttgttctattttgcacatttctaaatcagataatctggtgttttttgctgttgaattgtttgaattccttgtatattccggatattaatcccttgtcagatgaatattttctcccattctacaggatatctcttaatagtttattatttccttttatgtgtaggtttttagtttgatacagtcccatttgtctatttttgtttttgttgcctgtgcttataaagtcttacccataaaatcttcgctagacccatatcctgaagggtttcccttctgttttcttctagtactgtttgcttcaggtctcatgtttaagtctctaatcaattttgagttgatttttttatatgctgagagatagtatagtttcattcttctgcatatgatatcctgttttcccaacatgatgtgttcaacatggtgtcctttccccagagtgtgttcttggcacctttgtcaaaaaccagttgtctgtaaataaatttatttacttctgggttctctattctgttccattggtctatatgtctgttttatgcccattgcatgctaatttggttaccattgttttgtatacaagggggattgcttccgagaccccctgtatataccaaaagccatgtatattcaagtcccagagtcagccctgtgtaatgcgcatatacaaaatgtcagtcatctgtatacatagttttcacttttgtgaatattgcattctatccttgttagattatggggaaaatccacgtataaatgaacctatacagttcaaatctatgttgttgaagagtcgactgtattttgatgtcaggcagtgtagtgcctccagcttcattctgcctgctcagtattgtttgtcctatttgtggtcttttgtggttccatgcaagtttaaggattgtgtttttgctatttcggtgaagattgtctttggtatttttttttttttagatttctcttttctctctctctcccttttttttattatactttaagttctagggtacatgtgcacaacgtgcaggtttgttacatatgtatacatgtgccatgttggtgtgctgcactgattaccttgtcatttaccttaggtatatctcctaatgctttccctcccccctcccccctccccccccaccccacaacaggccctggtgggtgatgttccccttcctacgtccaagtgttctcattgttcagttcccacctacgagtgagaacatgcggtgtttggtttttcattcttgctatagtttgctgagaatgatggtttccagcttcatccatgtccctacaaaggacgtgaactcatcctttttttatggctgcatagtattccatggtgtgtatgtgccacattttcttaatccagtctatcattgatggacatttgggttggttccaagtctttgctatcgtgaatagtgctgcaataaacatacgtgtgcatgtgtctttatagcagcatgacttatagtcctttgggtatatacccagtaaggggatggctggatcaaatggtatttctagttctagatccttgaggaatcaccacactgtcttctacaatggttgaactagtttacagtcccaccaacagtgtaaaagcgttcctatttctccacatcttctccagcacctgttgtttcctgaatttttaatgattgccattctaactggtgtgagatggtatctcattgtggttttttgatttgcctttctctgatggccagtgatgatgagcattttttcatgtgtcttttggctgcataaatgtcttcttttgagaagtgtctgttcataacctttgcccactttttgatagggttgtttgttttttcttgtaaatttgtttgagttctttgtagattctggatattagccttttatcagatgagtagattgcaaaaaatttctcccattctgtaggttgcctattcactctgacggtagtttcttttgctgtgcagaagctctttagtttaattagatcccatttgtcaattttggcttttgttgccattgcttttggtgttttagacatgaagtccttgcccatgcctatgtcctgaatggtattgcctaggttttcttctagggtttttacggttttaggtctaacatgtaagtctttaatccatcttgaattaatttttgtataaggtgtaaggaagggatccagtttcagctttctacatatggctagccagttttcccagcaccatttattaaatagggaatcctttccccatttcttgtttctgtcagctttgtcaaagatcagatgattgtagatgtgtggtattatttctgagggctctgttctgttccattggtctatatctctgttttggtaccagtaccatgctgttttggtgactgtagccttgtagtatagtttgaagtcaggtagcgtgatgcctccagctttgttcttttggcttaggattgtcttggcaatgcgggctcttttttggttccatatgaactttaaagtagtttttttccaattctgtgaagaaagtcattggtagcttgatggggatggcattgaatttataaattaccttgggcagtatggccattttcatgatactgattctccctatccatgagcatggaatgttcttccatttgtttgtatcctcttttattttgttcagcagtggtttgtacttctccttgaagaggtccttcacatcccttgtaagttggattcctaggtattttattctctttgaagcaattgtgaatgggagttcactcatgatttggctctctgtttgtctgttattggtgtataagaatgcttgtgatgttttgcacattgattttgtatcctgagactttgttgaagttgcttatcagcttaaggagattttgggctgagatgatggggttttctaaatatacaatcatgtcatctgcaaacagggacaatttgacttcctcttttcctaattgaatatcctttctttctttctcccgcctgattgccttggccagaacttccaacactatgttgaataggagtggtgagagagggcatccctgtcttgtgccagttttcaaagggaatgcttccagtttttgctcattcagtatgatattggctgtgggtttgtcataaatagctcttattattttgagatacatcccatcaatacctaatttattgagagtttttagcatgaagggctgttgaattttgtcaaaggccttttctgcatctattgagataatcatgtggtttttgtctttggttctgtttatatgctggataatgtttattgatttgcatatgttgaaccagccttgcatcccagggatgaagcccacttgatcatggtggataagctttttgatgtgctgctggattcggtttgccagtattttattgaggatttttgcatcaatgttcatcagggatattggtctaaaattctctttttttgttgtgtctctgccaggctttggtatcaggatgatgctggcctcataaaatgagttagggaggattccctctttttctattgtttggaatagtttcagaaggcatagtaccagctcctccttgtacctctggtagaattcggctgtgaatccgtctggtcctggactttttttggttggtagactattaattattgcctaaatttcagagcctgttattggtcttttcagggattcaacttcttcctggtttagtcttggaagggtgtatgtctccaggaatttatccatttcttctagattttctagtttatttgcatagaggtgtttatagtattctctgatggtagtttgtatttctgtgggatcggtggtgatatcccctttatcattttttattgcatctatttgattcttctctcttctttattagtcttgctagaggcctatcaattttgttgatcttttcaaaaaaaccacctcctggattcattgattttttgaagggttttttgtgtctctatctccttcaattcttctctgatcttagttatttcttgccttctgctagcttttgaatgtgtttgctcttgcttctctagttcttttaattgtgatgttagggcatcaattttagatttttcctgctttctcttgtgggcatttagtgctataaatttccctctacacactgctttaaatgtgtcccagagattctggtatgttgtgtctttgttctcattggtttcaaagaacatctttatttctctgccttcatttcgttatgtacccagtagtcattcaggagcaggtggttcagtttccatgtcgttgagcggttttgagtgagtttcttaatcctgagttctagtttgattgcactgtggtctgagagacagtttgttatagtttctgttcttttacatttgctgaggagtgctttacttccaattatgtggtcaattttggaataagtgcgatgtgatgctgagaagaatgtatattctgttgatttgggttggaatgttctgtagatgtctattaggtccacttggtgcagagctgagttcaattcctggatatccttgttaacttccggtcttgttgatttgtctaatgttaacagtggggtgttaaagtctcccattattattgtgtgggagtctgtctctttgtagatctctaaggacttgctttatgaatctgggtgctcctgtattgggtgcatatatatttaagatagttagctcttcttgttgaattgatccctttaccattatgtaatgaccttgtctcttttgatctttattggtttaaagtctgttttatcagagactaggattgcaacccctgcctttttttattttccatttgcttggtagatcttcctccatccctttattttgagcctatgtgtgtctctgcacgtgagatgggtctcctgaatacagcacactgatgggtcttgactctttatccaatttgccagtctgtgtcttttaattggagcctttagcctatttacatttaaggttaatattgttatgtgtgaatttgatccattatgatgttagctggttattttgctcgttagttgatgcagtttcttcctagcatctatggtctttacaatttgtcatgtttttgcagtggctggtaccaattgttcctttccatgtttagtgcttccttcaggagctcttgtagggcaggcctggtggttataacatctctcagcatttgcttgtctataaaggattttatttctccttcacttatgaagcttagtttggctggatatgaaattctgggttgaaaattcttttctttaagaatgttgaatattggcccccactctcttctggcttgtagagtttctgctgagagatccgccgttagtctgatgggtttccctttgtgggtaacccaacctttctctctggctgcccttaacattttttccttcatttcaactttggtgaatctgacaattatgtgtcttggagttgctcttcttgaggagtatctttgtggcattctctgtatttcctgaatttgaatgttggcctgccttgctaggttggggaagttctcctggataatatcctgccttgctaggttggggaagttctcctggataatatcctgaagagtgttttccaacttggttccattctccctgtcattttcatgtacaccagtcagatgtagatttggtcttttcacatagtcccatatttcttggaggctttgttcgtttgtttttactcttttttctctgaacttctcttctcacttcatttcattcatttgatcttcaatcaccgatatcctttcttccagttgatcaaatcggctactgaagcttgtgcatttgtcacgtagttcttgtgccatggttttctgctccatcatgtcatttaaggacttctctacactggttattctagttagccattcgtctaatcttttttcaaggtttttagcttctttgctttgggttcgaacttcctcctttagctcggagaagtttgattgtctgaagccttcctctctcaacttgtcaaagtcattctccgtccagctttgttccattgctggcgagtggctgcgttcctttggatggggagaggtgctctgagttttagaattttctgcttttctgctgttttttccccatctttgtggttttatctacctttggtctttgatgatggtgacgtatagatggagttttggtgtggatgtcctttctgtttgttagttttccttctaacagtcaggaccctcagctgcaggtctgttggagtttgctggaggtccactccagaccctgtttgcctgggtatcagcagcagaggctgcagaacagcgaatactgctgaacaccaaatgttgctgcctgattgttcctctggaagcttcgtctcagaggagtacccagccgtgtgaggtgtcagtctgcccctactggggagtgcctcccagttaggctactcgggggtcagggacccacttgaggaggcagtctatccattcttagatctcaaactccgtgctgggagaaccactactcttttcaaagctgtgagacagggacatttaagtctgcagaggtttctgctgccttttgttcggctatgctctgtccccagaggtggagtctacagaggcaggcaggcctccttgagctgtggtggactccacccagttcgagcttcctggccactttgtttacctactcaagcctcagcaatggcaggctcccccagcctcgctgccgccttgcagttcgatctcagactgctgtgctagcaatgagcgaggctccatgggcgtgggaccctccgagccaggcgcgggatataatctcctggtgtgccgtttgctaagaccattggaaaagcacagtattagggtgggagtgatccagttttccaggtgccatctgtcaccccttccgttggctaggaaagggaattccctgaccccttgtgcttcccaggtgaggcgatgcctcgccctacttcgtctcacactcagtgggctgcacccactgtcctgtacccactgtcttgacgagccccagtgagatgaacccactacctcagttggaaatgcagaaatcacccatcttctgcgtcactcacgctgggagctatagactggagctcctcctattcggccatcttggaaccaccccacttactgcaatctttaactcccaggctcaagtcattctccatccttgacccctcaagtagctgggactacaggcatgcaccaccatgcctggataacttcttaattttttgtagagacagggtcgtgcattgttgcccaggctggtcttgaattcctgggctcaagcgatccttctgccttggccccccaaagcactgggatttccttttttttttttttttgaccgatacataatacttatggggtacatgtgctattgttacatgcatcgaatgtgtaatgatcaagtcagggtatccatcaccctcaatttatcatctctatagttaggaacatttcaagtcctcttttttattttgaaatatacattatattgttaaatatagtcaaccaactcttatcaaacattataaattatttattctaactagctgtgtatttttacccactaaccaacctctcttcaccctccagacatacctttcacagcctttggtatctatccttctactctctacctccatgagatcaacttttatagctcccacatatgataataacataagataattatctttctgtgcctggcttaaaataatgacctccagctccattcatgttgctgcaaaggacatgatttcattcttctttggtcaattagtattccattgtatatatttacctcattttctttttccatttatccactgatgtacacttaggttcctgagtccatatctttgctgttgtgaatagtgctgcaataaacacggggatgcaggtacatttttagtatactgatatcttttcctttagataaatatccagtagtgagattgctggattatgtcatatttctctttttaggtttttcagaaatcaaactgttttctatagtattaatttacattcccaccaacagtgtataagagttccctccacatcctctccagcattggttaatttttgtctttttaaaatagccattctcactatggttttggcttgcatttcccttataattactgatgttgggcttttttttttaaatatacctgttggctacttgtatgttttcttttgagaaatatctatccatgtcttttgctcactttttattggaattaatttgttgtttactattgagttattggagttcctagtatattctggtattagtaccttgtcagatgagtagtttgcaaatattttctcccattcaacaggctgtctcttcactctggtgattgtttcccttgttgtgtacaagctttatcatttaatatagtcccatttgtctatttttgtttttgtctgtgtttttgaggtcttatccataaaatctttccctagaccaatgtcctaaagtgtttccccaatgtctccttcattaatagtgatgttatagtttcatgcctcatgtttaagtctttaacccatcttgagttgattttagtatagcaagagatagaaacggtttcatttttcacatggatatcttattttcccagctccattaagtgaagagggtgctcttttcccagtgtatgttcttggcatctttgtcaaaaatcagttggctgtaaatacatggatttacttccaggttctactctgttccattggtctatcagtttttattccaataccatgctgcttttaatgctatagccttatatttttaaatcaggcagtgtgatgcatccaactttgttatttttgctcagaattgctgtggctattccagctcttttttggttccatctgaattttaggattttttctatttccatgaaaaatggcattggtattttgagagagactgcattgaatctgtagattgctttgggtagtatggtcattttaattttgttaattctcccaatccatgagaatgggatgttttttgtgtgttcttttcaatttctatcatcagacttttgtagttttccttgttagaggtttctcacctctttggttaaactcattcctagattttttgtagtggttgtaaaagataatgccttcttgatttctttctcagctggttctttattggtatatagaaataagcctgatttttaaatcctgtaactgtaatcaatttattgatcagactgaagagttttgatttttgtatttcatggtatgagttgtaatatcccctttttcatttttgattttattcatgtaggtcttctctcttttcttcttggatagtttagccactggttattttgtttcttttcaaaaaccgattttgcatttcattgatcctttatatttatttagtttcttgtttagttctgctctgatcttcgttatttctttccttctactaattttatgtttagtatggtttgttcttgcttttctggttccttcaggtgtatcattagattatttaagatcttttctaccttttttaatggaggcatttattacaataaactttcctcttagcattgcttttgcagtatcccttaagtttcagaatgttgtgcttctattttcacttgtttcagtaaattttttatttctgccttaatttcttctttgacccattggtcattcaggaacatgttaatttccatttatttatacagttttgaatgctcctcttatttatttatagttttatgctattgtggtctgagaagatatgtgatatgaatccaatttaaaatatatatatatttaaaatcatacttagtgtcctaacatataatgtatcctggagagtgttccatgtactgatgagaagagtgtatattctgcagctgttttatgaactggtctgtaaatgtctgttaggtccatttggtataaagtgcagtttaaatccaatgtttctttgttaattttttgtctagatgatctgtctaatactggaaatggagaattgaagttcccaagattattgtgttgaagtctacctttcccttcagatttgatgtttgccttatatatctgggtgctttggtgttgggtgcatatatgtttagaattgttatatcctcttggtcaattgatccctctgtcactatataatgacttcgtctctttttagtgtttttagcttaacctttgttttatctgatgaaagtatagctactcctgtttggtttttgtttccttttgcatgtaatatcttttcccattcctttctttcaactatgtgtctttacaggtgagatgcgtttcttgtagatagcatttagatgggtcatgtttttaagtccattcagccagtctgtcttttaagtagaaagtttaatctatttatatgcaaggttattgttgatatgtgagggcttattcctgtcattaattgatttctgattattttgtgtgctttcatgaagttgtcctttcacttcttcctgtaagactcccttaagcattttttgtagtgccagtgtagtggcaattaattccctgagcttttacttttaagggaaatactttatttctccttcatttctgacgaatataactttgctaagtacagtattcctggctggcaggtttttggttttgttttttctttcagcactctgcgtatataatcccatcctcctggcctgtaaagtttctgctgaaaaatctgttagtctgcaggttgttcccttgtaagtgtctacaacctcttttatcgctggttttatgattctctctttgtcttgggatgggcaatttgctataatgtgctgtggaaaagacctttctgaattgtatctatttagggttctgagattcctatatttggatctaaatctcttgggagattgggaagtgttcaggtattatttcattaaataggttttataatcttttggtttgctcttcaccttctgggacactgaaggtgtcaccttatggcatcctatagtcacatagcctttgttcattcttttctattttttctatatttttgtctgagtcatttcaaaagacttatcttcaaggtgtgaaattctttcttctgcttgttgtggtctgttattgaagctttcaaatatgttttttatttcattcaatctattattcaattccagaatatctgtttggttctttttatatctatctcttgggcaaatttctcattcataccccgaattgttttttctgatttctttgtatagtctatcagatcttctttaatattatattgaatttttcaaggtttcatcaatttctttttcactggaatctgttggagaattattgcattccttaggagttgtcatgttttgccttttcatgtttcttgtgtgcttacactggtatctgcacatctggtgtaacagtagtttcttccaattttttgatctgtctttcctaagagagtcttgttcctgaagatatatctatggtgttctttgggcagggcactttggttttgattctgggtgcctgcagtagtgtgatctccatggaatttttttcagctgtaaacagcaccagtagtgtctgggagttcctctgtagtttaggatgcagttgttggtggaggctgtggtaaagtctggctggggatagggacaccagctgggccagtcctcaggccccagtggcagcagtggctggccccgaatgcttatccttgggcccaatggtagtgtatgctggtaccagtgttagcaagtccagggaaaccaattttgggcctccaggcaacttgctcaggtgccaatgatgacagagctgggccacagggtgggtaggtccttgagctctgagcagcagatatggcttgggcaatggcagtagcagtggcagaacaatcttctgcctcccaaggtgtccatgctggtattgggatggctgggataagctggatgagcttgtcccaaggcccacaggtggcaaattcaagtgaatgccagttgtggtggtaatggtcagttgggtagggcagtcctcaagcccccaggagtgctcaggtgccaacaatactggatagggcagggtgatccctaggcccagagatggtatgcgctggcactgggagaaaagagggtgggaccaggccaggtgggcctgtcctgaggccctccagtaatgcaagaatgtactgactgtggtaggcaggcacaggaagatccctgtataccctgctgaatgctcatgttggggcagcagcaactctattgcagccctactcctggggaagttgagtgggattgctttcagtggcagcagctataaacaggcagttgggcaatgcatgcttcggccccaggtggtgactatgggcagggtcacctttcctcatggcagccttgcttcggaggtagcagagtattgccaatggctcatgctttggcctggagggagcagtcaggagtggcaaccagctttgtgtaagggatgtccatggggctccagggatgagatagagggatgtggggcccacagcagatgcagtctggtgggggttgggctatcaaaatgggactttcctgaagttgcctgaggattcaggggatgtgtgaattgcctgaggattcagggtgatctccctctctgggagctgttcattgccatttcacagtctgtaggtagcctcttgttagtctcaaggcatctatggggtcagggggttctctgactaggatttcaggagtctgctgtgggaatgtggaccactaggggctcacttacttacctttctgcacatcgaggagtctcttcatgatcccagccagtcccatagaagcagactgcctgactcccctcttatcccttgcattgggtttttcttattacttctcagttgaattccagcattctctcagaggcgatctatataaactgtggttacctacttgctatattttgtggaggaggtgagtgccagatgcctctagtcagccatcttgaagcccctgctgatatctggatagggatttcatagcatctgtatattgctataggtaaatatgatcattttaacatttttctttcaatccatgagcatgggatgtctcaaaaaattttgtagcctcttcaattactgttatcagtattttatagttttcattgtggaaatctttcacctccttggttaagctttgcttttttttgtagctattgcaaatgggattgctttcttcatttctcttttggctaatttgctgtttcacagaaatgctactgattttttgggggaggcaggggagtgcagacagggtctcactctgttgcccaggctggggtgcaatggtgcaatttctgctcactgcaaccttcacctccgaggttcaagtgatcctcccatctcagcctcctgagtagctgaacttcaggtgcaggccaccacgcccagctcatttttgtactgatgaggttttgccatgttgcccaggacagtctcaaactcctgggctcaagcaatccacccgcctcatcctttcaaagtgctgaaattacaagcatgagccatcatgtccacacctactaatttttgtttgttgatttttttatcctgcaactttattgaattcctttaccagttctaaaagattttggtggaatctttaggtttttctatgtataagattatgccatctgcaaaggacaatatgacattctcttttccaatttggataccctttttcttttacttgcctaattgttctggtgaggacttttcttactctgctgaataagaatagtgaaagtgggcatccttgtcttgttctagttctaagagagaaggtgtttagcttttccccaggtggctgtgggtttgtcatatatgaccttcattgagttatgttccttctagacattatgtgatgagcttttttttttatcatgaagagattttgaattttatcagatgctttttctgcatctattgagatgatcatgtatttttttgtccttccttctgttaatgtgatgtatcacatttattgatttgtatatgttgaaccatccttgaatccctgggataaatcccacttgattatggtgtattatctttttgatgtgcgattggattcagattgctagtttgtgtgtctgtgtgtgtgttttgtttctgaggattctgcatctatgttcatcagggagattggcctgtagttttcttttttgctgttattgtgtccttatctggttttggtatcaagatactgcttgcctcacagaatgagttagggagaattcctttctcttcagtcttttggaattgtctgagaagaattcatgttagttctttaaaggtttggtagaattcagtagaaaacccgtgcaatcctgaggttttctttactgggagactttattactgatacaatctcattccttgttattgctctgttcagattttttttcttcctggttcaatcttgggaggttatatatgtccaggaatttatctctttcctctaggttttctaattgttgacatatagttgttcataatggtctctaataatcttttgtatttctgtggtgtccattgtaagtctcctttttcatttctgattttatttattgggtcttcttggttagtctagctaatggtttattgattttctcttttcaaaaaatcagttttttggctgggtttgttggctcacacctgtaaacccagtactttggaaggccaaggcaggccgatcgcttgagtccaggagtttgagaccagcctgagcaacatggcaaacccccatctctaccaaaaaaaaaaaaaaaattagcgaggtgtggtgctgcacatctactcagaagctgaggcaggaggattgcttgagcccaggaagcagaggttacagtgagccaagatcacaccactgcgctctagcctgggtgacagagtgagaccgtgtctcggggggtgggggggaggcctcatttcattgatcttttgtcttttttaccttttatctctatttcatttagatctgctctgatctttactatttatttccttctaattttaggtttgatttgttcttgcttttctagttccttgagatgcgtttattaggttatttgtttaaaaactttctaccttattgatgtgggtgtttattgaaataaatgtccctcatagcacttcttttgttgtaccctatacatttttgtatgctgtgtttctattttcatttgtttcaaagaatttttaaatttttaaaatcaatttcttcatagacacagtggtcattcaggaacatgtagtttgatttccgtgtatctgttcaatttcagaagttcctcttgttattgatttccagttttattccattgtggtctgagaagatacttgataagattttgacttttaaaaatttattgagacccgttttgtgtcctaacatatggtatatcctggagaatgtgctgtgtgctaacgaagcagcagttcaaatctaatatttccttgttgatatttttccatccaaatgaattgtccaatgctgagtatgaaatgttgccatccctaactattattgtattggggtctatctctttagcactaataatatttgtttaatatacctgggtactccagtgttgttggttgcatatataattgttatatcttcttgctgaattgatccatttataattatataatgacctcctttgtctcttttttctttttcttttttcttttttttttttttttgactcagtattttttgtctgtctactcctgcatgcttttggtgtctgtttgtgtggaatatctttttctatccattcccttacagtctatgggtgtctttacaggtgaagtcagtttcttataggcagcatgtaattgggttttgtttttttaattcatttagccagtatctatctttcatttgggaaatttaaattacctacattcaagattgttatcaataggtgaggacttactcctgtcattttattgttttctgactgatttgtatacttttgtttcctctcattgtttttctttgcaattttttggttttctgtagtgataatcttttattccttttcctttctcatttgtgtatctgctctactagtgttttatgcttttgtagtttcatgatggtagatatcatcctcctacttccagatgtagtactcccttaagcatttcttgtggggctgatttagtagtaatgaattccctcagtttttgcttgtctgagggaggcaaaatttcttccctcattctgcttcatttctgaaggatagctttgctgggtatagtatttgtggctagcaattttgtgagcttttccccaccttgcagcacttttaatatggcattcaattccttcctggcctagaaggtttctgctgaaaaatctgttaatctgctgttgattcccttatatgtgacttcatgcttctctcttgttttttaaattctctctttgatttttgacagtttgatgaaaatgtgcctcagagaggcccttttagggttgaatctatttagggatttgtgagcttcctttatctgttagtctctttctctcccaaactttggcagttttcaggtattatcttcttaaatagattttctggtccttatcccaacacttcttctggaactcccaaaatgtgaaatattgttagcttaatagtgtctcatatgtcacgcaggcattcttcattcttttttattgttattttttaaatctgtctggtttattgcaaaacacctgtcttcaaatttagaaattatttcttctgcttgacttagccggcttttgaagctttcaattgtattttttatttcattcatttaatttatcacctccaggatttttgtttggttctttttcatatctaactctgctggatttcccatttagataatgaattgttttccctgatatgtttgtattgtctatttgtgttctcttgtatctcattgggtttccttaagatttcctttactttggagtctattattggagaattattgtgttcttttggcaagtcatgttttcttgtttttttccccccaagttttttgtgtccccaagttgatatctgcatatctggaataacagagacttccaattttatggagtagccttagtaaggacttttcctgtacacgcgtctgtagtatcatttgggtagggtgctttggctttggttctggttcagtgcagaagtgtggtgtctctacaattaattagactataatccacatcagtggtatctgcaagttcatcagtggcttaggctgcttggtgcttaggatgtctgtgaaggcaagaaggctccttagaggtacttactcctctatttttgctgatgttgctaactaccttcaaactttttgacaaagcattttaagcctcttctctgattctgtatgcagttttgcagtgctgggcaggggactagaatgctattggaatttggctcactttgctacccacaggcaatttgaaggtattctttctcctaatactgctaacagcatgggtcatgtggttttatttgcacttactgattttatgcttttaggggaggatgagtgagatgatttatagtcagaggggatgaggagcagcatgctatttttctccaagcctggctgaaagtcttttttaaattatccttttttcttagtacccctttctaatctatcagtatgtcttatcaactctctggatttgcccacacctaatctctccagctatctccctggttaaaaccaccaccatttctctgcctacattgttgtccatacctcattactggtctcttgatttccactcttgcttcctgtactccattcttcacataacagctcaagggagttctttaaatgtacagtggatcttgctgcttccctactcaaatgttccgacagcttcctgtcaaccctgtcttgtgtcagtctcacagcacacacagcttaattcaggaattaagctgtgctggtcacttattgagaaagagcttcatggtgggcagctgggaagctgcacagaacactcctcagagttctacaagcggctgagagagctggggtatttatctttcactagtgagtgctgccccggtggtggctcactttccattccttttggcctgccctgtgtgcagctcagcaagtgcctgaagtcagaggtagtgcttatgaaagtatctggtgggcttgcattaagaagctgtcagtgtgaagaacgtgaatgctaagggcatatgagtgtgtccctgagaacatggatattgtgttctttacctccatgtctccagtgcctgccatatagcaggtcctccaagatttgctgatctgcctgccccacctggggtctctgtctctcccacagctcactgacattagccacgtggccctctgtttcctgtaataggccatttcctaagtaagcatcatcctcatttctatacgttttctctgattactggaaattcctcaagtgttgaccattttgattcctgggccccttaagagtccattagcattggaatggagcccacaggaccataccagacagatgccaccacatcttttcttgaagtagtgttcaggctgagggggtcatagccgagggtccctctggggccgcttgctctcctcctactcacagccctcctgcagccagcagcagtgggggagccaagctgagttgattacttttgacatcagttgttaacataattttgatgttgagcctccccccagttctggggtggctctgactgtgtccaggctccaatttgagaagctatggggagcctctcggccccagttctggcctggctgggaggtggcctgggaagggacctgtgtttctcaagcccgcgccctcggggcctgggggtggggccccagcagatgtctggatttggtagccagggcctggagccggatgctgagaatgaggcctgcaactcatttccccattaaacattctgagaacatctgcaccggtttccaaggcttctccctcactaattgctttgattattgtgtgaagttaagaactggcacatttccgcgatgttgtgatgaaggtgaaaagatcgctcttaattagattaaaaacatttttttcttcctgtgtaattttgtcttgaaaatcaaggccacttttttgttttcttcatccaaagacctccagaaactttcctccccacctctccagaggtttctggggaatgtcctgtgagctcaactcttggagaagatagtgcttaacccagattccattgtatattaaagtttcctagggctgctcttgctgcctggaaccttcccctgaaaatgtgtcttgggagacctagacagtgacttcctgcagcatggagacccgggtgggtcgattttagttgtgtgggtggctgtgttgctctctttccgtttcctgggctcactcacgctcagggttgaccctgtcctggctctgtcactgcctgtcttcctcagcgcccccgctactcagaccccacccttgggcctgcagagacatttccgttcactctgagatttgtgtatgctgaggcttgctatacttattctaaggagaagtgtttggggtgtggggtgtggtcctcagtatcctaaacttaggttttggaaagcccagcatcctccctgggacttctcaggattccggaagtcatctttgactgtgtcacatcactgtcatgcttgaggcaaatctattctgcacacctttgatccaatgtgagatccaacatgttccataatttgcatcaaacatcctcatacagcagggtgtggagagaggctcactgaaggtttggggagatgaggacttgcatcacagcagtagaaagccaatgtcccaccttaggaaatccctttccaagagttccctgtgctgttgcagggctaaggccagggccttggcctcaggccagcttctttcccacaagccttctccctgccctctgccctgaaaactagtgggggcagtgcagaccagtttagctattttgtaaccttgactgcccccaggcccatgtccgtaggctcacacctcacccccaactttgtcatgcacattcctgaagactctcttggtaacaaatgatggaaccccaactcaaacaagcttaagcacaaaagggacattttttggctcacacagctggacccagctgtttcagacacagctggaccccagagctgagatgatcttgctcacttgctctcactctcccctcttgcactccccttctcccttcccgttccctcttttgttctccctttcccttgctctctatccattggccccatgggatggctgtatccttaggcagctactttctaaaaggggcaaaatggccaccagcttgcattcaacagctcaggaagcccagcagaacgaggtcatctcttccaggattcctgccagaatctaaggccaggttcttattggcctcagctggggtacaagccatccttggacctgcagctgtacctccgatggctgaggcaaggtccacagggacccctttggggatggccagagggtacctaaacactgcacactaggagtgggaaaggaagagccccctaaggaagatttgagaagctgttcccagaagccaggcctggctgctggcaggcaaaaacaacaggtgtccactcaagcaaggtattttcctaagcggaactgggtgccagctgtgaatatacattttcactccattcctcgccttgttcctggcagctgttgtgggaatggcttttacactttccatccatgtcccttacttctcgcctctgagtggagacacaggtggtggcggggccactctggctcagggtctatgagccgggcatgggcagctggcacaggctgtggggctgcggctcagcaatgtcacgcagggcctggctgcagctgtccggatgcccctggggagggcttctccttcacagtgcaggatccgcagggctttggtgaatccactgagagggggagatttcttgagggggccagggagggggcttctacttgcaaaggatagggagagcttctgttcatccttgtgaagtaggctggctcagggaactcgcctgtgccaaaccctggggagacatgggtgaggcagaaggcaaggttcccgtgctgagcgccaggcacacataagccctgcagccgtacaggggagggggcaatctccggagccctggaaagcttgtggaagagggcttgggttacacctgggagattaggccggattttaatcaatcaggaggggaagggcagggggtgagtggttgggtgaagttactaggaagggcccagacactggcgagagtctcttgagggcagagggcagcagagatgggctggagctttgagctttgtcataggctggacttggggcttgaatgctgacctaatctgggcagggaggggtctggggctcgatgagaaggcagaggaagtgagaccagaatttcttgggaacagaaagcctcaaagactttcatgataggagagctctatgtagcctcatgggcagctccaggccaggtggagggacatattctggcaactctaggataagatgtgcaaggtcgtgggccagagagcaaggcacagatacaggagacttccacaaattattgtttcttgacttggaaaagtatcatgcaaaatagaaaacacagacacaataaggaaggaaatgaaaatcacccaaagacaaagttaacatttggatctgtttccttctagtcttttttctgtgcctgtatttttaaaaaaataaaattcaaatccccctatcgagcaggaccactgactagaaaggaggatgctgtgctgagtttgattcctgttctcttgagagggtgagacttggcagccagcgtccccagctggggtagtcgccacgcccgaggctgcctttgccatcccagacctcccactttcctagaaaacaaaattgttttgttctgccctgaaaatttaggcccagatcctggccttgacaaagcaaaggcagccaaagaattaaagcatcaaaaaccaggactgtcttaggaaagtgtgacttcattgtcaccaggatgctgtgctgtttgtccccagggccagccactctaggcagttcagcaaagggcacctggcattgctccggtacctcctgcagagcctggatatccagatgaactgccctttcaagtacaccatgggctcaaccttctctgcagctgtgagttcaggctgtgaaatacccacttcagaggtgggggtgacaagcaagacctgttagggcacagcacttgccctcaagccctggcctgaaagaggcagcaccagtgtgtctggaaagagctgaatcyccacccacccacccccagctcccctccatgctctcctagatgcctgacctggctacgaccacaggtgaaaacagggaagaggtggcagctctggtgactgcctccctgtggtggagaaagcacgccccacagtctccaacacacaagccagcagacaataacctctcctcttgaattggaaaaacaaatctgtggaggccttctctgccccttgttataggggccccatatgccgttcccaggattaaaccaaaaagcacacattcctctctggcaggtgcaggtcccacccactctgggcagccaactgatgtgcacattttaatttcctaaaacaccaggacagaaccttcctcaggggtcaggtggctcacccttggccctcaggctttggagatgggcacttgtcatcatgggtgtttggaaagcaactctacgttctagcctgtgctccattgttcyttctacatacaagtgatgcaaacatcaaaatatgttttttctttcttccttcctttaaaaaaaattgaatcctggatgaagttttagctctgtcacttgacaactgcattatataacctagggtacttgaatctcagccccaaatctctaaaatgggggcagtaacatgcttctgccaggtcccagacctgtgggtctccaaatctgcacattcttcaagccttacaggtccttccctggtctctctaaggatgtcatgggcacagagccctttcactctgagcccttctcctggctgtgactaagtaatgtctgtgtggtttcctgctggaagtctgccactcgcccccacgggccatgagctcctgagtttatttacatttccctgattgctagtcaggcgcaacacctttccacatgctcatcagccttttggattcctcttttgtgatgtgctactttgtctattgcccattttctattaagtcatttatatttttcctattgatttgtaggagtcctttgcattttgtgggcactgtctttttaaggtgtattttgatgattgggtcttaactctaatgtcaaattactcagtcttctctctcatggttattgcttcttttaaaaaaaaccatcctaatgctgatgtcattaagatattcttctatattcagtcatgtgacctttatagttatgcttttcatagttaggtcttcaatcccctagaatgacaagaatgaatttttggtatatgatgtgaggtaattaagggtccaacttaatgtttttccagtgtgggtatccaactgctcctgaacatttgattgaaaagtccatgctcttcccaggatgtgcaggccacctctgatacacagcaagcttccatatttgtgtgggctgtttcccaatgctcaatcctgtcccattggcctatttgtctctccctgtgtcaataccacattgccctaatgaccactgccttggaagaagtactgatgtttggtacagcaagttctcccaccttgttcttcttcaagaatattgccaattcttggctttttgcacttccaagtcgcagttagaatcagcttgccaaagttctcacacagaagccttgagatttttattaagatttggagagatttattcagattttgagataatcttttcagtattgagtcttctagtcattggaatgaaggcatatttctccatttatatcttcttcattgtctcttactaaagttttacaattttctccagagttcttgcatatccttagttagataattaatattcttttgtgctattgtatacaggttctgttttctcttgttacctcacattttttatttacagaagagaaacaaaaatagtaccgagtacccacatccctttcaccagcttcccctaatgttagcatcttatataaccatggtacattgaccaaaactaaaaaattaacattggtacactattaagctagagttgtaaatttatttggatttccccagtttaactactaatgtcctttttctgttccaagatcccatctaggatcgatcattacatttattgtcatctctgatcggtgacgggcttctcagtcttgttcttcattaacttgacacttttgaagaataccagtcaggtgtcattgtccctcagtttgggtttgtctggtgttttctcaggactagaccagggttataggtttaggggaaggaggccagtgaggtgagatgctttcctcattgtggaacatgacatcaacatggtttatcactggtaatattaaccttgagccactcgtttaaagtggtgtcggccaggctcctccactgtaagtgaatagctgtttttccctttccatagcttagtctttagaagcgagtcactaagtatagcccacactcaaggtggggaagggaggagttcaactctacctcctgcaggagagtatcaaaaaaaatctgcaaatatgttaaaactaccacagcaattaaaatacatttcaaggaagaaactgtgaagtttctgagtttcactaactaatttcagcattcattcatggatcgttttcctgcagcaaatattaccgtgatgtacttctattttcctcattccttctacattttttatttggaattcctttataaggaagatttgtccctctcctccaattgtttatttaattttatcagtgtggatttgggagtatttattttttgagttatagtccaatattatttattttgttgctcaaattgttcaagctgtggccactggtgggttcatgtgtccttttgatgtgccccccgccatccttttcatttatttttaagcatttcttttctagcacttgacaatacttcaggctcatcttttattttccctaccctagccctagaatcatccattcatccagagagccctggctccctggagaatgaatagaaaacctggatctaggcacggggtatgctcgtggctactagggtatcattgcttcagtctcctctcagtggacagagctaggaaatatatgtatgtatgtaacctgagtacacatacatctttacatatctgtatctatataaagctaaccatgagttcatactgacatttctgaccagagttcatccttgccccctcccccacaacttatttatagctttttctctgacagctagaaacctggctcccattacctacagttcatttacttatttgtgtaaccctattgtacacgtagtaccctatgtgaagcaaatttacctactagattagagtgtttaggacagacttttgctttaaccatagagtgtccagtcaaaacagtgtttttgaaagcaacatatgccagctcctcctcctcctttcctttcactgctatgtcatttgtttgtaacacgctcatcatagtctgcttttcatcgtagggtcctccaacatccgggttaattttttaaatttgcatacagtaaaatccactctttgagattcagttctgtgggttttgacagatgtctggagtcatgtgtccacaatccagtatcattcacagaagttccatacccctaaaaataccctggggtgagtcttttgaagtcaagtacttctcccctaaccactggcagctattgatctgttttatgtccctgtagttttgtttttytagaatgtcctataaatgggatcctataatatgtattcttttgcatctggcttctttcactgcttagcaaaatgcatttgagattcatccatgttgttgcataaatcattagttaatttctttttattgctgggtggtattccattgcatgaatatatacattttgtttatgcattcacctgttgaaggacatcttcattgtttccagtatttggtaattatgagcagagttactatacacatttatgtacaggtttttgtgaacataaaaattcaattcacttgggtgggaaaggaaccgataggtcatgtggtatgtgtatgtttaacttaataagaaattgctaaactatttcctaaagtcactgtgccattttgcattcccaccagtaacatatgagagttctacatgttccacatcctcaagagtggttggtattgtcaggttttgaattttttttttaatttatggaatttcattgtgattctaatttgcatttccatatttatgttaattgtgtatcttttcatgtgcttatttataatccatttttaaaattggattgttcactttattgtcaagttgtaagcattctttatatattctgagtgcaagtccttgacctgataggtgatatgcaaatattctttccaagtctgtgctttgtcttttcattccattagcagtgtctgttgcacagcaaaagcttttaattttgataaagtccaatttgttgattctttttctcttacgagttaaacttttggtttcgtatttcagaattcactgccaaatccaaggtcctggagattttctcttatgttttcttcaagatattttatggttttatgttttattttagattttttttcagtaagtttgtgtgtagtaccctttaaattttcattttctaattgttgatcatctgtcctatcaggcatagatactaaatgcattaaaacttttacacacatacatatgtatacatacaacacattcaaatagtgaaattaggaataaatttaagagagaattgtattacgctgatgtgggaaaaccttccttttttataaagcaaaagatgtatcactttaaaaacataaaacattttctaggataaaagcaacataattcaggtgaaaaaacagactggggaagctatctatgcctcatataacaaggagttaatgtctgtaatgtatagaaaattcctacaaagtgataagcaaaagtgagcaaaggacatgaacaggcaattctgcaagaggaaacccaaacagatgccaagcccataaaaggtattcaacacagatggaaataacagcaatgcctcagttttcatccatgcttgatagtccctgcaaaaggtgctgacaaccttcattcgggcttcattcaacacttcattcaggcatggatgtgggaaagctgggggagcctgaattgctacaacttcttgggaaagcaatctagcaacatttattaaaattactaaggacacaccctctcaccctgctccagtatgtcagcttttaagaataaagatgaatatggcatcatagtctgaataattaagcagcttaaaactataagagcctgaatgtccatgatatacagaatggttagctgtggccaatctaaactgtggactattatgtaatgactaaaataattaaatccatgcctatatacctagagaaaaatgaaatgagcttatgttacagagtgacaggaacagagtcacagtgacatcccatgtgcataaaagcaactcccacctggcatctgctgctcggatgagcagagagggtgggctagggatctagttggcagttaacactgatggaccttgggggaggaaagccattgtgaatctttgaattattccacttctcacagatgagtacttaatccttttgcaataaaatatttaaatgaagacaaatataagccaagagcaaatactgatagtgtcaacagagagtggggagtgataaggatcagtatcctgagctcctgtgtcaaagttgcagaggtgggcccaggaatcataatgtgaagccagctgttggagggactcctgtgcctcattgggggtacaactggttgatgtagcatcgtattttgaggaaggagttctgtggctgcccccacctcccaggcttgccattcctcatgggtcagaggtcctatcaccccatctttcctgacccactactctgtcaatgtatgagtgtgacaatgtatggtggtgggagctgttgtcccttaccaggcctgtgcctgtcacctctgttttattcttgacccaagtgtcagttgtgaacatgggaagaggcccagaacctgaggtggggagagtcttggacacctgagcacagccccaggcacagttaccactccgaagatgattcactggcctttattctcctcagacactgaggtgtcaggcactttggggccatcttaaacacccacccaccccaacacccaactataaaactgattgtcagggctggagcttccaggcacaagctccactcctcacctggccctgggagctcacaggcctggctccacagcactggcaggttgggtgggaggcctaacgtgctgtccccacactttctcctcagtaaggaagagcccaacactgctggaagtgagcatgccccatttcatgagaaccaacagcttcgccgaggacctggacctggaaggggagactctgctgacacccatcacccacatctcacagtgagtgcctacatgtgcgtgaagggctgggctggaggggactggagctcaaggagtcagacttggtgctggggaagccttgctctctggccagagtgctatctactcgcctagtgcccaccacttgccgtctgcctggccccaacacggaggcaccaggcaagagaggagagcaagggcacttcccactgagcctgggaacatgatcctcttgttttgacttatggaaaaccagactgatcattttccacttgttttcatgctttgagagtctgagattgtttttctctcccccagccccctcccctgccccccaaaaaagagacgactttgttttttagcatttccccatggaaccctggccaaagccatggggcagatgccgggtgcagtctgccagttgctgctgctgtcctcaggggctccttcaggtggaggaaatggctgattttccacgccttccagttggccttcccctgaggcacagctggcctgggatgcatgcccgtcctcccccgccgtcacggcatggccaggccaatccccggtgcccggccacggtgtgattcccctgcgacatgtgactccccgctggggtgcccagcggtgacagccgtgcagcggggtcagtggggcacccaagtccattctggccacagtcccattctggctgctaacccgttggggattccccttgataaatgtctttgtgtcaagatctgtgagtgacactcgcggcccttctgagggtcacttgtggaaactctccttctctctaccaacatttttctaaagggtgttttgttctttggactctctgggggtcaggaggttgtcctgagccatgtgtgtctttgtcgtagtgaggccctgggcctcctgcctttgcagccagccaggtgcaaggcctggccttgcaaatcactgaggaaatcgggacccatggtgctgggggctgcaggtgtaaccagagaactggcagggttgggtagccagaatgaggccacctccagggaaggagtggctatcttaaggggtaattatgatcagacaggacctgcccactgtctttccaggcccccccagttcacagagaggttggcagtacctcatggtgggtagggtgtgaagaggctccaagggagccagcagatcactggaaagcaggggtgactagtcatggacaccctgagaatagggctctgagcttctgggcccctcctggctgggtaaaaaggcaggagcagaggtgtgagcaggctggtagccagatgggctgcccaggtacaggtcagcaccagaaggcagaatgatggcttacactgtggccaaggcctgtaccaagtcctggatatgatggacctccaaagtgatcagtgttagtttagtggctcatgttgtgtgcaatacaggtggcagtgcctgtattgcctcttggctgtcccctcagagaggggactgtcccttctcatccttctggctgcttgcttctcctgttggagctctcgctcaccttggttctcttggtcacggaccagcatccagacatgcaaaaagtcctactgggaggagagggccatcacccacagtccatctagctgggcagccaggccttaccaactcttgggtcttgcaaggcccctgcaggtgaaggtggtgagagaccaggcacttatgtggatcacagccaaacttgcagctgcccagtaaatcaccactatgggggtgagggctgccagtgctggtatcagcacatgccaagctccctggagccagaggttacccacctgcccaagggtgaccccaagccagtgtggctgtgtcatctaggacactgggctgtttcttgttccactccaggatgacagggcctgagagacctgaacatccatccccaagctctctgcccactttgggtctggcacattaccattctgcaagatcctgcagccttttcaggttggcactcccatggcctccagtgataagtgggcccaggcaggtcagagactccagtcattacccaaccaggtccctgccctgtaacttaccaaggcctctctcagagcaggctgttccaaaagtggctgctagatatgagccagcctgggaaggcaggaaggagcccaggcatggggcttggggtgagggatctgaagaggggactgggagagggaaaaacaaggaggttgctgcaaaggggccaccttgaggcattgtgttctggtcagggaagactcagggctgaggcttcaggggagctgggttcctgcatcctcagaagtcagggtacggtccctccagagaggcctgaaggggagagtgggcacgtacagtgtcagggcctaggaacccaggctcctctgggatacaggctgggtagaggccccactccatctgggggagaaggctggcagcagtgggcaccctgtttcctcagggcccaaaccgcctggcggcaggggtgtgggggccgtgcaggtcttctgcccgcattggggctgcattcctccacctcctgcacagcccgcccagtgatgcccataattaaattcggctccagctgctcagggatgcagcgaagctcctgtgggcagcctggccccatggaccctgaactgggaagagaggcacacgccctggtgtgtgtgagggacagggatgtgtgctggggtctcacagggggcagagtgggtgggaggcagttaccaaaaaacatttccatttttcttcagcattctactgatgttaaatgtattaccatgctgggccagttccagaattcaaattaaaaacataaataaagacacattttgtttccatctcgagctctccccgcccgcagggccccagagaggtgaggtcactatagccttgattacgggaaggtccctggggctgggcgaagctcctctttccggggcctgttagccagaggtggggtggggggtgagcaggcctgatgcaagctagggagtcatgacaagctgaggcacggggtacccaggagataaagagtggcgtcgctgcaccccagcctataggtgggccctactgctcagcctcaggaccctcaaccagctctgggcggccaggactcagcctcgaacacacctttcaggcagaagctgtcttcctaggttgaatggggcacaagagagtccctgccagcctcaaactccctgagcctgtgtctcccacccagaaccatatgacagggcttctgagagaaaggtgggaagtagagactgtaggcctgcatgggcagttggggagcacccccatgacaagaggagccctgtaccccaagagccaggatgagttcctgggattctgacccactcactatcctctgctcaccaagggtcactggcacgacagtgggtggggacggtgccatgcctgtgtgcatccctgtgccttgcgtgtggtaacctgccatctagaatgcccttgtcacccatctgcagccaccagatttccattcatctttccaacgtctgctcagtaaaccccccaggacacacttaggctgtacggctgtgtcctcctttggctctcaaagccctcagtaccagttccctaagcctttcgaatggtgccaggagggagaagggcatgtatagccctcttggtctcttcctccccagaacccccaaagccccaggcatggagaagccctaggattgctgctcactcaaccctgcctaagatgaagcaaggactgcagacacattgtgccagtgctgaggcacagggctaggggcctgaggatctgcggctctgaacttgggggctgtgtgcaggtgtggcctgggtgagcttctccaagcaaccctgggaggctgaaatcatttttgtgaaatcctccctcacactgcatccccaactgccaagccagccaggactggcctggaattcacacgtctgccccattggttgcacatggatacctgagatagacggcccaagaggacaggcccataagccctgcagcctatggctctgcccagcccagtcatgtggtttctctgaagggcccctgtctcttctgttttggcatcttagatgggcaagccccagctcgaggttaacagataccgccctcagtcccactctccagagggacactcagggagcacccggcccattgagatgggcatgggggaggaccaggacccccgaggctgggcagagggggtggaaagaaggcagagggaaagctgcagagacccccaccaggtgactgtgagcacctccctggcaagcatgtgcttgcctggcctcttgtgacatgacagcttcgcaaatccttgagcaaaaacagccccgtgtgcgttaattagaatttccatgtcttcaactttctcctggaccctgcagaatctcacgccaagacattcgagttgctcttttccagcaaggccgctgtggcctggctttcatccacatcactactaatgtctcctgaattctgcatttgtcagcaaggacagggccagtctgtgctgtctggaaataagggcaaacgtcacaagggtggccccaaatttggcttcatggaccaaggggctagctcttttgatgggaccagcttggcctgggacattttggagacatccaggtccactgtgacctactcccacagaccccagggtaccaggcactgcagctctgtgagtgtctaagctcctcaccatatttctctccctgtaaactttggtgggaaaggacagaaaggacattctgggaaccagtgtccagaaggatgagtgaggggcttgtcaagaacagatgagaccattttgtctttctagaccagtgtcctgtcttctgcaaagctccagaccacctctgtctgcacgagatgccaaggaagccctctgggggcccgcccgggagggctgtacagggctgcatgagtcataggatccccgtcagagccccacatagccccagccaggctcaaacccgtctctgaaatgcacggggggattaaatgttcttctaattaaattaaaaccgaggcgtaatggctcagtgggaaagagatgggattgggaatcagatgccctcaatctggcttccagcctgccatcagcccagctgtggcggccccccgtggccccctaacctttccaaacttcacttcctccgtctgagcacgtgaggaagaagcggctggcctagggctgctgctatggggagagggccgcactgtctaggtggatggcccagaagaaagcagtgaggcttctcatttcctctgcaagggaaaggccatccaaatcaccctgccccagtgcactctggccaggctcagccctctccacttgtgaactcccagccatgatgctgctcaggtcctcagccaagcagatggtgttggaggatgtgacagagagaacattcacgccacagaggtggctggagggcaaaggacttcacaactgcactgatattgtcatggagacacttctggcagttggggcagggggtcggggcggggttgggcggggggcacatcccatatagatctcttgtgtgctctgctgatacctgaaaggggagattgaactgcagagcctctggaggctgaagcacggaggtgacctagtcaggaagtctggaagccgtgtccccttaagtgagggagtgggatggggctgggcctagcggccctgaaggccagggctatccacctaattaggctcacctgggctaccctggtatagggtggtggtgttaaacttttagttaaagggtaatgtgcatgcacacagattagtacacaggtctcaagtgcgcagcttgaggcatcttcagtccctgggacccatgtgtgcagcacccggaggaagcaacagaacccccagaaagcctctcaggctcccatttcctgtcactgaccttgagattaaccacaggcctaactgctagcagcaaggaccagctttgcccacatttgaactttatgcggtgggaatgatgcaactcatacacctttgtgtccaatgtccctcactcaatttgatgtctggcagcctctctatggggctgaagggagagtgctccctcatgctccttgctgactggtgctccattgtgtgcatggcctacatcattcatccattctaccacctgtggccagcaggcagtttctggtgtaggttgctgtttaagaatattctgtacatgcttttggtgagcatcaggttgcgtttctggggaatatatgcctatgtgtggagctgcagggtcctgggtgggcatatgtttactcttagtgaatactacccagcagtctaccaaaggagtcattccaattttcattcccacaggcagcattctggctgctccacatcctaacacttggcattttccgtcgtttccttttcagccatgatggtgaatgtctagcagcatcaaatggtgattttaatttgcagtaacctgttgactaatgaagttgagtccctttccatgttatcatttagtcagatacatcattctgtataaattgcctacatcttctgcctgttttatgtttatttatggtcctatatatctttagatattctggagtcatttgtcagagagagagatacacacactcacactctctcacagacacacacattgcaaatatcgcctccccctctgcaggctgccttcttcctctcttgatggtgtcttttgatgaacagaaggtcttaattttcatgtggtccagttaatcaaacatttcctctctggrwwrggctgtttgtgtcctatttaagaaactttgactactccaaggtcataaagatatkctggtttattctaaagctttattagctcacctttcccatgtagatctgcactccatctgggattgatttttgtgtccaatgtgaggccgaggtcaaggtccactcttcccctacttggatatccagtctagctcagcacccggcatgggaaggcccgtcctctccccactaccctgccgtatcagtgtctttacaatcagctcactggctacgtgtggctctgtttctggaccctattgggtgccactggtcagattcaagttgttctttgtggccaggaccttgcttccttctcactgtagtttgctaacaggttttgacagctggtcctgctggctctggctgcttctccttccccatcactggctttgctgtctttgcagggtttctcctcaccatacatatgccagttgccatggaaagcctcctctaggcgcagcagcctctagatgggcatgggagaatgggtatccttatagttttggggctcctgaaacatggcatcatgtgtcccttgtttatttaggttgactttcatatcttttaccttgccctgtagttttcagtgtggtggtcatgaacagcttgtcagattcattccttgtcagctaatggtttgatgtatgttcgctgaatccagggacaaggtctgtcagggagccctggccagcttgggtcatttcatcctgcccacaggacactggggcagtcacctaatctctatcagcctcagtttcctcttgtatacattgggagtatatctcacagtattagtgtaaggccttgaggagatggtgttaggcatccagccacatacctgactcggggaaatgcctgaaaatattagccagcatagaatgtctctttgtgatgggagatcctgtggggacattccttatttggcctgagagcttttgagactgccaggtcatgagttaccatgggatacaaatggggtcacaacatatggctgtcagctgctgtccttaataagatgtgcctagaggcctgagagtcccaagctccaggacagtctggagtcaggtggagggaagggaagtctagaggtccccaagtcacaacctcaaatctcggaatggggttcaggagctgttggggtcccgtggaggtacaggcggaaacctagcactcactattctgctctggggagggggttggaggcagaatcagtggactgtgtctcatggcagtcacaggtgccccagtatgcatctgtcatttgttcttatcactgtcgggcccatctgccaaggcaagcacccacattaaagcagagtgaagagcagggcgagctgtgtagctcacctgcctttgaccctgcacgtgacgggcgagggaagaggaccatggtaacttgtctctaggcaacccataggtgcccaatggagagataatctcaaatatggtagcagagttcagactcagtggctttcagatggttagtataggctgaaattccaagagcattaaccagacacctactatgtgtatttcttgtgttggggttaggagatactgctgttggctgagacacacagcccacatccttggtaggtccctcagagagcatctagtgggcctgtcctcccagctcacagaaggggaaattgaagcctcaagaaggatagggacttgccagtatcactgggagataggagcagaagccagggctcattcccagacacacaatctctgggggagcctggatatgcatggcagaggccaggatgaaccctgaagattggtaggaaggcagtgtagcagtaacaagacaaagggattctgtggcccatggagcaggagggaacagtctgcagatattatctgggcactggccagtggctcttgtggctgccctctgcaataagaattcttcaagttcagcctctatgtgcatcataaacctggtgccaccagccaaggaggtcaaaggtcctcactggccagtgggccactgggaagcctcctggattgcctggacaaggctgacctgccctcccaggatgcaaattggcaggcccagcttcatgccttcttatggtgccccagagcccctggctaggcattcatgctttagatatgtgggccctgttagggacaatgtaggtgtcctgggcaggggctgtatctgaggcacacatccttggtagtgactggctagcaggaggaagtctggcagttagtctgtcaggcctggttggtcccatgggaggcctgaggtgccatcttagaaatagggccttgttaggagaaaaggaaagaaaaataaaaggtagagagacagaggtagacaggagtccaggtctgacctcaaaatccgatgtccccaccatccccagccccttagcctctgatcttctccataagtaatcttttcccatgtgtggctgcagcctcagaggctccctctgaagatgacactgggaatatcctgaaaaaggtacaggaacacctggcatgcctctcccagggtactctggatgtgcacccagagattctcccactttagcaggcagaagagcaacccagcaggggatatacacaaagatctgagaaagggattatttttagggccaattcaagggatttttcaaaggttaattttgactctgcctgacttatctcctaagtctttggcactgagcatttatacaagatcagactgcactgcaccctaagtataaaccttgccacagcagtgtcctgtggtgccctgctggggaaactgaggcagagagcggggtgactttgcaaggcaatagagggtacttgggaagtagggtggtaggcaaggcttttcagagaacaaggagctacatacacatacatgcatgcacataatcattctgacccagtcagggttcttcccccaaataaatccctgcaaccccactgtggttataggtctgagccttctgccccagggagccaagccctggagaggaggtgggcagcaccaggcagccagcctgtgggccccgctatgcttcctcaggcagctagtctctgtatctggggtagaaagagtgggctaaaaagtcagctagcacccctgacttcaagtcctcgagtgtatgttgggcttgtctccctaccctggcccggtctgcactcaagcccagtatcctcccctggtccctggtctggactgagcagctgtcttctgcccacaggggacctttcttctcccacctaatcctccctctttgggcctttcaaagttgggcttgtttttcagtgttttctttaggttcatgtcctgatttgttaagttaaattgaattccttccagtccaaaatactcaaatgcttttttctgcttttctttttgaactgccccacgaaccccaccagctgggtgtgtgggctccaggtgggagctcaagggggcctggtgtggtgggtgcagaagcagtgtggtggggcagccttcacaggctgatatgattgagctcaggctggtatgggttaggggatgagagtacagaacagtccaccccaggggctctgaagagcttcaattgagatatccttccctaakgtccccacattccatggcagtgcctakgasctctgtgctcccaggcctctccattaccagcctgtcttccacattggaaggtggccttatcaaaccacatggcctgaattttgattgggaaagcatccctgtaggtgtcaggtgatggaaggactctgggtaaatggaagcactgagaccagatatgataggaccttgcccagtggacacagccagctgatggcagagccaaggccagatgtcaggttccagactccaagttctatgcttttttgctggtccagcatggcctgtctcctccccgcaacagatccaaccagtccccttcagaagggctggaccaagtgaccccaactctgggttctgcctgggcattttcttgagtgtcataccctagccacctgactgtcaggggagcagtatgtggcacttgaggccttgggctggccatgcaggcccaccacaggtggcaaggaatcatgaaccccagctgagtcccctgcaggccttgcctaaaggagaagccagtgaatcaatgtgttacttgaacaaatatagggtctagggctggccaaaagggacagtgaagttggcttctcaggccacagtaggccttcacggtactcagcaggagaccccagcaggcagcatcagggcaggggtgytgaccatccctgacccaagcacgaggatcagaatgggccctggagccaaggccaaaagccgaactgtgactaggcaagctgagtcccctgtagattctggggactgggtgatgcagactgcaaagcctcagccaccttctcccctagaagaaatcttgagagaaacaatcccacaggctaccaggccagcttttggaaacagtctcattagcaaacaaagggaagtgacagagcagagatccccttggcctttgtttagcccaccttctgcctaggcaccaggcctggaggttccaacttggtgttgggcctccttgagccggaacacctgaaaagccatacagactcctgctcatcacaaccacttgttgatgctgacagcctgtagaaagattgctctcagcctatcccctccctggccatgcaggtggaagaccctattacttgggctaaagagaagctaaacgtgaccagcctacccaccttgctactgctgatgaccaccctgactcatgtcccttgtctgcataggtgttttcctataaatgtttaattcctgaggttgctgaatctcagggcttggaaggcccagactggacaggggaaggggtacagtcccttcttgctggtatgttgggaagctctggtgcaaagggcagtgatggcccttcaatcccaggcccacaagcaccacagccaggagagtcaaggttggatatgaagagggacttcctgaaagcaggcacaggaagggatgggagctcagctcaccgggtgctagacaagggagtgtgtctctttccccatgagtgacagcagccacaaggggatgcccagcattgggggtggggtggggggagggccctccgtgctttctggctctttgggcctggggtgcagcccctcatttgtacttgctggctgccccatgggggcttgggctaggtctccctgccggtggggagggaggtgtggaagctggtttgccggggccacccagtgtgggctcaggaagggaaggaatgtgaccaaggctgggtgtggctggggagagcacagccagttgtgggtttttcttggggcccagatagatgtgagcagagctggaggcccctctctcccagcccccggcacacacastaggacytytcttcatcatgcagccgtagagctggaggccaaggacaccctctggaaatctgaattccattcgmtcttggcaaagagcagcttcctgcttagggaaggtgcatgcgtgcgtgtgtgtgtgcgcgcccgcgcgcacacgaccacagaggctggggggaggcacgtggggaggagggctgcctgtcgagatgtgtaagatggccccagtgttactaggcactagatggcacttgcaaagcccattcggaggatttagacaaatacctcgagtgagtgaatctgaagcatgctagttgtgttgccttttaaataggctctggcttaaaacagtcacagcgaaacatgcctttgaattggaaagccagaactttttgcaaaataatttgaaaagtttgttgaaccttaaacctttcctgatgactccttccttctgaacttaactcgttaaagttgctccaatcccagcccagtgccagaccagcttcctggaaactctcgccaactgctggcctttggaaaggcttgtcaccctaatagctgttttttaaaaaaaaaaaaaaaaaaaaaaaaaaagctcactgggcaccttggctgcagggtctgaaaagtcctttgtgttagctccagctgcagagtttttccaggcctcgcttctggggctractggagctgtttctcttcgtttcctcttacagtggcgggcactcagccggcttcttcccgcctgacttctctgccagagcccaggtgggggacggggatgccaagggcagagcccctggagaggctagtgtgggcatgtcctgagtggacagacctgaaggtgggttcactagcctctttctcccatccttcaccctattagaggtagtgctctagcggggaaagattagggcccctctaggtcaatattgtgtcatttccccagaatagccagggccaaaccagctcccaagcagtactgtttcagaagtgaagataactcacctctcccaaaagcagagttttggcaatataaaacatgaaagtgggatgggatctaagtcatatttttttaatgagtttaaaacacgtgtgtgcattagaaaacatttaaacacagatattgggcaaattaattgaaaaatatattgtcattttgcgttaaaataaaagatgatctgaaaatggaaaaaagttacataaaaacgtaaatatttcatgagacatagcagtcacaacatgccatacacatttcttccagaatcactccactggaaattctgtaataagacatacgtaacagtttcacttcctaggagatcccaattgctcytcagatagggtggagagcaccccttattagagggtggttgggctctytaggagcccgcccagggcctgccctgactctggctctgcctttccctgtcaaaaacctctttgtgctggagcagcccctgctccacagagtgacatgaaccagagactcacagcactgtgtgcggggagctgctgcccgcagggcataccagccacgtgcatgcagggctgcacactgccctaccgtgcatccactgcctggccaacacctgccttctggggagccaatcgtgctttatgtattcaagggttgtgctacaaaaatcatacaacagtctttacacacatggtaaaaccaattcagagtacaaaaggggtgaaaaataacactctccccacccaaccctaattcccaagtttccttccctaaaggttaccactcaacactttcytattgcatctttccagacgtattttatataaacaaatatacgtgtgtctgtgtgtgcatgtacttagtagatacggctcctttttatacaaatggtagcatactgtatgtatttttytacactttgcctytgacttcttccataggtatgccatacttctttttgagctgtacatacaatgctgatttattatggtgcagtacatctgagaagcatttttattgcaaaatgtgtgtttacatgtatacagacacacgtgtgaacaggtgatggctctgaacagtgtagttgaagtgctgttttctcatggttgggcttccagtataattggaaggagcatagtctctgtgttcagctagagatttagcccaatgggctgggcttttcccagataggacatgctcactgttctgctcagattgttagctgtagtctttctggcatcagttccatttctggtgaacacttggacttggcaaaaggcatagaggtagtggtacaggaaaggtctaagaaggctaaggaccatcatactgggtattcaacagccagctctccaaagaggcctctaagaaatgggtagcttcacagattcacagatagatagttcattaaggtcttgagtatttccaagggagcactaactggactacagcctggcaggagataaccaagtcatatgcatagtggctttgggtacgatggtctgctgtatgaagcaaccctaggacatttgaagagaatggagtgatggccagtgtattgtgctgggatctaccacaggggtcatgttgtaatgacacctgtcagctttgactggggagccctttcatttcttagtaagtgttcagccccagtgtgcaccacttaaaaggaagacactggtatgttctggagatggatctgtattaagacatctagcaaatctccttttcattaacagctgcagagtttcattgtgccatgatttatggaacagatcctctgttgatggatatgtagggcagctaaaaaacagcagccattaaccattcaaatatattcactactgaaatgaccacttatgaaattagtttccctgaaacatccctccctattgaacactgttgtttctccctatccatcttatccctacttgtatctctgctgactgacctctttggctgtctcttgtcaaccaaagacaatataaagcacacacaaagtaaagaggaacttataaagaggaactgtaaatcttgtcaaaataggagatttcatcaagttaaagaaaatgatgtcaaatgatttctcaaatagagactgggcagagtagaccagttagttaatcagttgaagaggaaaccaagatcgatgcctagataagcatttcagaggacagcaggggagatgataattgatgcaggtggcctcttggtcaagcagtgaaaccatgccatacttctacaaaaaatgatcctctctgtggaagtgctgccaacatcctctgccaagtataaaagatgccctcagatgttaccatataatgctttacaaaagacaaaccaaaatcccctctggatttgtttttttctaaaacgtgtacataattgtaactctaacaactgttattgcatatgagataaaataatattttaactactgttatttttcaaattaacttcccaatcaaatatctctattgtaaaattttggtctccgttttcagtggatttactttaagagatcctccctttccccccatttccagcaggattaaaatgttcatttatgttgtgatagatactgccaaataagggctgtaccatttacatcactttgactgcacaaatgcactttcttcccccacccttaccaagtgtatactcaggtttttatcttcattcatttcatagatgagaaatggtacactggagctttaatttacatttcttttgttggaaatgaggtttttatctttccaaatgcttaaaatcatttgttttttctttcttgtgaactatttcttcataccctttggactttgtaaaataccttgtcttactgatttgtagaaacttgctttgtcatattcattgaaaatattttatcctcattttccttaggtgttttggctttttctataatatttttctggtggcagaatttttttaatttcacatagtcagctgtgtcagtcttttatggtttgaggtccttatcttaaattctgaaataacctctcatcctgaaattgttttaataaattcttccatgttttcttctatcattttttatttcattttttacatttaaatccttgctttatcgggattttgacagagtaattaaatccaatttggtttcccatatatttgtccagttgtccaacactatttatttgagtacatcatcatctctctactaatttcaactgctacctttatcatatttcaaactctcatttaatttgtgtccatttctagactctattctggactgctgatgggcctgttgataggccagagctcagttattttaattatgtaactttatgatgcacttatctgtgtagcaggactccccctcatctccattacttaagagccaataatgggaagctcattttcacaaatgcagtcaaccaggggaattcatggcatggcctaagatctaaacactcttaagatttaaacacaggattagctcttgagttagacaggaagctggggtgtttgggactgaggcttcatcgtggcagctaataatgtcagggagcatgagcacttgtttcttccaaggctcacttcaaggaaggcagaatccaggtcgggggtgcacaggagttgccagctggacccaaggaccatttcgtatacatgtatgatcatactttcagggcatcttggaaaaactgaatttgctaactcaatagagaacaaaagagcaaataggcctaattcaagaatttttaaaaacccgcaataagaaacataatctaaaacttgtagcccagcccctcctccataccaaccaccaaaaaaacccactaacaccataaagtgtcatagctagagctagagtgctgttataagctgtgcaggccaaaatggtttcatggcatgagttgggcagcagcgactcagtttccatgtctgagttaggccacctgtaacaatgcagccccatccatgtgaagctggtccagaggactacagctgcctgtcccacccttggctgtgctctcctttactaatccatagccaaagacaggggctaataacagggtctggagtctgaactcatatcctaattccactactttctacctgctacaccttgagtgagtcacttagtctcagtttctttatttgtaaaatgggaatcataagagtaccttcctcagagggttgttaggaggattacacaaattaataatataaagtatgcagaaaagtgcctgtcctatagtagtgacacagtgttacttaaatgtattgctatacctcatgatggccattccatccattgtaatcatgtgtaccatgcaattcacagtgcctgacaaagctgatggggaggcgagttggaatgaatagtatcagcatcagaaaaaatacaagtgcatcctcataagattatttaggatgcataggatcccagattagattttttttaaatcagccgttctctgtattcttgtccagatgctgtggacagtgatgatgggaaaatagtccctgctgcacactagggcctgttaggccagttgagggctagaggagcacaaggggccagactgctgctacttctgaattttataggacatgcatttttttcatataaacttagaactagcacgcctaattttttttttatttttattttttttgaggcagagtctcactttgtcacctaggcgggaatgcagtggcacagtctcggcttactgcaacctctacctcctgggttcaagcaattctcctgccttagcctccctagtagctgggactacagacatctgccaccatgactggctaatttttttttttattagagacagggtttcaccatgttggccaggctggtctcaaactcctgacctcaagtgatctgcccgcctcagcctcctaaagtgctgggattacgggcgtgagccaatgcacctggcctcagcttgcctaattaaaaaaaaaaaaaaaaaaagttgtctatctgtgtgtatattcatatcccattggcatttgttattgaaacttcattcaatttagattaactgatgaagaattgccttccccacctcaaaaaaaaaagtctttccagccacaaatagaagcagtttacccacatgttcaaatccattgcaacatccttccatatttttttagatctttgtatggattttggacattctaaaattcatttctgggtatttttaggaggactactgatttttttttaatttgggcattttttaaaataaatttttattttgagataattgtacatttctcatgcagttctaagaaacaacacagagaaatcttacatactcctttacctagtctcccccgatagtaacatcttgcaaaactgtagtacaatattctgaccaggatattgcattgatagtctcactacaggacatttctaactcttcaagaatccctcatgtcccccttttatagctacccccaattccctcccaccctaccctgtccttagcccctgacaactactaacctattcttcatttctttatcattccaagaaaattatataaatggaaccacatagcaaatcacctttttgggatcggctcttttcactcagcacaattccctgaagattcacccaggttattgtgtgtatccttgcattttggtatgacccaatttgggtttgtatttttaaagctgatggacactatttactagtgttttcaagattgcactgaccatcataggtgaaataggtatgtgttcttttattatgaaagcctcctcagatgtggacattagtgaaatgtgggctccaaaaagagactttggaagatttcactaatgatgtggttattttttaaatagatgccccccaaaaaagcacctatgaaaaaattcttacatagcaattctacttctgaatgctaagagggtttggaaaaagtcatttttgcagtgtttgtgttctatgaagagtgggtagaaggaagcaggagagtattcctgcctccccaggagagagcttcactttctccctatatcttcctgtcctaccagcccacctggttctctgtctctctccaactgtgaccgtcttttccttgtagctccctgctcactccatgtggaggatggctcttggggctggggtgactaaaggcaaagaatggggatccctgtgacagctctaggggattttgggaccagataaccttaatggcctcaggctccctagatgagaaatgggacttagtaaagtcaaactggtccaggttaagccagcccatgatgcctggaaggaacttacccttttctagagtaacttcccttttcaggaagtttctagcttgcttgctcactcgctctccccacccccacccaacctcccccaacctatctctccctctctcaggagaaggtgctccctcacccttaaagaccaggctgccgttgcttcccatgtgtctgttcctctattcagtattgtgggcactgatcacacaccagggcactgtgggggccctgggacctgggaggaccagaatgggtacagtccctgccttctcaggttatggtcatatcatccatgctccccaaacatcaaggtactccaaaggaggcccagcactaccatctaggtggggagaaaacacaccggccataatgaacacacgtttaggctgaagaataatcttcaaatgatactactacttacacttcctgtttgccaggcaaatatagacatcatttcactaatcctcacagcagcttttaacacaagaatattatcactcctgttttatagataatctcctaagggttgagggattgagtctagggcccagggtcacaaagctagggagccgtggatctgcaggagatgtcccagctcatcaaatattctttcagtattaaacatatcaagctctctcctgaccttctctccccttccccaggccaggactgtcttatcctgtggttcttagctgaaatgtcccttcctcagaggagccaatttctaaagcttaagactgggctgtaaaaaatcacatacctcccctcccattcttaatgtgtaactgtgtgtttatttgtggtaaagggtttactggctggctccttctatcacattcaaggagcatgagggtataggctggctgtttctattcagtgttttatcttcagtgcttaatccatatggagcctgtcacggaccctcagtgaatgtttgacgagtgagtgagtgagtgagtgagtgagtgagtgagtgagtacttgtgcccaggtcaaaccaggtgctaggaccctggcaggggttccataaggctatgctggggttcaggcaacccaaggctggtctggagagtgtaaggcttgagagctcttcttcaggctcagtcatccctgcttccccagggctcatgtccacatgctattgtccatagaagctggggtccaaagttgaccagaatatctctagtcataaagaatctcttccccttgagcccactcatctctgttgacattctagaaatgcagggaaatctgggcaccatgaaatgcagtgacttgcagtgatcctcctggggccttgtatagaagagaccatctcagttttgtagaccaggaaactgaggcttggggatagcagatgttcccagacagaaaatggtggcacctggagaggtgctcaggtctgtgtggaagaaaggacaggagtccttctgccacccagactgtgcattcagacatctcccttgtgctgtgcagccttagttctgcctcctgagagaggtgaccttctcccacttcttacaggcaaggctcttgctagcctgaggaccaggagccttcagattttcttgttcccaggatatatcgcaccaactcaggaggtgtggggatgggctagcattaggaatgggtattagcatctgcattaaaaggctcccactgacagctcatgcattgtgatggaactagaggtgagatacagagcaggagtccatggcacctccagaacctgtcagcctgagtatgggcaatggcgttttagtttgcaaaaccagacacatagaggccaggtttcccccgctcaacactaggccactgtgcctgccactgctgtctgcaaatgcaggttcctggggctctgggtggtttgtccaatggctaagctttccccaggaatgggtaactggaaaaatgtaggaattacatatgattccatcaatgacagttttcctattaaaacataacttgttaaagcatagagcttagttcagagtaaacatttctaaaaaagaggtagaagcccctacctactgactggcatcacaaacactgccctgaaatgccaactcatttcaaatactgctctagacaactgggccctgcatctgctgcaaggaacatcccttactttcccatctcaatacaactgtgaaaagcctagcctgggactcaggcctttccttactccctctggttacctagctttagctctgaggcagcccagatgacatgggcctctaaggctggctgctcttactctataccccaaaatcccagccactagcttgcagaatggctttgttggattcccctccctggccccacactcactgctacatctctcttccaaatcataaatgcaaaagatggccaaaggtgcatgctctgtgacacgtttcatagtcagacaaaaccggctgactgcttttacttttttttttttttcatttagaagaatttccttggcaactccgtctctccttagtcaacatcagctaacttcatcctccccctttatcaagacattgtttagagtaaataattcattaactggtacagcaatttcagaaccctttcacatagtttcttaaggggaccgtttcccttgaagaatggggtacaccagaggacttaggaagagaagcgcccactggggcttggtcagactctgccaggagacaggcagctgtctgttaactgaccctacccagtaccttctgggattggattaacaaaaggggagttggttaggctggagcattgcaactcatttcttccctgcagtctctctcctgaggtggcccaggtatgtgtttgaggcctgggacttgctgccagcatgagacaagctccagtggggtccatccccctgattcctcagtgccccagcaccacctctttcatttgaaaacgtgttcttttggcaaaaagactatgctccagaactttctggctgagttctccttctattcctcctattccactgttaggtgttggaaaagcaatatatttgatgctttctccatgtcccataaatgactttctggcagaggagagtgactgtcctttgtctgtggccctggatttgaggctaagccttccttgaagaaggaacaggaaagaaaggcttgttggatgtgcagggagctagtggccaactgagcacttgctcaggcggaggggcctggagagaacccagggtaggtctgcctgggagaaaaggggtaagggaggactgcctcccagccttccctccccactggtctgggcacattccaaggcttgaggtctcctagtcaaggcctcctgttattggcttcctccagggagtctgctgagacaaaagttttagattctttcactacatcataaggtaggtaagtttgtgtccctgatccatgcagcatgttatctttgtacctggtaaggagtgaaatggcttccaattttacggactggttgcttttcattcatatcttcttgccatccctgtctcatgggtgagcacatttcctggatttaaaatgtatgggacagcctgtgagaattacagattccagggaagggccccttttggcacggggggtctgacggtcagagctaatcaggtgtggaagaagctgcctggagaggatccccatctgcatggaatgcccccttcgtggggatggctggcacagctcacacacggaggcactacttcagtcctcccattaccaaactccagggcacacgtgccactgtgtcttgcccacaaacatgcacacagagtatcgatctgtctgatgtttcagggacccagccatgtcatggagggtacatgggcaggtaccatctctgcctggtacatgggcaggggatagatgtgtttccatgggtctccttcacatagaattgtcacctgaacgagaagcccttatccagaagcccagtgcaactcccatctcacaggccaccagcaagttgctcacatccagacaggagacgctagtcctacaggtgcagtgggaggatctgcagatgactacagctcttggcccttccatacagcacatgacaggaagctaggagggttgcagctggctgttgccattccactcagggttgaggggacaagcccacacaggtaccagaagttcaggggtcccatgtggacttcaggccttcggtctgggaccccagggagggtgctctgacagtccgccgaaatggccagcaggcaggcatcctcccaggtggcagtgagaaagggccctgcacagtcagcgttcctgagaatgcgattcctactagaacgaggctgtttcccaggctgcctcctgcttcacccaggactcagaccacaactagactagggaagaacttgttctccacggatgagcctgaccaagttctgggcccactctcccatcctcctgctgggtcacacggatgaggcctgtacactctgggcctcagactccacaccaagaagagtcaggggggctcactctaagccccgccagctcgcaccatctgatggggcaggggcaggggaaggacagggccagcattgagtaggcctgagttgatggcaaagtgtaggcctttgccctgtctcgcccccttgcttctggggtttgcttcgcytttctgagagcacagcaatgcctactcatcytgcccaaaaccctgctccaacctagctgtgtgacctttaggccttgggatagcacacagcaaatgtctgccaccccagtactgccactggcttgggaggccagaccacagaccacactagtgtcacctggcccgtcccacctgttccaagctgggggaggagtatgctcacttgggcttatcagcagagccagggtaccccaacccctgactaggatattgtggatacctatgcccagagcccctccactgccaagtttccacaattgttttgaaataattcccaacagatacccccaccctcacccagtgttgagtctcactcccgtcacggaaatgacagctcccagccctgggcaatgtgctcctgcaaggacagctgtggtgactagaatggcagcttggctactagcacttttcacatgagcgtggctgccctcaggcccaggctgcacagagcatggccgctggatcaagtgtgggtcccagttggatgacaaacccatgttcaaggctgggaagtcctactcggccccacttctacccaggaccagtagctttcaattgtaaatgtgcatcccctgtgatacactatgatgcacaagcagcccctgctcacccctaaagagcagcacaagtaactcagagccactgtcccctctggccagaggccctggtttgtgtctgcccagtgaccagcctgaagatagaggcaacccaatccaggtccatgcaggtctccgtgatgcggagcatgcccagcttaccatcctgatgcagaggcaaggacaacactgggccctgacttgctaagatgggagcaagagcttagggctaaaactcagcagtcccagctctgggggacaaggacccacaaagtgatgcaagatatcctgagttgggtgtgacaagtacaccttgacacacaaactgcacagggaggggaggaatytgagccagcttcctccacaaagcacagaagtctgccaaaagcccaggctggatagggagcatcacactgttgggaaatgtgcaattttcactcagccagcatcactaccagctccgggcttctctcctctggcctcccaccttgcagctttgagatcccaggcctctcagggctctggctgagggctgtgagccagaggctgaggtagccaggtctgccttgggctgtcactcagggctgagctctgctgaaggatctgggaggtcagtaggcacctgtgtccacccagctgtccatacagatccctgcctgcacaagagctgctgcagcatttcaatagggccatcccaggcaccctaggacttgagaccagcctcctctgtatggtcccttccctggtgcacctaccacagcccactctgatgaccccctgtcaaggaggtgtgactgagaaaggaaggggcagagatcccttctccattcctctcaggcccctgtaaaaattgggacctgtccttgccagccaggtctcagggagctcagggttcagtgttggaatgggtctgggcccagatttcaagccagtaaccagcaaatcatggggagactgagaagaggagccccttagcaggcctaaccacacccctaggccacccagcctggcccccctcctctgccccaactggctccaggccaaactctggttcctgaggagcctcaaaggctggacttggggtgtcccgcggaaatcctggtgggatggaaaatccccagcagttgtgaggctgcacttctcccacccgctgtgggtcagccaggccgctgcttcctgcttccctttgatgtctcctcgtgcgagggaggggtcagcacccctctaggcttgggcaggcacacactccactcagctgcagccatggagttggtgcttctagggcctgggtatgctggagtcaggcaggggacctggtgggggtggggatacaggctgaggtggagagaccccacgcagctccctaggcctctgcagacagctcccaagcaagggggcaggaggggctgcactgagcccaccaaaggttgtagccactcatacagggctgtttgatctgagagggaggcgccatgacctctgtttagacaaggaaaatgaagactctggaaaatctaagcacgtcacacacacagcttccatgggggtcttcctctcgtgtctggggaacttccccgtagaggtttcaataactgccatcctttgctgatcctctgtgtaggcactgggccccagcccctgcctgtgccatcactatttcacaggagaacaccacactgaggctctgcctctggttgccctgctctgggtgatgaggtagaggtcacacagccaggccagtggccctagtgtcaaggttccacaccacagcctcatagcagccagtgctcgctcactgaggccaggcactcatcttgtgctgtgcctgggtgagctctggacctgcctcctaaacatagggctgcctgcttcgttcatttccacacaccacgtgcctaggcccagctggggctggcatacaaattgggtggcccggctctgagctgctgctggttactgtggcagtttccacctataccacacctatatacttgccctcccccacacacagcccacctggcccatcccacaaagagagatggcactccaggtggagagggctgggccagaggtcatgcagcaaggtcaggttggaagctgaggtggggctagggccaccccacacaggcctgtctcacaggctgtcacccactgggcctagggctctgagagtaggggtctgatctggagagcaggggagcctgcaggtccctgggttggaatcctggagccctgggctgcagggttttgaggggcagttacctcctcctccccggtggcacatccggcctggaagttgggtagtctggcccaaggcctgccctggtgtgaaagcctgagaccctaaggagagctacaggtggctcaagggcctgctcctcctccttttctgtgcaaacagctcagcttgctgactttgatgcagtggtttaggccaagctttgaagtcagcccttggaggacgttcctatcagcctttgcacagatatctcccactccaaccctaagactcaatgccacctcaggactgcccctatccgcagagcttgaggcctttaggtcagccttgggaagaggtgcttgagtggggtggaagaagcccactcttgggaaatggggagcataggggaggaggaagacactgccttggaatgacactcccagagacctctgctctgcctacctgcattctgctgaaggttttgggtcaccttgttttatggtccctgtcccagcatgaagcttgcacaggaagaacagaatgaatgatgtggaaatctgttagcagtggtgtcttccagattctcaaggatccgggtattttaggaacaaaacaagccagcaggtgcagaggtcacaagcctcctgagagggccagggcagagtgagtagctgcaggggcagctgtcctttgcacctgggcctagagtgccagagacttagtctcatttgtttacaggagactgatgggttcctgagcagcctaggaggggaggggaagcactgcgttctcagtgtggtgcttggccctcccaggtgcctggttgtggcctgccacttagcacccacccctgcctatccagccccatccctggggaaggttcccacctgctccaacctctggtactcccaggctgcctcacccaacgatgacagtgactagcctcagagcctggctgcttggaagacctttgcccaagcagagaactgttgaggaaggtgagccttccgagggccagccctgcctctcctcccctctcctagcctgcttctgtctgggctgaaggcacagcagggacaatcgctcttccggggttagaactgggggagcagggacaaaaagcgggcagccctccccagcatgacaggatgtggaaggctggtctctccagagactgggctaaactctgctgtgtcaagtgcctggtgacctcaagcaagtcattccatgtggctgagctgctccttgctgcatctgcacatatgtgtagtgtcttcctccctgtaggattgtcacaaggattaaatgatgtcaagtctgaggctgccctgcagctgctgtttccactacttggcatggaacatgtgccagaccaaaagagctatctctctccctgcgaaaggctggggtcctgggagctagagctgggttaagataagagcagagactgggtcctgggaacagccactgggcccagtcgggggggtctcagcacctatcacaaagaaagtgccactgggcctagggaaggacaagaagtaacatgtcaaagatgggacagaacccacctcctggcagggagtggggcacacatatgtgcatgttcatatatgtgtcagaatgcgtatttgtcagtgtatgtgtgtcagtgcacataggtataggggctgtctctcagaattcctgagggctttccatttgatcccagtggttgaagatggagtatgatcccaaatcccttaggtggatgtggcctggcagggggtcagcaggagggaggtccctgtctccttggcttccagcttccaggctctggcactcccactgttaggaacaggtacctttagggacacaggagtgtaagccactgtttccgtctgggttttgtcatgtgtaggtcccagcggctttaagccaacctgaaaggttcatttgggagtcacgggtatgtgtcaacaaaagcccaccagaccatcaatgaagtgggcaaaagctctgggtgaactcttggctcaggtatcaggatatgctgggtgagggaaataatggaggcacctttgttctagatgcctgcagattcctgacaacagtaggggtggaggctgtgcagacctggtgcagagtctgtgctggcctctggcctctcacagccttgggaggggtgctcagagctcagctgtgtttaaaaattagcaagtggaggagttagaggatctgcagttaaccccttgagtctcggaaggctgtttgagccactaatcaggaaggagagctgacaagaaaaaggcgatgtctcacccctgagctacaatccactgcacttacagtgaccacccatcctgacatcttgggctcaggcctctgggtctgggcatagaagcccaggaactgctgtctgtggggagtccactgaagctccctgcccccactgagtctctgatgttgacagcctctttgttttttcatctcagcctattcaaggccatttttcagcttgcttggctttgcattaaagttggggggatttctctatcctgaggttatgaaatacctcagcaaggacgaggcctccctgagggagtcaacctagcttgttccctgcacgtactgtggggaggtcctctttaccgccacagttccaagggtgaaacagagaaccaggtggggaaggggtctctccccatctgtccaggggagaggcagcccacagggagccacacaggcaggggacattccactagggccatttgcaggccagtggccatccactgccagcaatcagagaatcacaagcactggatccaatgtgacctctgccaggaccatgacccctaggtcctcttttccatccctccagttctcctggctttcttgccatctttctggctctatcctcagtctccttggcaggttttcccttctggcatggccactaaatgccagtgcctttctctatgcaaaccatttccctaagctgttccctcagcaccaagggcttccagaccacctgtgaggccctgaccccccaaatgtctctccaacccagccagacccacattccagtcacctgcccccacctcctctccacagcctccatcattttatagcccactctactgaaggcccctgtcctttcagtgtcacccatcctttcagtggcacaagtcagaagttctggggtcatttccgatacacccgcttcctcaccacctgcccatcacctcaagcccatcaccaagccaggcttacttcacccatccatagttctagaggttccctgcttccctccatccctattgccactgtcctgataggccaccatttctctgtactgcaggcatctcctaactggcattctcacatcccctgccccattccaatcaattatctactcagtggacagaaatcctttcaaagtttagagacctgtgggtcttgcttaatcctgcagctgcctttctggtagttcagatgcttggcttctttccatcccaggtgctcacaggctccctaccaccagagggcccttggcctgcccctgccactttccccaagggagtttttcagaccccaggctagttccagtgggttcctgctatacacctgctgtgctcccaggcctcagcactcccctcagggtgcaaacggtccttcaacattagttagtctttctcccctttgtccactaaccctgggagggtaggcaggtccctgctcctatcaaatccctccctctgggccagggtctagtacctgctgagtgtttgacaaatatttcttgaatgactgcatccctaacatgaggcaatgatcattcccctgcctgttagacataattcactgcctgggaaggcactgtgctgtgtagatgcagcaagctggctaaaatcaactgtagcatggcctatgtcccaagcaggttgtcctgcccatacgctcaataatgaggcccactgaactctcctggtttccagaagcctcataagcaagcacgctcagtgaaggaacaggaagtcctttctggagcagggggagagaaaggcatccagttagccatagaggggaatggctccttactctttaagagtcatttgccccaagactactttctgtcaatcaccagatagccctcagtctacactctgtgatccactcatgaatatctggtctggctctgcgttccagtcagacccttttctgagaggaccacaagtcatagcccagggctacctgtacagctaccaggcttaacaactcagatgcacaccctccacaactgctcttagcacccacaggcctgggccctctctccctgccctgaagccaaccagaccctgggtgggggccgagtctggccaagcagcagtgtgtggagctgggcctgggcctaagctgggaataagcttgttttgccaggcgctggccccccatcgagtccccattctctaatgctaattgctacaattagcaggagaaaggccttttagatccatttcttctcctggctgaggcccgggctgctagggaggttgagcccaaggcttttcggaggagcagggattcttccataaatgaggccacatttaaattgcaaacaagagcttcgcccagccgtaggaaaggctctgggagaaaggcttttagttccgcagacagagcagccagagactgggtgcgctccagcctcatgggccttcctggctggtgtgactggaaccctgggttatacaggctcctgccagtaacctggacatgctggggccggccagttcagaggagcatggcacaggctgataaaggcaccggaaggaaaggcagtattagaggccaccccttgccctcccatccaggcctgctctgagggaaaccctactcgtcctcctcctggagtgtactgcaaacctggatccggtatccgctgagaaccactcattcatcagtctgcactaactggagaaggtgagcaggcccagcccggcctctctaggccacctccaacttggtcaagccacaggtgcccatgccatagatggctgagggacggcagctgacacgtagttccaactaaacctctgggtggcagcccataggttgtgggactggaagtgcttgccaaacaaattatactgctgaccagggaagagggtactctgattggccaggcctgggccagggtctttctcaccgaggtggtgaggctataggtgttagatgtggcaggatgcaagccagggcctgctgcctttaaagagccacagcagagacaccatcccagtcccaagagctgttctaaggaagtggttgtcatctgcggtgccccccaggggacatatggcaatgtctggagatatttttggctatcatgactatgggagaattactaatatcaactaggtagagaccaggcagggtgctaaacatcttacaatataaatgacagcccctcacaacaaagatacatcctgtcccaagcattaccagtgtggctggctaagaaaccctggttgcaaggggtcagattttgacatgctatttgctttctcactgagttgtgaaaatggaggcacactttcctggcctggcctcttccttcgttcaataaatgaatgaaaccattcaacagaaatctgtgacacacccaccatgtgcggaccctatacggaagacagatatgctctcttggggcctctcttccggtggaagagataggcagccaacaaataagtagatgtctaaggaactagaaaagcgtagcctgtgctttgcagagactcgaaaggtagtcgtcagctagtgagtgactgaaggggatgacagatatggcaggtcagagcaaaatttcctgtgagatttaaataagaagaaggaattgtcaagggaagatcaccagaaaagacaagccaggcagaggtggtgaaggccttggggcaggagggatacttggcagatttaacaaagaagaagaaggctggcagagccaaagctcagtgagggaggacagtggtcagagaggtaagcagggcagatcttgtaaaaacctgatggaatttgaattttatttcctagaaatagaagccactagagggtatctggcaggagagtcatggaggcacattcattcgttggttcttggcttttgggactctgcacagagttgatcacagccctcagcctatgaaacactgtcaccctgtaagggtctgcataaagtcaccgctctcttcctctccatgcttttccacttcatctctagcctctatccttgctctcctccctacacaaacagcttctccagggtaatttatttatatcattgtgtgtgtgtgtgtgcactcacgagcactccctagtactgcgtgtctgggtggtgtgtaattttaatttaaatacacagtcatgtactgaggccctctttctgtttggcatttgtgtcactcagcactgtgtttccacgcgtctctatcttgtgaagtgtacatctagtcccctgctcctaaccacagtgaccagctccaactgcccacccctatgggccatgctgccctgagcatgcacacacacagcctctcgttgttctgggtgagaactgctccagcatgtttacttaggagggaaactgctgggccacaggtataaaatattttatttgaggaagaagtgttggccagctcttcagaacgtctgtgcctgtctccgtccccacctgcagcacacagggaggcttgttccctgccttctgccaacacttggccttatcctactttctaatgcttctcctatgaagaatagctgttgctttcatttacatttctctgataactgattagcttgggcaaattttcatctgtttgttaaccctcctgcaaactggcaatcttcctacctttttcttaatgatttgtggtgctttctggtatattttagctgttgttccctcctcagctttaattgtttcaaatatcttgtaatgagtcatggcaaagttacattcatgagtgtaaaagtgaaaaacgcaaattgtttccttagtattattatgaaaacagtcctgacccttgccatgatggatttatttaacagaaatccttaatccataatcattaatgcattcaagttcatacattttagtcttgaggtttgtgctttctggatcctgtttaagaaccccacggccaccctggccctggagattattcattttttctcctattaaacaaatggcaactaccttttgctttcaaatatttagtccatttggagtctacttttcctaggggctcagttaggaatccatattcctattcctccattttagggctggctttccaacatcatcttctgaacagtccccactgatatgtggtgccacctttatcacatgtccccttcctctagacttggagttacctctgagctctcttctgggcctctgtcatcacaccgctctgattgctgaagttggcgtgtgccctggtatctgccagcagaagtcctctgctctccttttcaaaagttcagttggcatttacaaatatttttcttccacatacattttagaatatgtttgttaaattactcaagccctccaactggaagtttgagtggagtcctgttgaacttaacagatttggaaaatcctgacgtcattctaatgccaagttgccctgttcaagaaaataaaatgtctctgcatatggaaagatctccctctatatcctccaatagagttttaaaattttttccataaaagtcgtcgtctttgttaattcctagactggtataaattttgctgctattctgattgctgtcctaatctctattatgcttttttttagtcagttgctattggcataaagaaatgtggtttgtttttgttttttgttttgagtacactgatcttatatccaaaacctctctgaaatctgaaatctctctttagttgttaagttccttaattttttttttccatgtagcccagtaattttcaaagtgtagtctggggattccagagagccccccagaccctttcaggaaaggtcaaaaacattttcataataatactcgacattatttgccttttctttcattctcacaaagataaagagttttccagaggcagcacaccatgaccccagtggaatatgtgcttgtatagttctgctttaaacatttcttagttttaacttctaagatggtaactatcaacagatagaatctctatcaagaaaagccctttgggggtttcaataacttttaagaatacaacaagtcgtaacaccaaaatgtttgagaacctttatggagaccatcaaccctatgagctacactaagttttatcacttcctacctgatcctcacatccccatttctttttcttgtattagggtatggccaggatgacatccttggcctactccttatcttaaagagaatgatacacttttaatttctctatcaagtttactgaaaagttaagttttggtttataacttgtatcaagttgaagaagttcctctctagtcctggcttgctaagtggtgtactccactaccccaaaatcacacataggcgttaaactttatcacatcatttttttctgcctctattgagggaaccatatggtttttctcctgtagcctcttaatgtgaattacatggataaagtttctgatattggatcatctttgcattcctaagagcaatcccacttgtttaagaattgttgtttaatacatattattggattcagttagctagcattgtacaaggaacttctgcatctacattcataagggaaattctttatagttttcttgtgctttctatctgaatttggacatgctctgattcgcaattttaaaaaatccctctagctggagcataaatcctgaaacagacccacttttctcctcagcatgttaggaaacacattaaaatacacccataatcaagcaactcaatccttaaatttttctcctactgagtatctggaaaacaggtgcagaaatggatcatttgagacaccatagaaatctggttaatcctgcctgcctgctttccttcaagtactgactgagtaaggctgtgtatcaggctcttggctgggtacagagcaggcagcagaaaacaaaacagagttcctcgctgggagcttttggtctagcaaaaggggcaccacagtaaagaaagaactggtaaatgcacatcaaatgtggatattatcaggaaagtttttatactttgtgataatctaagacagaactattctacctggatgaattattctctttcataaccagaacagtgctgtgggaaggcactcttactctcaattttatataaaaggctatttgacctgctcagggaccacagtggggtactgggatctgaacatagtggtggcccttcaagcctactacccagactgagactgcatctgatcaactctcatctccaatatgaccaagagacttctaccactacctctcacctggcaggtgatcaccacccccaactcagactgcaacctttacttcgccccctaattcctgactcagaatccccacctagaggcagaacttcgacttcaattcctgactcccataccccactgagacctctaaccccaatcccaatctcttaactcagagccccccattcagaacctctacccaaagacagactccagaccctgactccagtcgccaactcggacctcccttggatctcaactcagagccatgatgcagactccagaccgggattcaggtccccaactcagactcccgatcctctgtccctaatgaggccctacctaaaaccaccatgcggactccagacccggactgactgggaccccaactactcagatcccaactcaggcaaactcccagccaggatgtggaccctagacccgaattctgatcccaactaggatacctaactcagaaccacaacggggattcccacctccgatcctaattcgggccctgactcagaaccactaagtggatttccgactccggtcccaattcgggctttgactcaaaaccacaacatggattcccaacttccatcccaatagcgcggactcagaaccacgatgcggattccagactccaatcccaattcagcccactctgaaccaccatgagaactatagacccggaatccgatccttgggacgcggccaggaactcggacctcgaccctggccacgctgtccataaggtgcagatgggagcgcactgcccaggccaggctgcactgctgacgcctgtgatctgggacggccgcggggcacacagctcacctcagcaacgccagtgatcacccgtcccgcgccgtccgcccaggtccgtgctgaccgtgttcaaaccctcccagagagatggggagggccgcgctgaggagagtctgggagaaccgcactgaggagccgccgggagagtgccgcgctgaggagcccccggggagagtgccgcgctgaggaggcccagggaggaccgcgcggaggagaaccatgctgaggagcccccggggagaacagaaccgcggcgagaggcccccggagagaaccgcgccgaagaacccccggggagaaccgcgccgaagaacccccggggagaaccgcgccgaagaacccccggggagaaccgcgccgaaaagccccgggtgccccgaggagaacggcgccgaggagtccccggggagaactgcgccgaggagcccccagaagagcgccgcgctgaggagccccgaggagaaccgcgccgaggggcgcgccggggagaaccacgatgactgacgcaccgaggaggaccgcgctgaggggcgcaccgggagaatcgtgctgaggagccccggggaggaccacgctgagaggcaccccggcagaatcgcgctgaggggcgccctggcaggatcttgctgaggagctccctggaggtccgtgctgaggcgacgcggcgaccgttctgcctggagactgcggcagcgctccgactgcccccgccgctgccgacgtggcgaccgccccccacctgctgattgggcggcagcaggggaaggcttgcggcgggctgctgcacggattggctgggtgcggaaagtgatgtgccgtgtcctgtcattggccgaaagagtctggttttgatgccacccgggctcagattggcccagcgggtccagcgccgcatgaggcactggctgggtgtgaggtggcgcgagccgccgccctccctgcccccacccgtcgtccctgagcaccaccgggggccggggccagcgccagcctcagcgttggcatcgccggggtgagccggagacacgggccagttctctgcgtgatgtgttcaccaccccggggtgaccgcgtgaggacagcggccgcaccccgacactgctgtgggccctcggtgtggaggcctgtgggcgtccaggccacgcccgagaccagcccctccgccggcgccgctgcagcgaccctcgaacccgggcaaggtctccaccgccgtggcaccgggtgcgggaggcgttttcccccctcccagcgggtccatgcaggggatcgggatgttctgaagcccccactgctgtgcctggaacacccgtgtctgccgctcacccctgaggacttgggacctcagggggtgagtggcaggggtggccgggacatgccaggccacccacctggcaaagggcagcgccgagggcgccccgcgcctgccagcgcccggccgggcccgccctgcccacctcccatcccccatccgggcgtgacacttgaccgcgtctgccggcccctccccttgtccgtcccctccgcgccgctggcgcgcgccttctgaatgccaagcattgccataaactccggggacaaaagcctgggtcacaaaagccccctctagaagttcacaccctgaggcttccctggcaaggctgggggccgtttggcccttccatgtggactgcaaaaacagtgttggaatgcaggactctgggtatgttctcgaaagttgttacaaccccaacccagggttgacctcaaacacaggaggaagggggaggctggagccagccaagagagccagccgtccccccaccaaggcacgcaaggaggccattcatcttcactgcctctgccgaaaatatacgtctacgggagagccaggaatctctctccaagggtgaccgggttgggggttttgttgttcttcagcccagaagagaaagagaaaatggtgtcattttttcaggcagcaagtgattcctttcaggccttcagcaacgacgcccagatgagtccactccctgcctcctgctcagcccacaggcaatctgggcacaagtgacacatcccctgggcgcctgtcccttcgcactggcccagggagttcatgtgtctgatcagagggcgcagtccaccctcactatctagctgggaagtttttgtcatctgcctgtccgagaggcagctgtgcaaccagtgccatcactcagagccagtgctcaggtgcaccccagactcagggtttcacgctataatgtcactgtcttgaaattcttgatagttattatctttgaacttgtgttttagaagtgaagtctgaggggaaaatggagcttggaacttcagctcccaagtggctttcccaccttcctgcctcctcaggacagattatcagctgcctgtctgcctgcttcctctgtgcccagcctctctcttgacatccaaaggatcacaactcccactcagtgaccactattattctctgcccctgaccaaaaagagcagggcagggctggagtcctgaccctggcctggactctgcaatgcagagatacctgcaagtctcatttccccgcctgtaggatggaggtgatgctgacagcctcttggagccattgagataggaaacgagagagattatgtgagaagacagggtcaggaatgttgagttgagggtggcctcaggcccctgtcctgctcctttttgctgcttggggtgcagctcaattccagcctcactgtggcccccaggcctcctctggccttcctcagccttcctcaggaggccagaatcctcccctgatcaccctccctgcatgtccatttctacctccccaggaggtcaggggagcaggatcccaggtcttcagagtcatttcacagatttcaccagaataaaagtcccactcatgtggggtttacattctggtgggaaagacagattttcgaaacgtggccatttttctttgggcctttgttagctgcatcagatggaggaggtagcctggtggactccttcagtcctcgctcttggacacagagctgtctcccagcctttgttgttgttttctccaaggatgtcgaacacaggctgaaaagctccctaaatcaatttcacttaaaatggtgtccaccctcctactaaagagtgacaaagggtgttggttaggatttttatcttgaaaactgatttgtaaagtcatgaaaattgagcttatttggtcttacacttaacaaaactgtgggttctaattgtgggcctggatggggacatatcttacaagtagttgattcatttatatagattttcatgttctgggcttgcctccaccctctacctaaccctggaacctcagaccccaagctcctgggcacttggatttttccctgacaaattccccgcctgtgatattccatgggcacctcaccttgtgtgcttgtgtgaggtctccttgagtactcttagcagtggggttgccaggccaaggagcctgtcactattgtttgtgaccagctcaccagacgtggtcaggaaggacagttctgtgtcctatgtcctctgctcctcaccccctcgccacacacggggtgctgtcaatcagccagcgccgcctgccagcccagcgcacctgttgtgtgcccccactcccgcctcctctagtcctttgggggaagagtggagaggaaaacaggccgagactgagaggggtttgttgtctcgtcgggcgacaagagacacgtgggaattggctagagaagcatgtgaggctgggcggactccaggccagccccagaggcagatgggggctgccaggcaggctgggaggtgagcccagggctggccttgggcaccatggcagaattctgggagggggctgcagtcacggccagctccctttctgaattgttctgtgggttgtggaaggctttgaaatttggcgcctgcaccttgtcaccttcttgggactcaaggctgcaggggtgggtgtgagacagagagcctgggcacctggtggccactccctgagctccccacgtgacagagggcaggtcccattctccttttgtgtctggtttgcctcatctgtacatggtaggggctgagctagcgttccttgcactccctccagctttactctttggggttcaaaaggttcccttgcaagcctgtgcacccgagagcacgcacgcacacacgcactcacagctgaagagaattaggctcaaaacgtccactcggcttttctcttgattccaaggtatttagagtgggggtgggggattaggggaggaagttgctgagctaattcttttgcatttgccagcacagaagtgcagatggggcccagagccccggcggtgtcccaggggaaacaccagtcctcttctgcagtgcaaggcaggagaaagaactgctgtgggagcccctcacccaagcagcaggatgtgtggcaggccctggccaaggagttctgtgggcctcaattctctccctaccctgcccccaccctcggagtctaagggtggaaccatcttcagacccagccaggttcccaagttgctgcttccctcggaagctgagaggcccagggccacgtggcagcctccgcagtccatctgaagaaaggccccaccccacgctgctctcaggagtggacaggaacgtgggggagtgggggtggttaggacctcagggttatccctgagtggctgatgcattgccaggaagcctgctcttaaggtcagcccttgcagttggcagtctgtggcccctcctcggtccccttcagtgaggctttttgcatgcattggtccacacacccaccactgcagctgtcctgggtaagggctctgtgatcctgcaacgcccaccttcttccttcactggtcataggtttctgctgaccctgcagcccatgtccttgttccagaatcttccgcctcctgtggcctgtgtgtcgcctgcacctgcattccactggggcttcccttccaacttgatggtttcaggtacatgggcctgttgtcaactctgttcccactgagcccatgagacggctattcctttgagacatgtttacttgacttcctgccccaggtctctgctgtacccacaggtggcatggactcatgtccccacccaaatcacatccccaccaggatgggcaggctctgggtccttttgggccttgtaggctgtcgtcagaggggaggaacagtggggagtctctaggaggttttcggcaaggcagtgccaaggatcagatctcccttctagaaaggtcactctggctgctgaacagagagagaactgaagagaggcagcagggtgagggggaagactacgggggacttgccgtcacccagtgagagagatgggagggttggagaaagcgagcatctgtggaggtgtgagaagtgccaggctgggctccctcaggcggcaactttgtctagacttctggctgaggacagggaggagcttaaggtagccctcagcatccaacaggggtagcagcctagtgcatgtatgaccacgagcgagcccaagggaaggacgggtttggagggtttctgaagatctggcttggatatagtggggtcagaccctatccctccacccagctgcagtgacaactctgtggctctggggcactgtcaccctgtggcatggcctgtttgtggtgtccattgccgtcttagctacccaaggcccagggagaggcacacggctcaggctgacagagtgtgacagatgcaggtcctgctccctcagggaatcccccattccaggacagtctcagcccccatgcaagagcagcctcagcatgggctgctcggggaatgccctcagacaacagtgctgtgttagggtcactcccagcctgtcctcacaggcagatttgcgttcctgcatttggggtcagtgataacgtgaggccagacgggtggggggtctggagttcaggcggtctccatgagtggcagcacggggtgtgggccagttcccattgggagggcagctgtgctgtgtgtgtatatgtttgggcattgctcagccaagccttgattagccgaacccaactctcccagagcccccacttcgacgcgggttaactcagcagctgtctcctgagcacctgcttggggcctggttgggtgccaggcacgggggggtgggaaaatgaagtgaactgggcctgccagacccattgcctgcagggccttttctaccaccaccttccagaggcagcttcctcccacaaagcatcccaagctcggggtgtgtgccccccttcctgtgcaggcctgccacttccacagctgccccccagccaagaacaatcccctcagcctgccagggaaaagtgggcccaggcctttgaggacattgccacagccagggccaacctgggaagttgtttctgattatctcttgagtcctgggagaggtgttaacaaaaagccccatccctgtcgctctggtggttatagtttgttttacgcattaaaaggccctggatcggtatttgtagtgagaacagatatttgcagagagcctactccattcccagctctgtacttgtagagggtgaggctgctgaaatgaaacccaccaggcctctggtgagcagtgggtgcagagttattggcagtaaaggtccttagagaacctgaagagaatattctaatcaagctaggcaggctcagaagatggatgtaatttggaggaaaaagacaagaatgggaaagaaagggaaacctacctggggtaccgtgtggctgtggtggttttagtatgtgtctacaaggcctttgacaatccgttcttccggaagtggcacttaattcccctctaattaagttttggctggactgtgatttgcttctttcaaataaaatatggaagaagtgacagagcatgacttccaagactaggccttgcagcctccctgccctctcactgggatcactgattctgggggaagccagccaccatggtgtgaggacactagcagccctctggagaggtcctgtggtgaggaactgaggcctcctataaatggcctcctgtatgagcttgggagtggatcctccagccccagtcaaacctctgatgagacagcagccctggtctacaccttgactgcagcctcacaggagatcagaaccacccagccaagccacccccagatccctcgcccacagaaaccatgtgggatgataaatgtgggctgctttaggaatgaagctgtagggtgacttgtcacacagcaaaggccagctgacagagccacccactctcaccaggcttagtctgacccttgtcaggggcagcaaagtgggctcagcctacctgttggcttttactgatggttggtggctcccaggagaaagagtactgtgcccaggtagcatgcccaccccaggcatacatagcatgtctttgctcttgcagagtttgaactctgcccaccagaccagtggctcttaacctaggctcctcgtgagaaccactccccggtgcaggtcccactcccagaaaggagagcggttttgactcctgcagtctctaaggcagcagagagctgtggcattttgggtggagtgggtggagagggtgcgtgatgggtgggagaaactgacagttggaatgtgatttaggaaatgtaacgggtgacttttctccccaagagaacaccaaatccatttccttgggacatggataaggctaagggcagcacccacaaggaccaggagcggggttctcaacagccatttctgtcccaaatttgttttctatgcccaggaatgtcaaagggccctcttggggtcagccacagagaagggggagcaggtgtgatggggtggtgatgggatgctgtaggtggatgagaagtagcaccaaagctcactactgtttttctcttatccctgggtcttggggacaggcctgtgccagaagcagggattgcttctgctgtaacgtccactggaataaaaagcagacattgcagtgttgagaaattcctttagccctcaggaggcaagttacagaacaggacagaactgccctagtcaggccctgcctgggcacagagctgccaccactcttccaagagccctcccttttggggactgtgcccccaccccacccccaggcagcccctgcctccaaccttactcctagctggtgttctgggccgtcagttcataggtccagctctgagacctgccaggctctcagagcagcctggacccaggagagcgataaatggatgtgcactggcacactccaagcagggaggctttgtttatctcccaattagtcctgtagcacttagtatgtcaggcatggttctgagggcttcatccacactaccacccactgtagagatgggaaaactgaggcatagcaaggtcaagggattgggcaggccttaggatgtagaagctactagagctgggctgcacctgggtatcctggagccagggtctatccctccccctctgccacacggccttggtgtgagggacacagcccctgtttgcagaggcagctcctttcatggagcatgggggacagggcaggtgtgccttggcccacatttggcttcttgagcgccgaacctgcatgtgccaccccccagagttcctgtgtgtggccgggtgaatgtgcacaggtcgaggaggtggtgtgggcagccaacctcccaaagcaccaggcccctcagggctgttcccctgtttcccaagatttcccaaacagatggccaagatcgggggcccccaggagaccacgctcatgaattgttccacttgaacacaacattgttttttatggaactgggctggggagtcctctgtgactctttcctcagtagggagagagctcctgaacccaccgtgcacacttcttcagcagccgctttggagacttgactttgacactcttctcaacaggatccctttcctcactggtgtctgcggcccgggccgctggcatggctgagcggaacttggcaaagcagtgaattgggagctcacttaggcacgtggtcctgaggctccttgctggcgtttctgttttgctccctgctcctttcttttctttgtaacttctcttcagggcacccacagcccccgaggagggtggggctgaggaggctggaggtggagcccaggcttatccccctggtgggccaggcaggcagcaaagggaccaaccccaagagggtcggtgcggagacccctggggtgcacagggtgggcagtgaccagaagactcaccccagggcctctaattttgacccttgatctgggtctaagcacctctgagcaagaggtgagggtttcaggcagcctcagctcttaggaggcagaagatacagtttatacgcgggttggggggggcggtccatttccatctccctgttctctccccaggccaatggccagggctaaagccctccttgggacatgtcaatagcagcaaacattttaaagatgtgacatgttcgaagcctggcaacaggggcagctccagctgtgcgagaacatggctggatttacgtctgcggcaaagcacccggtcacctttctctgcttggagtgcaatctttttttggaagccctgctggaaaatctgaatcttgtgagccatcagctgtttataatcagagaagcatatgtttaaaagagctgaggggccttataaactccgtgtgcaaattacctttggggctgcctgctccaccgcccctccctgaggctgccatcactggcgaacggctgagtgtgctgcacagaattcgctgtaaccctgttgtggcacggggtctgtttagctttagtcacgtcagcttggccctggagcgtgggagcctccatctctcctgcacggcttccaggccccccccacccccaccccccagccccagctgcagaggacttctggctccctgttcctgggctttcagcatgagaaatatcaaacctgggaaccgtgcagcaagaagcgggcagaggctcagacgccaggacctgcgggggcttcctggaattgggagccactctcggtgtctgctctggtgctacggtcctgcagggccggttttttttattttgtattttttggtgttcatttttgtttttgtaacagctttattaagataaaattcacataccatacaattcacccatttaaagtgtacgattcaacggtttttagtacgttcagagttgcgcaaccatcacactatctagttccagaacattttcagtgcccctaaaagcaaccctgcattctttagccgtcactccccacttcccttctctcattccccagccccagtcagccacggctctgctttctatctccacgggtttgcctgttctgaacatttcacatagctggaatcacacactaagcagacttttgtggctgacttctttcacttagcctaaggttttcgaggttcattcatgctgtagcatgtatcagtgtttcattcctttttagggccaaataatatgccattttatggatattatcacattttatttatccattcattcattgaacacttgggccatttttactttttagctattagtgaataatactgccaggaacatttgggtatgagtttttattgtggacatagattttcatttttcttgagtattcacagaggagtagaaacgctgggtcatatggtgactccatatttaaccttttgaggatctgccagactgttttccaatgtggcagcaccattttgcattcccaccagtagtgtatgtgagttcctatctctccacattctcaccaacacttgttactgtctgccgttttcattttagccatcttagtgggtgtgaagtgatatctcctagtggttttgatttgcatttccccgatgactaatgatgttgagcatcttattagccatttgtatctcttctttgaagaagtatgtattcaaattctttgcccaaattttaattgggttgtgtttttattatttagtagagttctttatagtctagatataagttttttatattctagattcaagttccttatcagatatattttcttcctttttgtgggttgtcttttcactttcttgatcatgtcctttgactcacaaaggtttttaattttgatgaagttcaatttatctgtttctttctttggatgcttatgtttttggtgtcataactaaataacaacatgtaatctgaggtcaaaaagatttacccctatattttcttccaagaattttatagttttggctcttacacttaggtctttcatccgctttcagttagtttaacatatggtgtgaggtaggggtctaactttattctttgtcatgtggatagacagttatcccaacaccatttgttgaaaagactcttctttcctcagtgaaggatgttgatacccttgtcaaaaatcagttgacagtaaatatgaaggtttatttctggattctcaattttattctattgatttgtttgtctatccttatgccagtactatatcgtcttgattgttatagctttgtagtgagttttaaaattggaaagtgggttttccaactttgtttttctttttcaagattattttggctattctgggtcccttgaatttccatatgaattttacaatcagcttgtcaatttctgcaaagaaaccatctgggataccaatagggattgcattgaatctgtaggtcaacttggggagtattgccatcttaacaatgtgttaagtcttccaatccaagagcatgtatttcattgtatttggatttttaaaaatttggttcaagaatatctcatagttttcagtatagtttttgcactactttgtaaatcctacagggttttgtgtgacagtgactggcagccatacttcctccccatgtactgggttctgcccatcctccagcccatctcccttggagtctctccccgactccagggctcatggcccctttcaggcccttggcttctggtaatgcttctttgtggtctcctgtcttgcgcactaattgttgcccaagtctttgcacatcctgcatcctgcctggagtgttctctctcctcccttttctgtgagccgtcatgaaacacctcctgtgggcttactgagccaccatcttatccaagtgctctgtggcagcttgtggaatcttctcaaccttgggtgtcgcctgcccagaacggggctctcggaggccagggtgactccactatcccaccaacctctgtaccccacggccatgcacaaggcacagggtcccacagagggtctgtgggtacaatggagctatttcccagtcagacctcacaatcggtaaactgtgcttaaactaagtgaggtatcttaaggctttaccaccagggaaatagaactttggcagcttacaaaggagttttatttttcaaatttcctttcaactcgagggtctcaaatccactcagcagacttaggagggagggtcctggcactgcttctgaggagggtgcctttgaggggaggcagagttggctcacgggaaaggctggccctgaggcatggcaggtggcaggtggctggggctgctcacctgctcacctgtgtccatccccttgggcagcacacagccaagtccttttggaccaaattggatcactgccaaatggtatgcccagccttgctgaatctctacccatctgtaaaaaggagaaatcgtttctgtgctccctgcctcccagagagccagggagaggccaggatccaaggaggtaacggctttctagccctttggaaacctgagtggggttttgtgcttgcatctcatttaagccatgaacacttgccggctctctattcatccacaccccctgcatttattgagtgccttctgggtgcccggccctctactagatgtgggagttaccgtgtgggatggactgacactggtgacccctgcctgggggaagcagactctagctgggcagcctggcctcaggagatcatcacaaccctcgctggggctggggtgcaaatggggcaggaacaggagtccggcctgggggatgttagactcaccagccatcccctggaaagctgtggggagactcagagcagagcccccagtaatcatagtgaggtatttagggatagagtggagatctcgcccacatattcccgaagccaccaggccagacaccgccccagctgaatgcatgctggcggcccaaatgttagacactcttctctcttaggtggtttgaggagacttaggggcttccatattccccttggaacatgaagaaggggctggctaaggcccccatccctgctcaggcctacaggagagccctgtggacactccagcctcagccttccttgccatccgcaaccacaccagtggctggaaagccagagtcccctggctcctgcactttttctgcacgggactccctcacagcctctgggttgggagcacacatggcatctcctagagagtttgggggctggacacagggaggaggcagcatgggaaatggaaggactgcagcccccacctccctccaaggcagttgtcagagcaagatcagctccctggaagacacccgggttgtaaacagggtggggcaggggtcctggtaagtatgaggaaccagagacctggtaagtatgaggaaccaccccttggcatggggcacccagaaggcagcaggctaacgactccccatgaaattaacaactttgtgaagcatttggtatttgggggattttacattagggttaatgagcctctgaaatgagatcccggagaggggccaggaccatgctgggatgtggcttccgtggactgagcagcctggagcccctacttgcttggtgtcccgagccagccggacatgcatcccgctctctccgctccctggaaacgttccctgaatcacattgttcactgcgcttctcaggccttctgggctcttcctctgctgctcgccataaaaactctccagtcatcttttccgctgtggtttttattgttttattttattattccagctatattacgttgggaagagctacagaaatggtttcttctcccccagattccagaacaagtcacagccattgtagattttgattaatcgccatccccattattcttcactttctccagctgaatttttcccactgtgggaagggggtctggaggacaggcacccttgttggccgtggataggtttctgttctccctcgacccacccagcaagagaaaaaagtgagctgacattatgggtcggcccctgttctggaggccacagccacaggctctgcgggcctctggccgagctgggttgcaggagaagccaagtgccgggtgaaggcctggggaggaatctgggttctcttggctgctggtaagattatccattaaatccatattcctcactgtagagttcatggattcagaggatataccgtattctggccgtcttacattactgcaatattgcttccagatgggcaaacgcgcgctcggagcctggccctgcagacacgatggcccagcacgccgctcactgccgcgcctttgttctctgcttcctgctcggttcctgctaactcagggagctccaggtggctgccactcaggggtgtgtggggggcgccttggggcacccaggcctgcagccctcccccacacaggcagtctccacagagatagagcgccaaggatgcgggccaggactctttccgagcctctcctgttgctggggcctgctccctgaagggcacagtcctgggcaggcgcagtgcccaggctggagaggtcctgcgtctccatctcatccacaggataagtcaaatgggagcattccagcattccgcatctcatgggggggttgggcctcacctccctggcagcccactcacctcacatggcctgagccgcaaggtcagccccctcccaggcccgtgagaggcagcgggcactatgggcgagctgcctgctgggccacaggctctggtactctcctgggttggggctcccggggtagggctaagtgtggtggcagtggagtcagggcagctggacagcccctctgccatcagtgagaactgtcttctctctgcttcccctgtgcacttctgaatccccagggctgggcacagggctgtgacgccataggtgctctagatagatggaggagctcacagctgcagggagtgttgggtggacatatggggtgtggggggcgaggccaggcttcacagaggtggaatctcaaaggaggaagcggcatgccaggtggcggacatagcacctgcaaacgcctgggaggtgaaggcaccagctgtagccagcatcccagaaagggacacgaagcccttggggccggggtggtaggggtaggagagcatcttgagggtggctgcagcatcgtcgtcatctttcaaatggtggcatcccttccccaagcaagggaatgatgcagacagaggtgcctttcagaaagaatggaggtcctggggacctgacttctgggtccctcaggacacatgctctccagctcgtcagtgttacctggatactctaatgggggcacaaagccgggggggagcctgcaggaggggcctagccagggccaggtgtcacacaagcagagctccagggtgcagctgggcagattgccggtggttggtgctggtgaggagtagcagggtggggtccggcggtaatgccactgatgatacttggcgaggatgaccgcaagtgtcttgacccaaacatgagatgcccctcacccatcctcccatgaacctcagcatgggcaccccatgccacccgctccatttacagccaaggagcctcagtagagacacagctagaaagtggccagctggggtttggtgctgagcctctgtctgactctctgctctctggagagctcaagggaacctgtaaagacctgcgggctgtgtcatggagggcccttaccccggaggagccaggaaggtggacagagcaggaaggagtggggcaggagggggctttgcagattacccagaccctttgttggccagtgtgggaatggggggaggccagggaggaacccctgcagcctggctcaggcaggggcatgtgtgaaggcccagggggaagagagcagccaggtagacttcgtttccagccggagtgtacctggggatgcctgtgcccaagccttcctcttccaccacccctgctggggtcccctgggacccatccttccaagcccctgccagccttggaacctgtgactccccaggtggtcaaacacagaaggacctcttgggggaaggggaaccagcaaagggggtatggggagccctctggggcaccctcatatcacaccctgtccctctggccacattccagctggccctgcctgtgagggttgaccagctggagcagccccacatcccacatccccgcagccttgcgctggtctaaatgcctcccagcctcctgaggttgagggtggccacaccagccagagcttgggtgattgagtgggtagagggggtggccagagtgggaaccatggtgatgcaaaccataaacctgtcccccacgtcacctccaaaccctttgggctggcctcttggtgaggaatggccctgggagaggctgccctgcctttgacctctcatgcactgagagtaatgggcaagcgctgtctgcagagcactgaccccaccgccggggtcggagcccctattcctagcctcccttgagcgttttggttgccggatcctcattaatggctgtttgtatcacttaacaatttttcacttttggaggggtcgtgaataaccccaaagcaacatgtaccctctccgggccaggctcaagcggtcctctcactagggaaagaagtcagaaaaaagctccaagctgaagcgcccacacctaccctctgcatcagatgtgctgcggctctcaaggaaccctctagggcacagctttggggagtggagctgcgtggtcagctggccaagccacagtgggaaaaggtggcccattggccagaacacagtccccaagcctcctcagctaggctctcgaggaatggctgggtgtcctttctcagcagaaaagccttgtccccagcctccagggccaggctccagcttcccaggcgtgtgcttcccacccaggctcttgtgggttggcttgccaagcggtgttaggacacgcagcttcagttctgcagggcctggtggaattccattccctgcctcccagaaatcttatcttgagggccgctcagctacagtaggccccaagccccagagactccagattccccactacggaaggcagccgtgaaaggcacgggcagcgcggtgcttctccttcaggaggtggaactgggtggcccgcattgaacaggccaggagcactggtgttctggatccaaagcaaccatctcttcccacatttggagggagccgagggcaggcaggagccaggacccagtgcatcctgaatactgggtgactggcagacatcactctggcccaaggccaggcctgcagtaggagctctgtgcatatcccctatgtgagtacaggaacctcagtggtgcctgtggagctgttcagtgggccctgtattcgccagcacagccatggtcctgctgagtgacaaacagccccccagatgtcctgccctctggtgctgcttgtccaccatgaagtggccggggctctgctcagggacccaggtgctcttgcagacaacccaagtcttccttcctactcctggcagggcaggcaattccactgatggctgcagtgcgacacagactgggcctggcatggtgtccctcagaccccacggcttggtcgggtcacctgggccatttcaaaggctgttggggagcaggaatcacaagctggatgtcagcttgagggttaccccagagtgagagcctcgacagccaggccctcccaggcttctgtgatcgcagcccacacctctgcgcacagtatgccaatgttccccaaaatctacatactgagaaggtagacagcaaagccacagggagacttctgggtagcccaggtggaattcttccctccctgtttcccagttttccacccttttccctggctttcttccagaaccttttaatgaaagtgcctctgccccaccagggcctggcttaggatgggtgagggagaggagctccgggaggtcacggccccacccaggaacgttcctgtcccaatcctcccatccccatattcaggaaagttccccaggcccgtatgaactggcttcttaattttgttttaaacacaagctttcagaagagcagaaacggaaagacagatggcaggaggtgccgcagggcagcactggggagcctgagatagagagcgggtagacaggaaagcagctcacagcggctggagagcagggagcacacgcctgtccaagaccttgggccagaggaaccccctctcccccgatggcccactcgccccagggtctccaggtttgagccccccggggtattagcccagcattttaggggctgccgtggtcatggagtaaagactacacctggcatggcttccttggtttctgaaggctgcgaaagctgcgtctgtcgcagaagtgaaccttgttttgttttgttgatgggtgtagtctcagggcatgttcaatgtctgtggagctgcctcttctggaagagccgggttgacacccgcgtgccccgtcctggcttaaacactttgaggccctccctgccctcgggggagctgagagccccactgcagcccagaggccctcccctgacagctgccttcctctgctccgtccttccccacatccccctcacacaccttgtgcttgctctgggcttcaggggcctgagccccaggtagacccccacacttagggtgcctcaccacactccatccctagccccagactggcttccctgcatctggctgaccccctcctcacctgcctgtttccacctcagggcccctcctgaagccggaacttgatccccgcagcaccagcccctccccgtagcctcatggggcacagctctgaggatgtggatgagcagaggggaggacagggatgatgaaccccaggaattggcttccagtggatgcaaggctgactcgtacatgtcatggaggatagttcgggcatctgagctagctgaggctccttggagcacatgcatggcctggactgtccagaagtcgtctacgtgctttgtgtagacgcatgactccccagctggctccgtactagatgacctgggctagggccacttatatctgtcaggggaagggcagttgcagttaggaccacactaaaaggttaatgtccacgctggtgttgaccaagccctggaccctgctgtgccaggcactcccatcagcatccaggtgcccattttactacagggatctgagagctggctaggcaggcatcccgggtcattactgggcctgtaagggccttcatgtctgcaccctccctgccatgcaccttaaggtcaggaagtccattcaaatgcagattcctgggctattccaagagttactgaatccccaccctggggtgaaggcttggcgtctgccagggaccatagaccacagatactcatctacgcttgtgacccccctcccgcccctgagtgtgtgctggggcaggaggccctgtggcaagtggagccccaaccgcagagcaccatctccagccgtgtgctctcgggtgcagagctgacctcccaagtctcaggcttcttgtctctcaagttgggggtaacaatggctatgtacataagattaggagaacacacagaaggtggtgctggctaaagccattatcacaggctggtgcctatagtcccagcactttgggaggccaggcgttagagaccagcctgggcagtataacgagactctgtctctaccaaaaaaaaaaaaaaaaaaagagccatacaaggtggtgcgtgcctgtggtcccagctgtttgggggctgagatgggaggatcgcctgagcctgggaggtcaagagtgcagtgagccatgatgactgtgattgacgtgttgaccaggcactcaaaaacaaacaaacaaacaaaaaaaaaaaaaaaccattatcaccccctgcacacaaatcccagagttcagagaacacagatcaaaataagaagtcagagaatcctctccagctgaaaaccctcatttgttatcacccaaatgctgcctgctggctggcgagccttgctggtggtggaaggcccagcagtagcaaaggaaaccagggcaggacagtgtaggaagtcctgccctcggatcatttggggaaattggcacctgtgtttctcaccacacagtgttgggttggagaatgggcctgggtgcagagcttcggagccaaacaccgtgctggtttcagagaaacaaacagccctgatgtagctgtggcccttggaggtgtccgaatagtccatcattttcagtgacagaaagacggaaatggacacagatcaaacctgcatcacagatgtatagctaggtcagcgaaccactcaaaagaccccagggtctgaccccttgcacgcctgggcggaggtggagccgcttcaccatacatgcaaatgtagcaaactgcaaaatgtcccaaaacaagtcccttactgtccgtgtccctccatgccagctcactggaggggctcctgctgaaagaggtggggttcagttcccaaacccactggagggttgcaaggagacgcttctagtatgttagacagcacagtcttccaaatggactgtgggcatgatggatgtgtaaagaatcgagaagccaagtgcccttgccatttgttatctttaaaaagtatcggtgggctcatgggggcttgagtgtcctggcagctctcctcatccatcctatgtgtacactcaggcacgtactccctggctcagccgccttctggggcccggctacagtcaggcctccttcgtgctgagcatgtgctggccctgcctggggacagctgaaggccaggaggaagctgctggcctcaagaaggcctctcgaagcagaggcagccccctcgaagctcacctggcctctctctctaaggggagagggacccagggctgaccagagcaagcagtgtgccattaacccctacctgtccagaactctgagctcctgtgggtccttctctgagtgtcctatgttgggggtgtcagcctgggtgtcaaggctgaagaggggagcctccttggccactgaaacggaaacagcattagccaccaccagccccttcccccttttgcagggcggctcccagaacctaggagtccatgctacctgtggggttcatagtgtgtccctctcagccaatgggaagtcgtgcccttggatcatttggggcaaatggtcctcgttttcttcattatatggtgttgagttggggaacggccttgctgggagttggggcctggcctggacctcgaggccactggggacttggctacctgagggagatgaggttgttcccagggtttcctcatcccaggggctctcagatttccagggactcgggcaggcacagctttccaggccagagccatggacggtccctggacacctgcagcagccaggccccagatgcaagaaagggtatttgtttcttaaagcttgtaaagagtttctaaaaggtggggaggggattggtgggggcctgtctcatgttttccattctggacgccggggggacatgttgctggggccagaccaactccagggagacaactcgacaagttacgaaacatccagcagcatccacgactaatttcttccccctgtttgtcctaccgtggaggtcgagttaaaaggcagcacttcgggggttgaaaagctacccgcaggggtctgctcgtgagggacccccgggcctctgcagcctttgttcagaggcagctaataagccgactcccgctgggcgctttgtagcgaggccgctgttcccagtcccagctcagcctccctgcctcagagggctggcagatcagcaaattgctgtctccagctcgcaagaggggcaggtccagggatgtgtttcacccccaaggtgtgagtggaatcagcaaattgtatcaagaaatatttctagggatttacattccggcggtcagcagcctttgggaggctttactccgcctgcaggggtgggaggcctcgcgtagagttggtgggggcagcagagcctgggtgtttcaggaggacccactcactctgggccacttctgatgctgcagatcatgccaggcaggcctccggccgtttgtctcttccgacagcagcggtggtgatggtcccctcggcctgcctggcctgcagcagccctggctggaggctgaccgagcctccgaggaggttcacctggagctgtctgtccatccatccatctgtcccttggcccctttaagaggccttgtcccctttgccagtgcagggagaccccaccgtggacttctcattgggacttccagtgagacccaactccactgcctggggataccctcaccccaagcccaaggagcctgtccctacgcacaccccctgcccctgggaggcacatgccgagctttcctgtcctccatttggtggccgcctcacctccatggggtcgcagggcccacacagacagcctactatggtcctggcaggcacagggtatgggaagccctgtgcccctgggatcaagcttggatcctgaggtcctgagcttggtgagtcagggctggggagccacaaagccagcatgctcctgccttttgggggtcccaggtgatgtgtcatcttaccaggtgttgacaggtggagagaggtaggctgggtgaagataggaaaggactatgggaggccagggcgggcctcgggtgcatgcctctctgtggcagtgacatttgtacagaacgaggcaaggccagcccatcctgggagctgagtgctggaccatgggggctgcagcctggaactgagcccagagactgcagcattcagaggtcagggatcaaggaggacctcacaaaggagatcgggaaggtggaggcttggtcacccccaggaggagctttttctaaggaaggagaggccagcatgtcagccacggctggtgggtcccactgaagctgagaatagaactggcagtggggtttggccacatggaggtcctaggggagctgatgagagcgatgccgtagccagggtcggcagtggcggaccgagagtgcttcccttctcacgtggttgggagtcatgacctgtttagtaaataggctatggcagcctcttggaacttagtgaggtggctaagctgcccctagatagctgtgccctgtgaccaagaccttcctccctccttccctctaccccaccaggctcagccaactgacaccagggccctgtgaggcagtatctgagccacccttctgagtgggagctatggcaagtgctgccttagcggagtgggggtgggggcatgtgtcactcccaggaccaactggcagatgaaggtctttgggcactgcagctgccacctggggtgcctcggggcaggctcacctcacacccttgtgggccagctgcggcccaaaagcctcctggcctccattcccgtgccagggtggtctgagcggagaggacaggggggatcccagacggatcctgaaaacaggctccgccttcctctgtggctctgccttcctcttggctccgccttcctccgtggtggcctgagaggggtgtggtgctgcttgtccgtggtgctccacacacctgccacagctgcttaccccactccctgccgccctggacaaggtgcccacggccctgtcccatttaccgttggggcaagtgagggacgaggaggctccgcagcctcccccgggacactgcaaccctcaagactcctagcaagcccctccgtctcagagccttggtgtccccatctgtaaagtgggatgtgacaatacccttcttgctgaatgggcagggagagaggagctgttaggtgagaccaggtggtacttggcagctgtggcacgtggaagccctacacaggcagccccacacctggtccgctgttctgtccttactgtagcagtgggcctggaggcagtggcatttagagaggaccctgaagtccaaagaggggatgccagcctcaaactcagcagctcgaagtagcaacagcctcgaatccctcacacctagcggttggctgggcaggtggactggtccgagctgagtggtctaggatggccttgctcccggagaagacccttggcagacagcctctcctctactagctagtggggcctcactaaccgctggtggccgcagggttcccagccactcggtgcacatgtactccagcctctctgtgtcccatttgctcatgacatggtggtcaaagcaagtcacggattccagggggacttcgggacgaggaagtcacacgttgggggatgtgccgcagggatggggcatctcagcctttgtatctgccgtgggcgtggaggcatttactcttttcaccgggggagcagaaatcagaacatggctctctgtgtctgacacagagccctgtactccatctatgcagcccccaccacctctgcacacagcccctccggtggtgcctgggggcccaggcttttgatagagaatcacatctggaccaggacgttctggtaagatcgccagggggccgcgacaaggagaccaggaaggaaagacagaaagaaaaacatgcacagatccaggctcagatgatatacagtcctcctcccggctcaggacccctttgcggtgtcacctttcggcatgtaaccacttattctgtcagggaggagagccctcccgctccaccaggtgacggccctaaatcctcaggagtgacagcgtcctcccgcccggattgggtttctgcacagtggaatggagctggcagccagggtccctgtcccgccagccctaggcctcgaaccctccctggcaagctaacactgcccttggaggaaggagggtgggagggcaaagagagagaagtggtgggtggcagcgagcaggctgtcctgcaaggccgtggctgcactgagggcagaaggggccttgtcacctaggaaggaccccactaggaaccccttcccgcggaaacacagcttctccccttgggtgccattgcagctgcacccaagccttgcccttccctctcacttcgctccccaggaggcgacactgtgattgtcctgggctcacagaggaggacgtggggacctgcccaaggagacacaggcaacagaaccagggctcagagttgggggaaggggccagttcacccacagagggtggagtcactgggctgaagcttctggccatcgtatggagctggaacaaggcactggaaggtaccaggcctcagcgttctcaactgtgaaatgggaacacggtggtctctgtcacagggtagagatgactgatccagtaacctggacagggtgccgagggcagggtctggtgtggctatcaggagccactggattggaacttggtgtgccaccagggtccctgtccgtttaagaaaagcctgtgggcccaatagagaagcacagggtctgagaagcatcagacaatgactcctaaacaagctcacgtcttgaagcagtgctggacccgtttcagctccaggggagagccagggcagggtggggcaggcacggattcctgacgtggagacaggaggaagccgacggccatctgtgctcagacccagtggtgagcctaagacaagttcccagaatccatccgggacagacggctggacttgtgaaacactccagggtcgggggctcagccacgggaccagcgcttgccagaaatgttcccagcttttttgagttcgtgagtggctggtggatacttagtggtttggctttcgggttcctgccttccaaaacaggagaggcaacttggcctgctttttcctcagaagagcccactttttgcgtggaggtgacctgccatttgtccggttgggggtccccaatcgtcttcgagctactgatatagaacctctgcgtttagctgtggtttaggaagtgcattcacgtgaagtcgccaagttcaaagggctgcccctggaacccaagtcagacttgccctcgcccccttcccgaacgtaccctttccatgaggctgggcgccctgccctgccttcagtgccaaagccccaggcccacaggctgtgcactccagccgagggcagcctggggaaggtacgagagatcactgggctttgtgaaacctgtcagcttgtgtgaaagctatctcccccaggccccacccccgcccccacccaaagcacaggtcacctgcctggttaatcatcctgggctctgagagctccctggggccccacaggccaagcgttttctgacttggagaggcaggaggccaactccccgctcctcagattctgctgaactaactgaaaccctaaccttcgggcttccccactaatttgtgataaggcctcgccaagaaaaacagcaggctaaagacccctgatttcttcatgaattccagagcacttggttcactccggcagagaaggggccccaggcagccatgcatacagagccacctctgcgtgggtgaagggctggggacggcctcttgggagcccactaaggaggaccacctgcctgctccaggcagattgcttccagctggccagggcagaggagcaggccaagggtgggtcccgggcagtggcccagagaagctgagctcgctcacgagatgtgtgctgacgtggcaagatgggcgggagtcttcatgaaggagtggctgcctggccccctgacctgaggatcctagggcccctggatgggtttgggggaactgcagcatcctcagatcacagacggtgtgtcgagtgagggtggtgctcttcctgggccagcagtaggtttccaaaagggcacagacacagctcaggagatggatgctgccctgtcagagtggggaaactgaggccccaggcggagacaccacccactgcaggttccagccgtcccccaccccacccctgccccaccatggctgatgtgagggaggtggccagaagtccagagggacactgggtgggaccccggtgaagatctggtggactgaggccagagaaaaaggggatgacccattcctagcagggaggaatagtagtttatattttcccccaaaattttatttttctgcattggcctgaataggagctgactttaatacgggggaaatagtgattttaaagccggctttcccatggaatgtgcttctcctgtgactgtgcccatctcctcactgcttggcagagaggtatcccccgtgccccactggcatgggcgccaggtctgcccttccagaggcccctcccaagtagctcccagcagaacacttgaagcccaaaagcagtgagaaagggaacacatttgcctccaatcctgactctccaagccctgtccctgcccccaggtgaagggttggccctgggcatggaggtcggcagcagggaggggacacttaagccacttggttgggggtttgtgctatgccctttcctctgccctgttaggtttgcttctacctcttaggtcctgtgatatatctgcccctgtaggagcgagacagacataagccagacttcaggaaggagcagccatggggcagtggggctctggagcaacagaggcctcaaaagctcagcgtctacagatgttagggacaaggaggcagcttgggggatgtgctcgggccctggaggcagacacatcagggtctgaatcccagctcaggggcccagggcagctcaagccctctctgaggttctgtttcttcatctgtaaaacagggacaatcacggtagctacgtgtggggcgcaggacggcacccaaggatcattcctgtgtgagtcaggtgtcagggaccaccaggccttgtgcaggaacatggggtagtgtccctgggggaaatcctaccccagactcgaggaataaagaggaggaggaggttgcctgagcttaacagaatgatggctgtctgacatgaggctcacaactggccccagcagctccacggcagggagcaggagcagacaccccggatccgctctcctccctccttgcctcctgccaggggtccagttggctagacccaatctgaagccctgggccaggagcttgtggacataacctgcagagatcagcctcctagggcagagtgagctgaatggagaagggctgtatgcagaagggcgagcagacagagcccaggattccacaacggtgtcaatgtacaacaccaagcacctggcctggtgtgggctcgtcttgcactatgaaggggcagggacgtggccaggcattcgttcctctgtgggcactgtggggctttgctgtggaggcagagggagcatctgatggcccccggggccgcgctagtcaaagcgcttcatttccatcatatgtggtgcaaaatctaaccctcttaccctgcgtgaggttcatgtgaccgctcccgctcacctcccagcctcattgcctccctgttcccctcctccctccccagccactctggccttctcctcgtccttcagctccttccagagtgttcttgcccagggcctttgcacaaatcccttccaggacttctgatggttctgtcctcccctcacacaggcctcacctcttttgccccctccacctctggagcggccactcgcccacccttctgccctgacttctctgtggcttcccaaggctcttcctggcacctcgtagggtaagtccgaccccaggtggctgtgctctgaggccagggccaggactcttgttcacagtgctatgcctgacccggcgccagccctcaggggaccacagccggctgaacgccaactggttagctgctttttctataggacctaccgagcgtttgactctagaaccgggggttggtgcttggtgacaagagctaggctggcttcctactaattctgcagcctctggcttgctagcctcccgcccactagggtccaggtcacttcctctaggagattctaaaacactctggcacagcccaccagcagagccgggccttgggagcgtgagggcacggggcctgagcctactgcatcctcccagaagctggcctacaggacggaggctcagggtggccagttgggcatggggttctgctggcccagagtgccagggggacaggaagtccctgagggctccagctgcaggaggagcatctcaggaggagctgaggccggagcagagcgtcctcctggtcctggcagcccttggcccctcagcaccccagagggccggccgcagtggatgctgctgaaccaccagaaacttaatctattattacacagaaacttctgtgcagtcaggggtttgaagtccccagaagtgtttgcctgatttggggcagatagcggggtgattaatgctcgtgataaggtgttgattggttctgggagccactgcagacacaggggctgttgtgcatgcagggctggcaactgtagtcacagaacaatagcccgtttatgtagcacactcccaccccccgcctgccccaggcgggcacaaagggcgctcgggccaggaacccatgagctgggctgtcccggggccgagggtccagacctgttgccgagaagctgcttagcaaggcctaggggcaagggctggtctggcctagctctttctcccttgagccccctgccacagggctagggccatgctgtgggctcgagtgactgccctggacgtgacaaatctctgtgcctcggtgcccacacctatacaatgggggtaataaagtccccacattgtagcactgccaggtggattaaatgaaagaagatagtgaagtccttaaagtgagatgtgttggcatttactccacaaatactgaatgcctgctccaggtgccagggacagcagtgacaatacaaaactgatatgaaattccaaagggatgtccaccaatgggagacgtataagggctctgcatccatggattcaaccaactgtggatggaaaatgtttggaaagaaagttgcatctgtgctgaacatctgaacttgtacaggctttttgtcttgtcgttattccctaaacaatagagtgggtcacgcagcatttgtgttgttaggtatcgtaagtggtctggagatgggaggatgtatgtggcctccatgtcagtatcacaccatttcgtatcgggggcttgagtacctgtggatttgggtacctgcgggaggtccccatgggtgctgagggacagctgcactttagtatttatctacagagtgcttggaagggaaaacaaagacaggcagggctggtttggggaaggggcctgttgtggatggggtcgtggaggaccttacagtgtccccaaagcgaggtgaatctcatggtgtcagggctaagagcattgtggagagagggtacagccacagcaaaggccctgaagtggggatgggcccacaggctggcaggacagcaaggagacccatgtgctgggaccccgagagctagggcacgtgaagccctggctggccccgagtgcggtgtggttggcgcagatggcaacagggtcactctggctgcagagccaagaatggaccactgaggggctgggacagacctggcagaccaggagggaggccgctgcactagtccaggcggaggatggcagctggaccaggagggcgaggaggaagtagtagattcaggactgttttgagagggaccattttagcttcttacggctgctgtaatgaattcccacaaacttagtggctttaagtgacacgtttattatctaacagctctggaggtcagatgtccgacatgggctacattcaaggagccagcagagctggttcccactggaagctcaaagggaggccccgcctcccttggcttgtggcctttccccacggcccccttgtctctgcttctgtcctgcgctcttcacaacctcccttcctccctctttctcttatggggagtgcaggggtgatctggaggagccggtcaatagcagcgtggtggggtctggcagagacagactgcagggggcctgggaggccccaggaggcaggtggactttgtccctaggcatccagtgcagaggtgagacctgtatggccacagagtctccctatccaggccccattaccctgggggaggcggattatggtatgaactgctgcaggtggtccaagaggggctgcccctgggagacgcagggttcttcagtaatggtggtttcgaagggcagaggagggaagaatggagggatgggggacagacgctggagccgttttggtggcaggcctctgtggctgtggccagaagcagggctgggcaccaggccagttggaccagaggctgcccccagctgaaccaactacagaaatgagagccccggcccagcctcctcccagccgccgctctctgggagcccagctttgctcatagaaaaggaaggcccttgttgccctgcattgggagcaaacacttcctttggcctcacagctcaaccttggacccaaaggtcctcagggacctgggggaaagagagggcagccaggcacctctgttcacggcaggggctgcgttgcccagcctggcagagggaggcagcccctaggtacagtcccctgtgcccactcgagggggtgctgaattcctcaaggcctgagtcagacctggtgcagcttcataaagccaagggtggcaggcggaatccaaggggcctcaccgcccatgcaccccactgttgcatggagagaacaatgcccaaatgccctcgtcccacagtcggcatgccagacccctcgggaattcaggccttgatgagtctggcacattccggctgtgtgtcagcgggagaggcctgggaaagggagccagcactgcaggccgcccaccacacgcccactcgggcaccggacacagggaaggcggacacccagggcggccatctctcgggacaggaggtgcggctccacgttctcacccaggagagggctttcctcccatgtcagagtccccttcgctgcttgaggcaagccctccggaacagacccatcttttgggggaccctgtggtcatggagatcaggttcctagaatcacccccagcagcgcacacaggagggcctgaggcccagagaaaggcgcctgaagcaagggaggggagggctggtccagagtccctgtcccctctgccagccacccaggaggctcctatggccccatctcccagctcttccgggtggaagacagtggtgggtaactcactcagctagagcgtctgatcacaccactgcagcggctgctcacagccttcaccatcaggaccacaattctgagggccctttggatgaagccatctcacagagctgtctcctgcagagaggagaggagagggaggccgccttgccagcaggggaccagcgaggtgtggcctgcaagccgtgggctcctgtgttccttcctcccccttcagaggaatgggaggaaaccaggcttgagttcctgatttttgccctttagggtttttaaattgtgggagagccaggagtgcctgcgtggtggcctctgtcgactccatttgctctgaagcggggctgcggccaggcagtgcctctcagccttctgtttggtgggtgaggacgatgcttggtcttgcctcaggagcattgctggcacctctcatgtgctcctgggcctctccccaaccctcaccttggcatcccccaatatccaaacaatagtccacaaaacaagctgccccgtgggcactgcgaagaccctcggggccagagccactccctcagggtgctgaggccaccagctggggcctcctctttccacactattcctgacgcctgggctgggcaggggactcctggcttcgtttcttccctcgcctttgctgggccatctttcagaccttgcctggtaccttctctccccgtgccaaggcctggaggtgatgtggatgcagccgggcagtgaggagcgcaggcgaatgttacagcaggcgcgagcgaaggggcccgaggcaccggtgcttccgacggggcccgagggccgtctgacctttccggccacggggcagcagttgcgtgagcaggaacaatcgccccagtgtgcaaggcacaagcggccttttcttcctcaccgggccggcgcacacagctcccagcctggcttcccttgaacaaacatatttattgtggccgccaccgaggcctcgccttgcagccggagcctgggggcctctgtcccacccactggggcccagggaggggacccctgccctggcggtctcccctgccccatgggccccagccccatcttgcctgaggcaggggtggctctggtcccacccaccctctggaggcccagaaactcgaggctcctgctgggggctggtgaccacccacaggcagcaagccagccagggtcctgggaagagggggttctgggacacagccacacctgagcccatcctccacctggagccagccccttaccttctggagcctcagtttccccctctgtaaaataggaggcatcacccagccttgcacgtctccagtgtccctcagaacggctctggccccgcagctggggtctgaagagcagagccctgagctctgagatccactcccacccccacccccacccccaggcctctctctgccttccctagtgctcctttgtgtgtccagagggaaggggcatcctccatcagcactgaccccactcaggcctctcagctgcactcaacacaggggctccccacactcgccctccttcgctgcgaccccgaccctcactttcccacaaaccctcagtctcctttgctcagcttccttccagacaggctggcccaggccctccccacggcttggcttccctgggcggtgtcaggcagggacagcagccataggtggtacccctagtgagggggactcattctagttgcaaagatacaggtagagcatagggaccccaaagagtagcaggggacccccgaggttgctgctggcagctcctagggagacagtcgggcacggtgggcaccttgagaggaagaacagccaggcctgggcagccctgggggaggagccaggccaagtgtgctgccctcttggcctcagatctgaagctatagagcctcctggagggcagaggcagtggagaggggtctagcgggcaggagggggacttcaggccttccacacacacacacacacacacacactcacacacacactctctctctctctctctctctctctctctctctctctctctcgctctttctctctcccccctacttcagggccttcgcgcccgctgttcccctgccctgccaggcgcaccacccccgaaacatgcacacgctctcctcttccctgcttaatcctcttgagtcttcaggcctcaacccacgcttcccctgaacatcctcctcagagcagttgcgcgctctaaatcaggaccaccttgcggttctcccagccccagccttgcctttctagtggttctggcctctgatcacaggcacagtttcaggcttgtctagcgctggcaggggtggtcctgctccggccccagggcccgcaggtgtgtgtgagaggtgcatggtggacgtccaaagaataaacgaatgaaccatccaaagcacaggccagaggcagattgggagggtcaggtcctaagaggcctcaggccggagcccagctgcagagcagggcaggggtggccaaaaggcgcctagaaggctggactttccgtgaggtggcggggagcaccaagggtagaggcaggggagcaatggatgggttgaatgaggaagcttcacagccccccggccaccgcaggtcgggggagcactgtccccggggccccgcagccagctgtgctgggcaaggcaggacgggatccttggtgatgggcagaatgtggggagcagggtaggacgggccccttggctgagagccagatgtggggagcggggctgtcgaggctgatctcaggatgcttgctgcggctgctgggtgggggataacaggggttttccgaggccctgaaggactggagagtaggagcaggtctcgggggtagcttcctgaagagatgagtcaggtcccaggcacattcagtgccagccagggaggtgagaggtaatcctggaagctgctatgtagacagaagcgagggcaagaccaccgctcctccgccataaaccgtgttggatgggcctcctgcctcctccagcctcagtttcccccactgtgaaatagggatgacctcctgtgctggggcctggctgtggcttcccaggccccggctgggaccaccgcagaggtgatgtctccaggaggcttctgggccagcagcatgttccagtgcgacacatgtgccccggagtggccgcgtgcccagccggctgtgcacgctgccccaggctggtggggtaagcgcctcggagggcacactaacaagaggcacatgtgccagggaagccctgccttgtcatcacctgtgccgtagctgtcagcgcgcatctggcttacattgaactcccccataaaacgtgtgaaacctgacagcagcgccgcagcaggacagggagggactgtgtgtgagagccagggaagggctgctcagggggctctccttgatggtgaccccctatgagacgccacttgccctgaggccctgggggacagcctggcccctggatggccagagatgcctggggccctggggtgggaggtggggacaggctaatggcaattgacgccctgcccggtggaggtgggccatggccgcccccacctcccctcccgcaagcttctccccttccttcagagcccaaccactgcttgctccttcccacccctcctaggccagggatgcctgaagccacactccactgcattcagccaccgtcctgaagtgcccctcacccacccatccacaccccgcaggcatcctagggcctggcccaccaccctctccctcctcaccattttctgttgagcacacttgaggagcacttggaggagctgggggatgacatgagtccactccgctgtcaccaccaagaccacagtggggcagtttaaacagcaggcattcatcccctcacagccctggaggctggagtccaaggtcaaggtgctgcagggctgggtcctcctgcagcctctctccgtggcttgtagacatcaccttccccggtgttctcatggggccatccctctgtgtgtgcccgagtcaccttctcctctcataaggaccccagtcaggtgggattagggctcacccttatacccccattctgctttaattacttcttataagaccccatctccagacacacagtcacagtcagaggcaggaggaggtgggtgagaggaccccacgcccttcctccagtgtgtctggagccccttccctgtgtacaaagggacagagaagcgagggggctccttggccctccagtatgtgtgtgcagaaggcccatgagctgcctggggttggggggtggtccttatacatactttagatgccagagggggctcattgggcagaacctacctgggaaggggcccaggcttcctgcctgcccttcagtttaccctgtgctcccaaatctgaaagaagcctttcctaaccagcagtccaggggattagaggactgggaccagttgaaactccattctaagtcttggggacctaatgggattaaaggcgaccgagcttgggccgtatctgggatctggggcccaccgggggctgtgaatagttggagccctggagtgccgagggcccatgtcccacgcctctggggagtctggattttttggagtcttcctgagacttgtgaccagtgggcttgggagagcctgaggggcctctggggttagacggtggcccccgtgcctggagagaaggtgcactttggggatgggaggcgctaggtgccaatggccctaggagggggctttggagctggacccttgagggagtcaatgccagctcatcgccatagcggcttgcttagggccgtccctcccaccccccagttacacagcctgcaaaccccaacctagccccttccaggtgtcccttgtgatcttccgccactgacataggtgtggcccagagcaaagggcggcttcccatttcacctgcgcatctgcagctggtatgtggctgccctggtgggttcctggctggctggcatgcgccctgcgcctctgctgggcctggtggggcctaagggtgaaaactcggtcaagataagatgcccacggctcagggaccccacagtcacaggtggggagtggcgcagagcctgggcctgcctcgggctaccctgaagtgccagccgagggtggctgaggaagcccagtcccgacccccaccgcctgccttcccaagacatcctgagtgcccctcgccagcactccctgctcggggatcccattattccaggaggaggagccaggggtaccactttccattagtgggtccagaagagatcccagcgggaaggggcagccttcagggtagggcagcggattagggaggactcccccaggagaggaggaggcaggcagggaaattctggggggagtgtattccacagggtaagcagaggctggatcccgagagcatctggacttgttcccagggcacccagcacagaagtgaaggggtgccggtggagagggagagccccgggcagctgctgccgtgtgggtggatgtccggccactgcccagccacctctctgtcccaggaagctgctctcctggggcatgtgcacctcaagtgggtgcagcaggcccagacccacgggggcccctggaggcctgctggatgcccgcgagctgcaaggagttaattcctggccttgtgggctggcaaactctgactcacagagcaataaaattcttgtgttttaaaaatcagtatattagcttaattttatagatttcagaagtgctacttgaaaataaaagtctcctaattatatttatgatcccaacgtgagtgaatttgactccgttcacggcgaagaagctttgtgtaaaatgccgggaagccttcgtgctgactcggccctcgcagaccataaaacacggctggtgggtccgagcccggcagggatatggggtcacagcaaagtccctattaatgccatgtccacctcgctgccagggagagtggggctgcagcagggtgcgaccgtcacagccctaactctgtgatggatgcctgctgttgtgatcatggacatgaggatgtgaggtggtcataatacaggagtgggctggaggcagggaaaggggttggtgccccctgcccaggggaggcacacctgggggcacagaatgacactgggtcctctcagcttcatccatttcctgctccaggcagggccctgggcctgggctgcagggattcaagggagaaccacaccctcctccactgctgggaggggccgagcctggcctggactgctggccccaggagcctgggcctgtggtcagggcaggaaatggagaagatgaacgaggaaaggagaaactgctccaaatggtggggagggaggagagacgagggcagaagtgagcccctggctcggtgggggtgggctgtggagtgtgggggcacagcgggttccttactgagcccagggggaggcagggtctggagtgtgggggcacagcgggttccttggccatgggggtgggcagacgtgttatcatgaagccgggagatcaaggaaggctctctgagggaggtgacatttgtaccaagcaaggaaagaggcagaagatccttcttccaggctaagcgccatgtgagaatgcagcaggtcggggccactggcactagcgtgtgtgacaagggaatctcaggcttctgctcacctctgctgggggcagagaccctggccagagccatggccaacctccccccactcccagccaggcctagagcagagtgcccttggaggctggaggaggccaagtcagcctgtcccatccctcctgggcccccgagtcaccaggagatgcagggcttagcctggagaggggcctgtgcggttcctgggtgttcaggggtggggtggatgtctgcttttcctgggggccccacagctgggccaggctgtcctcccagcagaacgtgggctgcagcactggccacacagacagaccctggggggattgtccttctgccacctgggcattggcacactggccttccgcagacactcagcaggccaaagagtgggctatcatcagacgctggccccaggcctgccctgttgttgcgggtgcagtgaggtgcctgcggccaggtgggtgagcgaggtgcaggctgtcactcaccagcagggttggggcttggggggaccctggtacaggtggagtccaggggtctgcagaggatggctcgagccctgctaccaccatgctgctttgaaaaaggactgacttctctgctgcctccgcctccctgtgaagtgggactgacatcccctgtcctggggtggccttgagtgtgtgcagtgcgtctggcacaggcaggtaccccacatgtgtgcccagcatgtctgggagggccagggtcgcagcagggcccccacccatcctggctggctcatacttggccactggccacaggtgacaccaacccagcccctgtgtgaggtactgagagcccatcacacagatggaccaaccaaagccacagatgacaggtggcaggcccgagattgcctgaggtcacatggtaacacatgtgcacccggcagttgtttctgccctatctgtggttcccagccatttggatgtcacagccccatcaaaggtccgctacatattcccccacccccaaaggtggatggacataggtgggcaacatttttattacgcaaaaaaggacatttcgtagaacaacattactctaatgaaataccaccatttcattctagaaaggctgaggactccatctcagaccaggggctggtggtgtcctggttttttaacaagaacttgttctcactctgccccagcgtttgtcagcccagccatggctcctatccacggcactgggcccgcagagctccaggagctgacatgctccgtcttaaggcaggtcggctgctccgaggactgccggccctgtcagtatggtgtccttgcccagctggtattggccaagttgaccgtgtccaggggacagagagaggggaggggcaggttgttggaagcctttctgcagatgtagcttggagcagtgtcctaagggaggccagcccctatgggtcgggacagaggcctcaccagtgggatccagtcactggggctgaggcctgggtgtgcaggtggggtggtgagccatgcggcagtagcccctggggactagagcaggctccttgtggagctgtgcggagctggccggcctggtccccgtggcttcaccctgagcgtgctgctgcctaggccctgaacagacagaggcaagccctgcatggcgcccagggtgccagtgactctggttgctctcaaaccatgagaaacgttagaacgtctttacccctctgtgagatgggctgggcctggcctctgaggagcctccaggaatggcaggagggagggtgggggatggggagtgggtgctgctgcccatcgacgctgctgggcaactaacaaattcagcaaattcttctttttattgtgtatgttcgacaactgccttcacttaaagtcacttttttctggctctccaaatatacttagataaggaaacagagtctatttaaggaacaatgttaagcaaacaatagtacaggtgttcaaagatatggaatgagtgacagatggggcgagggaccccgatgcagccccacccagaggacagcgcacgcgggctttgaagtccttcctggcaggccccgaatgtgagcgggtggacccaggcctcctgggggcctcagctcagctggagccagggtctctggaggggcctgggttagtttcctgtggctgctggaacaagtcgccaaaattttggtggcctaaaatcaaggtgtcctcagggctggtcccttctggaggctctagggagagtccctgtcctgcagtttcctgctcctaggggcgcccacatcccttggatcatggcccctccttcaccctcaaaggcggctgcggctcatggcatcctcacatcacagactctgtgcgtcccctgcggccacgtctcctcctctgactctgatcccctgcctctttcccgtatcaggacccttgtcatcacattgggccacccagagaacccaggattttctccccattgcacgatcagctgcttggctgcctgaattccatgcagccttgattccccttcaaaggaaatcaagtggcaaaggggaattgagtgacgcatgcgtgagttccaaggattagggcatagactcctttgggggcgccctggggtggggggtgttcctgtgtctccctgcagcccctgcttggacacatgaccagctcaggcagtgctgcctccgggggaagtcaagagtctctggtgagtctcagacaggcctcagagtgtctcagggtggcctcagagacaggggaggcccctatgagctggagggagtgtgaggacagggcctcctgtgagagggcaggtttgacttttactctgccgctgagtgactgtgtggcccaggcagtcaccccagagaggtctgactggcgcttgccggggtggctgtgtgcagcaggcattggggccctggagatatttgctctttctttttgttttattatccagacttgcaaggccctgtgtgccccctcggggctgcacacgtgtacgcacaaacgcatgcccagtgtgacccctgtccacacctggtgcctgtcccctgtgcccctgtttatcccttctacctacagcctatcccctacccaggcccagccctcccagctcaccctcttccaacccaggcctgagctctgttcgggtctctatcctcctgccctttagcctcctctcttactgatagaacattccagagcattccaccaccactggcctgcaattatcaccccatcgctgtgagtgggggcaggctgaggaagctgtgctcgggccggagcacagccggcctccttgcaggggcagctgcgggcgcgcagacagctggggctgggagcctcttccagggatcctccgcctgtggttttcctccttgaccttcttaggagggtccagttccttctcctggccaaggccccactctctgccaccccaggcagggccagggtgggtcaccatctgcagaagccctcaggggcccccagcagcgcccctcctatccccctgccccagggcgggctgccgccttgtaacccccagaactcttggctctcatgtatatgagtcagcgttgactgtttaacctgttgcaagacactctgctgggtgctgcgacatggttaggttttctccacattagaaggtagaaggaagaaaaataagttctgaaagaaacagacttgccctgcctctgccctgaccttgaggtgaacagaggttttgcacagaacgaccatccctgcagcgggtggcttggggggtaccaccatgatttgagaccctgggtggtgctggccagaatcagcctctatgagatgggcagggcagtccagggcaggggaagccctgtgccccaagatcagatacatcagctacaatgagaggcatcaggcggcctcaggccctcaagccggtccccatgtgcccatttgcagtctgtctcatactcacggccacctggccactgcaccctgatacagcagtggggccttcatgcctgtggggtgtctgcctgcccagctgtgcccactcatgtggtggattcatcccaatgctggtcctgggggccctgggctccccccggccctttctcgaggcagtttacactttgcagctgaatcaatcaggggcagaaatgcctggcaggggaatgtttaccgatttggttttctggggctgaggatgctcggtgtttgtccaggctctgtcctgctggctcctctaaagctttgcaaacaagagcctcggagagaaggaggccttcccctccccatgtgctgaattcggggcggtcctgacagccatgcgcgggggcccgctgtggcctcctctgcacggctgctgagggaatgcaggtcaaacaaagtaggccagcggcttagggaccccgagtaagcaggcagacccacaggaaatccagtgctccgagcccccacacctgtggtgtggcagccacccagcaagactggaccgagaggccacgtgggcagccacccttgccaggtgggcacagggagtgcaggtggtttgttcttgcctcagatccaggagagcagcttttttgcctgaacccactcgtgaatttttcatatttttggagagctccttgtgaggacagccggcctgagcaggctttgatgaacattagagcaggtggccacaattgggcagatctgggcctggagacccagttgtcatgtttgagagggaaggggcattcccagaaatcacagggatgactggtgtgagcccaccgcccacctagactcccgtaccatgcggggcccctcattgactccgagggtcttcaaggccctgtgctcctccagaaggtggggtctgaggtgctgctgggtgtctctcttcacctcttcagaagcattcatgaggtaagaccccaccccttcaggccctggcacaggcctcagagcaggcccaccacccaactcactggttcacttaggggtagaaattatcccagcttttacccagagctcagggcccaagatgtcagtttgcctgccggctgttgctctgactgtggcctccctcccagctccccggcatgcagctcccagagggagaacttgagcagggaagggaaggggctcgaatccctacgccagtccctgcatggccctatggggacttgcgtctccccggaggagagcagccctgcgcagccctctcttactgattcctggagtctgcacagctacatagggtcagattcacgacctcccagctttaaccagccttcttgattagccgccatctaaggcccaactgtgcttcgtgacaggcctttgagcctaaaaggagttgcccccagcaatgacatcggatgcctgtttagtcagcggactgcctcagaaaggaatctcacaggcagcgggttcttctggtagggtgggatatttcagcgggaggtaaacaggtgttgtcacagaacggcagactggggcctcccctggtgggccttgagggtgctggcctgcagacctgctcctgcccgttctggcctgatccggggcctcttgactgcaggtctctcgtgggctctcagccccaggtgcctgccctcacccacgtagcttgggacatcatcagcccattgccggtacccatggtaccttcaccaccctcttggccgcattctgaaaatcaatgtttagtccctccttgaacttaaaaagtcaaacttaaaaagagattattacagggagctggggactcaggcttgcaccctgcctgtttaggataaaaggccaccgtgtgtccactctagtgtctctgctcaaacaggagacgatgtggcatcgggaacaccaatgcggcactcagagaaggctcttagccagctggcccctgatgggctcactggctgcaccagcttgtgtagcagctgagctcctgcagagccttctgggagggaagaatgtgtttcttgctccagtactgcagagcatgtgatacctgcaggggtgcaagaggtgcctgagagcaggcatagccaagacttgtttgcggttgctcctgacgcagagccggcacatgaggtggcgttccctcactctctcattcattcatttattcgccagtgtttcctgggccccatgccatgccaggtaccttactaggccctggggataaaaaagaggacaaaagagatgagaccttcatcctagagcttaggatgtgaactgcgtccttctttaaatggaaatttctaaattacggtgtaccgaatgcatccacccttggcctcgtcacatgtgctgttgggcagtattttcctacattttcttctgtgaaatttataattcagcctttgtcattcaggcctgtcgtcgtgtccaggtgcacctttgcattcggaagaatccagattccttttcctccgtggagtgactccccttccccacctgccctgcagccattccatcctgtctatggtggtcgatggtgtcatctttgtggtctagtgtgttcccgagtatacaagggtgtgtgatcggggctccctctttgcactgatagtctgctggtcggaaggacaatggcggcaccccaagacctgatgctctggtttagaaacgggttctaatgcccagaagagctcctaaacccctatttataataatctctttttaagtttgacttatctgtttgggacctttattcctccatgccaactttaaagttaagtttattgcatttcttaaaaatttcaactggaagtttgcttgggattgcctcgaatttgcaggttaaatttgggaaaaactggagtctctctcatgttgcgttttctcctccaagaacaaggagtctctctgcattgagtcaggccctcttggacctctgttgccatcttttcctgaaagggctggtggggtcttgcttccattattcctggatgagaccttctttcccctgctattttggaattttttctcccaggagtttattgctggtataaagaaatgccattgatttgggggggttgatctcacacctgacaaccatgtcatactttctatcagctctattgattgatcttttgatcctgctgattgtctaagtggatcggtcctatcaggaggagtcagcgtgaccacaggcccccattccccagcccctaatgttcttgcctcatgtcttcaggtgcggggctggcaagctggggttacctgacacttgtcatccttctgctgggcctcagcacccggcggagcaggggcttcctctgacacgatacagggatttgctgacggttccttgtctgctcactaagcgtgccttggagaaggccgctcagcgagggccgccttcaggcctgagcccggggccaggaccaggagcaggcggcagcagcaaggcagctcatcctcggctgcctcttctccctcactactatttggtttttgttttgttttgttttgttttttgagatggagtctcattctgtcacccaggctggagtgcagtggtgcgatctcagctcactgcaaactccacctcccgggttcaagcgattgtctcacctcagcctcctgagtagctgggactacaggtgtgcgccaccacacctagctaatttttgtatttttggtagaggtggggtttcaccatgctggccaggctgatctcgaactcctggcctcaagtgatccatccgcctcggcctcccaaagtgctgggattataggcatgaggcaccatgcccagcctcttgccgtcattttttttattttaaataaactttgattttagaatagttttggaattacaaaattcttacacaggtggcaccaagagtccccaggtgcccttcccccagcagccctattatcagcatctcacattagtatgcatttgtcacaaggaaacaacagtgctacatgactgttaactgagtccatgcttgatgcagatttcctcagtttccctactgtcttttttctctccccgggccccacccagggtcccatgtgacattcctcatccgtctccctgggctcctctgggcggtgactgtttcccaggctctccttgttggtggtgacctggacggttcagaggaggacaggtcaggtgtttgtagggtgtcccttactaggatccgtctgctgctgtcctcacgattcgactgggctgtgggtgtgaggagggagagcacagagggaaatgcccttctcatcgccctgttccgagggcccatcctgtcggtgtggctcgtcatgggcgatgctgtctctgtctcctggctctgaggccatggctgtcaatctcttcaactgtgatttgttcttttccccctttgcagactgtccttggacccgccagcatttggctctggggccctagagagaccctgggatgtggatcacactggtgacccctgtgagccccactggggacagatccaggaagggacctcctgggaatgaggtctggcctctgcctggatcaaagccatggcccccattccccggggatagggaagctgtgcaggcagcctgggtaatgggccaccgccccaggcaggcgtgggaatccacacatggcccttctcaaagacgggtgctgtccctggggctctggcggggtcctggagcctctctcattgggcacatccgagcccagcctggcccatggtggaaatgcaaatctaattagtctggcattgagcccgtcttaaaagtattaacagagccttaaactgtgctgttggacggggatgaagaaacgccttagaaagaaattaccggatggtgacaaagccccaatttattagtcttctccaatggggactgtgcaaaggacattaattactttaatgggacttattttgcttcgttgcccaaagtaattggtttattaacctctccttccctttagggagggagggagggaaagactggggcctgggggtggccccgggaggggctcgtccagccttctgctcctctgcccagcggtgcagccttgcaccctggggcagccggtgcttggtccctgctggcctgggctggggctgccccagtgcccactgatctattcttgttcactaggcatccaccgtgtgccagtcactggaatacggccatgagaaagacaggaccctcaagaaacaacctgttccctgaaggccataagttcactgttgtcacaggtgcccagaggaaaggaagatggctttgggggtggacacgtctgggcaggcttcttgcagaaaggccacaggctaggatggtgggaaggcaagagaatgccgggaaagggaggactggttgcccacagggagtgggggtcatgggggcaggttccagagatcagaaggaggtggtgggaagaggcacgcagggtgaggctggctggaggcaggtgaggcagcccagcctcaggagccaggaaccagcttccccgggctttaccagatggggagcgataagggctgtgtttcaaaacaatccctctggcgtgaagcaagccgtcttgaaaacagaccagaaccggctgcttccaccaccagcagaatacttcaagaagaccactcgggcctagggctctgcaagcaatatctgattttcagaaaaccatggctcacccacactctaccctaggaaagggcaggttcccagggctgggcttgtggccagtgcagcactatcctcagtggcctgggacacccagaactggccaggaaagacccctacacagacccccagctctgcagtcagccctgtctccttgtgtccccagacctcgggcgagggagaagcaagttcccctcaggaatgctggtgaagctggcatgcccccaccccctagctcaccctgggtccacgcagggcctgctcccagagtgaatcccagaggtgtgcctgccccacctgtcccagtaagggtggttgtgtgtgttgggtagatgtggtgaggtgtgctggtggggagggtccatatcagatgcccctgggtacctccccaggcagggccctcagcacctgatgccaaaccaggctccactcttcctccaggtgagcccgagggcccagctgggcgtccacgtggaggtgtggggcccgggtgggacaagcctggcaaccaggacccagcatgaaactgcaggtgcaggagccccagccagcctggaatgtgggggctcagaggccacccagagcccacagcagggactccccacgccaggcccggctggatcacagagcttagggtccagccagctgctgctgcccctccctctgggcctcaagaccatctgtcacgtgacaggggcaggctaggcctttcttgaactcactgtgagctacagagactgtgttctggccaggtgaatggtgcccctgggggccaagatccccacctctggtctggcagctgggtgtgcaggggcagccccagacctccagagtgccctcttcccctctttgcggttgtcaccctgtccttgagtctaactggggctgtgctgcctttgacgtgagctattcaaaatggcgggaggggcgaggcctctggagcaaggaaagagagtggtggctgtgtccagcaagtccctgttgccactgatagcataaaaagtaactctgaaacctggtggccctacagttgacacacatggggccgcaggaggaaggaggctcaggctaggccaaacatcagagacctcaggtctgtctcctttaccaaatggggggctgttccgccagcaccccagtagggaggatgagaggatgccatgatttccagggtggtgtcagaacctgtctgccagggctctgcagggaggggtttggggttgagattgggagacctagaaatcgaggggtgtcgggggcctcggctggggggcaagcacagatgaggatggaagcagctcagtgtcactcagtctgcactgggaatgggggatcccaaggccagggctctgcctggtgccaactgtgtgaccctgggcacgctgctgagcctctctgggccccagttcccttattcgtacaacgggaatgatcgaggagttaacatgtgtttaaaagcaccgaggcttggccgggcgtgctgcctcacgcctgtaatctcagcactttgggaggccgaggcgggcggatcacgaggtcaggagatcgagaccacggcgaaaccctgtctctactaaaaatacaaaaaaaaaaaaaaaaaaaaaattgtccgggcgcggtggcgggcgcctgtggtcccagctactcaggaggctgaggcaggagaatggcgtgaacccaggaggcagagcttgcagtgagccaagattgcgccactgcactccagcctgggcaacagagcgagactccatctcaaaaaaaatatatatattagctggatgtggtggtggacgcctgtaatcccagctactcaggaggctgaggcggggaaacacttgaacccgtgagttgagatcatgccactgcactccagcctgggcaacagagtgagactctgtctccaaaaaaaaaaaataaaaagtacaggggctctacacggcgccctgagaattgtgtgtaaatgagtgaaaatggggtgagagggagggagtgggaacagccaagaggccaggaagcagagcctgggtgcaggggcatcttgctggtgaagctggggagagacctgcgcaaccccacctgagtgaggcactgtgggcccagagtccaggtcagcgccaggggcagcaggggctggatctccggggaagttgaggaatgacatgtattccagggaagaattgggccggaggctgaaacaggacgacagagccctcagcccagggcggaggacatgggagacgggggtatagctgttgggcttgtggctggcctggcctaaccagttgggggaatccatgggaggctttagccctgctctgtgaactgctgggccttccttaggggccctggggagccttcccagcagaatgtccaggctcctgctggcccaagctccaagttctctggctcccagggtctgtgtggaatccaccggtttcaccccacgtcttttcctctcctgcctggtaaccctctctgcagaggccctggctggaccagttgctttgcaattcacaaggctttggaaggcagtgctcacaaatcacttttctagacgaagaccagtaagaagcccatgtcattcttctgagacattaggggttttctctcccttgttttaatcaaccagttcccaataagtcatttcagtcaggccattaccaatggctcataatctcctgggctgctgggcgaaatgggatcccctggctctttcactgaaaacacttttcttgttttctttctccggcatgctggaagccggccaactcgccagttccattaacttaatgagggctgacagcctgcgacaaacgtcctcataatctccccaggatttaaacggggtcctccccagctgcctgcctacaccccaacctcgaggctctttacctctgtctgtgcacccacccagcccctcctgggaaaaagccaggacaaagatgtatttcttcgctagctccttcctggcggctctgtgcaggcagcctcagacctgtaggccctctgcccaatttgggtcacccacagcccccgcaccccacagcaatttcttgggagctgatcatccccaaagcttggaactacaaggcagtgactggttttgccgggctccgctcgtccctctgagcggagggtcaccctggtcaccatgaaaactttatcctcatccacacctttctttctccaactagcatgggaatcagtttagggtcctcccacaccctcatccaaaccctcatctcccaccccccacttgcagagaaagccccatgctctcagcagaaacggacgccagcgtttaggagcgggtgggctcccggaagggggctctatgggaaaggggaggcaaggctgagcagctgcccaaagtgagcatctgtcccacgttccacccccaggaaaccctctctcctgacgcggggacttgcgtctcagtgcagagggcagtggagggacagtgcagctccgaaatgagcatctgagttcactgctggtgggcaccatcccggccaacaggccactagtgtgttctccctctttcaaacggggcggcgaccctcgtctgacaggcggctgttctgagagcggtggctgtcccagggaagccctcggtgagcgtagcgttaccatggtttttaaattaaagcatctgcagatgcgctgtgtccctgcaagggcaggcagatcgggaccccagggactggtccccatagccaaggtgttcagccgccctgtcccctacacagagtgcctctcccactggctcagggtgagggcaaaatggcacttgcagaacatgaggcccggccagctttgccctattccccccatagcatggctgaccttcctctgagcccctcgtggatgcccacacacggcaagacgtttcctcaaagatgctcttctgcaaagctgcactttctcggttgccgctgccaccttggcacctctctggggtaccttgtactgccctgtcctccccacgccctgaggggccgtcctaggcagcactcaccctggtcatccctgtttccaccacaagactgtttgtagccgagcttgggagttgtgttgtgtagtgttgacttgagttgcatcgtgttgtgttgacttgagctgaactgtgctgagtgttactgagttgaggtgactgggttgattttagcttcacaggtgatctgaacccagctgagtggcttccatggagctgatctgaacccagctgagtggcttccatggagctgatctgaacccagttgagtggcttccatgaagctgatccggactaagctaaactgagtttcattgagcagcttgtttagctggtgtgtgccaggtggtctctcggggggtccgatgggatacctagtgtcttaatctgttcagtctgctataaccaaataccttagacctggtgattcatacttaggaattcattgttctggagactgggaagcacagggtcagggcgccagcagatctggtgtctggtaaggggtctgtctgattcatggaagtcagcgggctgtgtcctcacgtggcagaagaggcaaaaataaggtgcaaacaagctccctcaggcctcctttccaagggcacgcatcctcttcctgaaggctctgccctcacggccgaatcacctctcaaatgcgccatctcctaacaccatcagggctgcgggttagctttcgacatagggactttgggaagacacacacattcagactacagcaccttgctcctggggaaacagaggaaactggttcctttctttcggttctgggttatgtcaaaatgagttccctttgctgaatctgtttcagccacctctcccgaggatcctcgcacaatttcactgccagccaggaaggtctgccctggctggtctgggcttgaggaccagcacgggatcgttctcctctgtgggtcgctgatatgaaaacaatctcacaaagacgtaagaaccacacatgcttagtgtcatgtgtgatgcatcaacccagggggaggagagaacgtgcattcacgcagaactctctcagccacaagctctgtttctgttgcatttgggccaggttgcggggagcctggcaggccacccggccagtgtggatgtcattacatgagcagtaggaagccatacagtatctgaggcgggggagtcacgagatcttcagtctgtccctcggaaagcccctcctgccgccactcagggggatgggttggaaggggtgaggctggagcccaaatagggagttcagaggcctccgtgtctgcccagggaaggagggaggccagcttcagctgctgtcctgagggttcctgcctgggtccctgatccccctgagaaagggctccctcccagaaaaggcatgtgccctgggcagagccaggaaagctggggatgtctcaaagcctccctacctgctctgtgtcccctccctctggagcctgcctctctcccgagcaaagtacctgccacctgggagtgatctgggacagtcagatgcaccttttgaagtatacacctcagtggcttttggtatrttcagagtcatgcaacttcacgactctctaactttagagcattttcatcaccctcaaaatgtcccttgcatcccaggtacaaagccataccaggccccatggggatggcttgtgactgctgcacatcctgcccctggaccttactctagttcttctttcatccactggtgtattcctttggccggggacacacacatttgagaaacttcccagcttccctctatctgaggctcactccattacaacacaaggaactgagacatctgtggctggttttttttgttgttgttgtttttccaaattgtatatctgataagggatgtgtatccagaatatacaaagaggtcttacaactcaataatgcattgacccaattaaaaaatgggcaaaggacttgagcagacatttctccaaagagcagatacaaatggcaaatgatcacaggaacacatgcacatgaacacacgcycagcctcagcagtcattaaagagatgcagatcaaaaccacagtgaggtttacacccagtaggatgactaaaacaaaaaagacaataacaagtgttggcaaggatgtggactgccagagcgaggctagccatgccatgtatctggaggagggccctggaggggtgtgcccattgcatgtctgtgtgttcccatgcagtgggcacaggcagtggtgccagaaagagcctctgctgggctttctcaccaccccagcctctcacctgcagcccaggcatcctccagtgggtttttcagggaacttaacatgatgagtctaaaatttctatggctgaataaagaactgaataaaaataaccaagaagatcaaggaagggccctgccttccagatatcaggatgtggaagaggctatactaactaagatgttgcagtgtaggcacaagggtagacaattagcccattatcccagtggacaagacagagagccctgaagagatccatacaaatgtgggacattggcatgtgaccaaggaggtgttgcaggttgctggaatcaatcatcctccagaaggaaaaagctagagttgggcccccacctcatgcaatctataaaaactgactccaggtggatctaggaattaaatgttaaaagcaaaccttaaaactcttactggataatatacgtttattagtatcttttataactcggcatagggaaatatttattttacaagacacaaaagcattgactatgaaagaaaaacattggtcaattcgattttacaaaataagaatccctcatcatccaaagataccttaaagaacgtgacaagttgcagactggcgattgcactagttttctggcactggtttaacaggtgacccccaacacacatcagaataacagacgtttactctctttcacttctgtcggtcagaggtccaaccccaggtctgatggggctggagggcgtcattagggctagaggtcctaggggaggatctgtgtccttgcctttttcagcttctaggggttgtctgcattccttggcctttagccccttcctctatcttcagagccatcatgttcctcctctctgacattttttttcgtaatcacagctctctctgaccacagccaggaaagagcctccactgtttgttgttgttgtttttgttgttgttgttgttgttgtatggttttgctctgtgaccygggttggagtgcactggcgcaatcatagtttactgtaaccttgaactccctggctcaaacgattcttccacctcaacttcctgagtagctgggactacacgcacgtgccaccgcgcctggctaattttgtttaattttgtgtagaggtggagtctctctatgttgcctaaactggtcttgaactcctggccttaagtgagcctcccacctcacccttggccttccaaagcactgggattataggcatgagccactgtgcctggccagggccttcacttttaaagacttgtggttaattgggcccacctggacaattcaatatgatttccccatctcagtgttcatgaccttaattacagatacaaagtcccttttccatataacgtaacatattcataggttctaggacatctttgggggagcccttattctgcctaccaaagaaatggatattcacaatacaatgaattgataaagaattggtgtatgtataactaatacataacatgtataatgtatttatatatgtgtgtgtataaccaataaaatcactaatagaaactaaaataacgaatcaataaatatacaaattatcagacagaaaaatggccaaagacaaagacttgttctgcccttcatggtcgaggaacacatgtggccagtgagtatgtgaaggcaccatttacagaaaccatttacaccactccattggcataaaccacagtctgaccattgggagcggtggcagggatgtagggcccagggtctctcctacattgctgatgggagtgtacagtgggactaccactttaaaagggtggcatcacctccaaggtggtgaattcacatacctgttgacccagcagtcccatatctgggcatacaccaaaagggaactctggtgtgtggacgagtgagaatgaacaggagtgtgtgttgcaacgctgttcacaagctccacgtgcaaccagccacttgcctcccagcaggagggagagtgagtaaacatggaatgcccatacaaaagagaattttaaactaattaaagcaaacaagccagagtgacagacaaccatgtgggaaggcttggcaatataataccaaggaaaagcccactgcattcttatcaagtttaaattactaaaattaaaraaaaaraaaraaaaaacatgacttttgggacacatatagtttcaataatattatattaaaaaagaaagcaagggagagaggaacacaggattcaggttgatggttacccaggataggggagacaaggatacagttggggtggagctgtcagggtccagcatttattttgtgttttgtttgtttgtttttgtagagatgtggtttggccgtgttgcccaggctggtcttgaactcctgagctcaaagcaatccgcccaccttggcctcccaaagtgctggaattacaggtgtgagccaccacacctggccgtctagcgtttattttgaataacgagtccttgggagctttctacattgtttttaaaaactaattatatgacattttataagaaaattatattagcacaaccgggagagatttattctaggtaatgcaaggctagttaacattcaaaacttaattaatgtgatctattatggaactttcccaacttgatcaagagcatcttaraaaaaaaaaaaaaaaaaaaaaaaaaaccccacagctaacatcacatcacacttaatagtgaagaacagaatactttccccctaaaataaaaaaraaggcaagggtatctgttctcaccacttctattcaatatagtactggaagttccagccactgcaataagacaagacaaagaaatgggacatgtagattagaaaggaggatctaaaactgtttctatttgcaaagatagaattgtctatatagaaaatcccaaggaatctacaataaaaatatctggaacttaggagttcagcacacaaaaatcacttgcatttctatacactaacaatgaacctgtgaaaaccaaaattagaaacaataccatttacaattgcgctaaagaaattaaaatacttaggtataaatttaacaaaacatgtaaagatgtatatactaaaaactacaatatgccaatgaaagaaatcaagacctaaatcaatggagagatattccatgttcatgaactggaaaactcaaaatagtaaacatttcagttctccttagaattacctataaatatagcataattcctaacaagaatcctagcaagatttcttatggacatggacaaacttgttctaaaatctatatggaaaggcacatgctgtagattaaaacaattttgaaaaagaattcagtgggagaaatcactctaccaattttaaggcctactatacagtaaggaatcaatatgatttgatattggaggaataagcatgtagctcaacagaacagaacgaggaatccagaaatagacacacgcaaacatgcctgactaattttaagacaaagatgcaaaattcagcggaggaagactcctctttcaacacacggtacaggagcagttggtcattcataggccaaataaataaattaaaaccctgacctaagtctcacactttatataaaaattaactcaagagccaccttggacttaaatatgaagtgtacaactctgaaacctttagaaaaacatagaggagatagtatttaggatttaggaagggcaaacagttctcacattggatgctaaaagcatgatctgtttaaggaaaattgatgaaatggaccccattaaaacttaaaacacttgttttgtgaaagccccagtgaaggggataaaaatgcaaactatagacttggagaaaatatgtgcaagccacatatttgacacctggcatctagaacatgaagtactctcaaaactcaacagtaaaaaacagcctgtccaactagaagatgggcaaaagacacgaagagacatttcaccaaagaaaataaatagggaagaagtacaccaaaagatgatcaacttcgttagcaaagatggaaatgcagattaaaaccacagtgagcggtcactacgcacctatcagaatggctaaaatgaaaagtaatgatgacaccaaatgttggcgaggatgtggagaaacgggattgcccatctgttgctgctgggaatgtaaactgatgcagcactcggggaaaataatgtggtcgtttcttataaaagtcagcatgcgactaccacacatcccggcaactgaactcctcctgggcatttatcccaaagaaacgaagactcatattcatacacaaaactaaatgaaaatttatagaagctttattcctaactagctgaaagctgagaacaatctatgtatcattcaacaggggaacaggcaaacagtggtgcatccctaccctgaaacactacccagcagtagaaaggaacccactattggtacaacctaagcggatcttacgggaattgtgctgaggagaaaaagcctcccccgaaaggtcgcatgctgtgtgattccgtatagataacattctcaaagtccaggctgtagggatggagatcagatggtggttcctggggttgggaatggtgagggtgggagtgacttgcacaggagacgcagagggggtctttctggtggggaggacttccattcctcgttgctgtgtgaatctgcacgtgtgaacacaaggcagagccacgcacactgtaccaatgtcaatctcctggcgttgatctgttactccacccatgcaaggtgtgaccgtcgcgaactcacgtagagggcatacaggacctcttggtactttttttttttttccaacttcctaggagtctataattgtttcaaaataaaaagaagcaaaacaacacactgggaggtgcaggaaaccacacacgtgatgtgcttgtgtctgctgacataagtgctcaaggaagagtctggaaggcctgcaaggccctcatgcctacgaggtggctgctagggggatgtgacgtagagtgacttcagtttccctcttcatgtctcctgggtcctccagcactctgggtttcctctgccaagacccccacccatctgcctctcttcatctcacaagcctgcatgtgtgcagagggcaggggtccccaggggatgttccttccccaaggcgctgtggccacttagagggtcccccaagctcgggcctttgaagacagctctgtgtctcctaggacgcacaggtgtgggacctcactgcgcgggagggagttgcaaagagcgacaccccagcatgtgggaaggaagggagcgagctcttatttccttattttctttccatctccactcccaggcaaagctgataaattcttccttattccagagttagaggatcctccagaaggggccgagagcttgtccaggcagggtggatacaaggggcttgcatctgacttaactgtctggctgggggagaggggacagaggtcctgggaggggctgaaggctcagggacacaggtgaggccagcccctcctccaccctgggcatctccaggcccagccccaccctgagctgtactggacccaagccccaggaccccctggagtcacctccagccctcccacatgccagcccctaccctgggcctcaggatctgcctggatggaggccaggccgctgagctgctgggaatctgttccacaggtgggaaggtcggcccgccatgggcagcccagtccgggaaacttcctgcctctgctttcccacagtgtccttcgatggcccccagtgacgtgtgttgaatgtggcgctggccccttgggcagcccagcagcccccaccccagccagcccagcctgggcagcactgggggctcctggctttgaatttgacctatccagaaacaacggctccttcagtgggctcagcccctgagaccactcagcctgggctgtgtgcccagcggcacttcatgtacgtggacggggcaggcgggcaggcrggcgtggaggagctaatgggtaagttaggcagcacattaacaaatgaaccagcggatgggggtggggagctcatctcattcatctacaaattattaacaataacttgttcattaatgaatgaacaggtgagatacaggtcagtgggtgcacgaatgagtgaggagatgaatgaagcgggtcttttctcagcagctgacccacggccaagcccccgctgggcagcacgtcccttcctcctctcccaagctgggtggtgcgggcagggagagggtccatccgcccttcagtaggtgaggaagccacrggcctggagggtggcccagcccaggcaggagggcaccagccccgggccctcagtgccttcctgcaaccagggtccaggggtcacttccttcacggcccagtgagcccaaggcctccgtcctgccccctgtctcttaccagctcgctcctgcatcagtgctactgaaatgggaaaggtttccttgtcccccttgcaggacatgtgacaggggtgtggctcgcttcttcagtgccccactactcaaagttctaggggagcatacagtcggacaggttgtggggctccgaccccacagcagcgtctaggggtgaatgtttacagctgaagccccatgggtgtgtgttacagggtgctctttagtttagccgtccatagacagcttgcgttagtcagctcagttagaccccctgccttacggcaagggcagaggtctttctgtatcccgaggttcttgccttggcgtactggaagaatcagatcacacgtgggcttggagaatgagtgcaaggttttattgagtggaggtagctctcagcagatgggggagcaagaagggagatggagtgggagggtggttttcccctggcatcaggcggctcagcagcctgggctctcctgcgtccaccccagccaaacccttcatcgttcctccggtcaatggtctgccggcctgtcggtgcctgttggtgcctgtcggtgtgctcctacgctggtgtgttcctctcgacctaccctcaacgtccagccgcttgtgtcttcttctgccgatgtgttcctcttgatgtccagccgcttgtgtgtctgcccactaaggtctcgagatttttataggcacgggatgggagcatggcaggccagggtgttctcgggaaatgcaacatttgggcagaaacaccgaaatgtctgtcctcacctgggtccgtgcacataggccgtagggtggaaccctagccagggacccgcccttctcctcccagcacttccctgcccctcttccgtatcactaccaggaaaggccacttggccccatcccaggcctcgcccaagacagagagagagacaccaccccctgcaaaggagcaagccgggcccttctctctgagaccacagggtggactgtgttcagcagaaaagccaggtagccagcgctgtcaccagagcagtggctgacccacagcatggcctggacagagctgggggcctgggctggcaccctcagccctggctgcttgcagtcccggccggctgtttgcctgtgaaggctccggctgtgttctagggagttggcaggaggggaggcccgcagcagcttctagcggcctgtgaagcagccacggggcatggccctctgtgcagaacaggatctgaggagccccgagtgttctcactggatgtggggccgcatccagaccttggcggtcatggccacaggctcccaaggccctaagtgacagccagtggtagacccttcacggtcaggcacctatgactccccgttccctgcctgctcccaggctgtttggggtgatggaaagaggccaggacgtgaggccagggtaatagttcctctcgtgtgtcaggcctgggaggggggccttcatgagaccatcacggagatcttggggcctccaatttgtcaaatagttttctgttacagttcatactgtttgcgttcctttaaagacgtctttgcccatcccaggtcgtgaaaatattatccaactttcttcgacaggcccgattgcctcatagttaggcctgtgactctccctgggttaactttgtgaccggtgtgtggtaaggatcatggttgacatactttcacaggtgcatccacattgttccagcaccatttattgaaaagcgtatccttccgccagctcgacggcaaaggcgtcttttctatgaaccagtggccacaggagggtttgtgtgtctaatgtcctattccacgggtccccaggccacagaccggtacccatccatagactgttaggaacaggaccgtgcagcaggaggtgagcggttggcaagtgaacgtgatcacctgagctccgcctcctgtcagatcagtggtggcattagattctcgcaggagcgcgaaccctgttgtgaatgcacatgtgaggggtctaggctgtgtactccttatgagaatctaatgcctgctggtctgaactggaacagtttcatcctgaaaccatctccccccaccccaccccgtccacggaaaaagtgtcttccacgaaactggtccctggtgccaaaaaggttggggaaccactgccctattccgtcagacccccactgttcatctgtctgcccacacgctcttaatcaagccctgtggcctcatgaaaccctaggagtgtcagacctctgactttgttgttcttcaagatcgtcttggctattcttggcccttcacgttgttaggaatattttagaatcaccttgtcggtttccaataaataaacwaacaaacaaaaagcactgtgatattgattggaatcatatttaatccacacctcaatttgcagaaaattaacatcttataaatattgagtcttcttatacatgaacatactatatccccaagtcaagttagggcttctttatctgtctctccaatgctcagtgcttttctgtgtagcagtcttacacatcttwaaacagatttattttrgagytgggtacgatggctcacacctgtaataccaactacttgggaggctgaagtgagaggatcacttgagcccaggagtttgaaaccagcctgggcaaaataacaagaccccatcttagaagaaaaaaaaaaaaaataagaaagaaagaaataaagaaagattgtgaaagcaagacagtaaagaagaaacaaaaaacttttttgaaagatttattcttaagtttctggtcaagtttatggttattgatgctattgtaattgatatgttttattttctaattgttactagcatatagaaatatacatatacatattttaaagacagggtctctgcattccaggctcagagcttacagcagccttgagctcctgggctcaagcagtccgcccatctcagcctcctgagtagcaagaagcacaggtacacaccaccaagcctggctattttttaaatttattttttctacagatggggtctcactatgttgcccaggctgatctcaaactcctgggctcaagtgatcctcccaccccaccctcccaaaacactgggattgcagatgtgagccactctgtcaggcctagaaatataattattatatatcatccttaaaaccggcgttcttgttaaattcatgtattccaacagtttatctgaggattcttagggattttttttacatgtatggttatgtcatttgcaaataacaaatgttttattttttcctgtccaatccttgtaccttttatctcccttttcctacctttttaacataccagctgggactttctggacaatgtgaaatagaaacgataacatccttgccttgcttcctgtctcaggaggaaagcgtatcacatttcactattaagtatgatgtctgcttagggtttgggtttttttgttttagtttttgtctttttttttttaggtaatggagtttctattcctagtttgctgagagttgtgtttttaattatgaacaggtctcgctttatcaaatgctttcttacaatctgttgtgttgattctattttttctgacttattctgttgatgtgaagagtgacgctgcttggtccttagagggtaaactcagcatgcacaagtggattaaaccacattcgagcatgtgtttgggcacagtgctacatgcagcttgctggtggtggttaggatatttgcacgtatgttcacgagagagattaacctgtgattttttttttctttcttgaaatatccttgtcagattttgatatcaaggttatgctgccttatgaaaatacttgtataaaattgacattattttttccttaaacatttggaagaatttactggtgatgtcgtctagatacagagttttctttgccagaagatcattaaaattccaaatttaacttatttaattaatattgggcaatttggattatttttgtttttgtgtctacttttacatactgtgtttttaaataatttgtatattttatctaaatcatcaaaagtatttttgtttgtaatgtcctctgaataaatgtttctgcacctctaggtctatagtgacattccatctttaactcctgatggcggtcatttgtgtcccctcccccatctgatcagtcttcccaaaagtgtgtctgttttattagtctcttctgagaaccaaattttggctttgttgattttccttaaataatgttcattttttatctcatagactgtgctcttaactttatctcttccctcctactatctttggtaggaggcaaatggtaatttgccatttttttaaccrcttgagatggatttcagcctttcctctgctctgagatatgcatttaaagccacgaggttcactgtctgtgcttatttcactgtactttcagtacctatttggctatgaattttaataccttacatttttattactatttaatttaaactgttgtttgattctcattatatatttttctttgacccctgggttatttagattgtttaatatccaaaatacatggagattccctagttatctctttttatggatttctaatttaattgtactgtagtcagagagcataataaatatgatttgcctgctttgaaatttgttggaacttgcttctgaagtcttgcatatggtctcttttggtacatgttctgtgtgcactagggaagcttatgtagtctccagttgtagggagcagtgttctgtatatgtcaagttgctaatcaggctgttcaaatttgtctctgacttgacaaagctttgactgcttttctatcagttactgacgaggtgtgttcaaatctcccaccattttctcttttagcttttagttctgccagtttgctttatgtattttaaggttatgtttttaggtgcatacaaatttagaattgatctcgtcctgctgaattgacacttttataaataggacatattcttctttagtaatacttaaagtctgctattggttttcctttactagttttcatttggctacaccatgacctatctttttctatcctttcccaacatgtttttgtatctttatattttaaagtggatttatatagttgtttttaatcatgacaatcttgatcttttaattagactattaatccacttataatgtatgcaatctaccatcttatgcttctttttcatttgtttcatctcttcctttaagtctattttcttttcatgctccaagctggctattttctttgggttcacagctattcttttctactctgtcgtccctgctatccaactcacctattgcattcttcatttccattatggtccttacttttctggaacttcctttttatgtatctataaattttatttctctggtaaaattgtctatcttttcatctattttcttgaacctatttatcatggttattttgaagtcttcatctaaatattctgaagcaaagcacaatcatctgttagctcacaaatctatgggtcagcaatctgggctgcccagttgggtggtctcacttggattcgatgacatggcagtacttgcatggtgatgtggtggtggctgagtggtctctgttgtcctcacgtgtctggagccactgggttgtcagccagggtctctcagctctccttcacgcggctgttccagcaggctagctcagacttgtccatgagccaacagaattctaagagggtaagagtagatgccacaaggtccttgaggctgagcttcagaagacatgatcatttccaccatggtggagatagactctagcctgcaatgggaggaaccacaatggattgtgcccatctttaattaatcacagtctgccctctggccataacttttcgcattctcccctatgcaaaattcactcacccccctcccgacgatacctaaaattctcacccaattacatgtggcatcatgctcaaagtccgacatcttgtgatctgccccttccagcctctgtccaattccttgtcccaaaattaatgctgtaagttttaggatattgatatgacattacctatttcttagtccttatttctgtatcagttacctattgttgcgtagcaaactagacctaaatttagtggcttcaaatattttctttgggccgggcatggtggctcatgcctgtaatcccagcacttttggaggccaaggcggacagatcatgaggtcaagagatcaacaccatcctagccaacatgatcaaaccctgtctctactaaaaatacaaaaattagctgggcatggtggtgtgcacctgctactcaggaggctgaggcagaaaaatcacttgaacccgggaggcggaggctgcagtgagccgaggttgtgccactgcactccagcctggcaatagagcgagactccatctatatgtgtgtgtgtgtgtgtatttttttttttctttgcttagctaggaggttggacttggttcagctaggaggttgttctgttggtgctggctgttagctgaggcctctctcttctccatgtggcctctctaatcagcaagcttgtttgcagggccacattccaaaaggacatgaattatataccgtgtacattccccagtactctttcatcagtgaagtcacaaggtgaccccaaattcaagtaataggaaaacagactccatctcttaatggaaggagctgcaagtatttaaggctgttggaagtaccacacctttagatctgtatgatctctcttttcccttgccttttagtctttcgtgtataaaattgtagatgctcgagggtattatctccctacagataattttattttcttctgccacgcgcaaagcaccttactccagtaggggattgagagaggtggggttaatgtgatggaaagttggcattgcttagtttctggggctgccttctagatagcttctaaaccccaaagcttctctccacagtgccatgcgtctactgagtactctgcttagcttttaccccttcagcaactgctttttgctcagtttctgtgattctcacccacccgtgtggcttaggaattcacaagtgtttccagaggaagttgtgtgaaaggtggctagaggaccagaatctttttccctcgtgtcctggctgtcctgtggccctggactccacatttttatcactagcccactgggcccccaccctgttgggtgtcagtgctccccaaactgacaagtgccctgaggaggaaacgctcggatgcaggcgcagctcagttcatttcctttctatgtgggatcctcaccttctatgtctttcttggtctccaaagcctcacacagctgttccttgctgttggcatcacttagtctcgcagtccctggtgtttccatcaggaaagtcaggcaggcgttagcttcactgccaggagggaatctcctgtggcctccatggcgctgtgttttcttccagtcttttttctatgcacagacacatcatcccctttgtttccttttgtgatgctgtttctaaaaggatctttatttctagaagaaactttaggaggcaaaaacagcgcagcccccttaacagagtggctctggtggcaactttcccttgttaatttgtcctgtagcccctactttcccaagcgcttgctgtttgtggggctacaggacacagcagctgaaaggggctgtgggcatcgccagcatgtaccctcttatcccatttgctgacaaggatcctgaaggcccaagcatagaaagaagttgctatggctgccatgtgtcagcagcatagccatggccaactcagggccctgactcctacctgacccccttctgaatgacactcaaggtaagggtccccttcccactcacaggtgaggtgaaacatttcaccttgaaaagcctcttgcccccagcctcccctcgagcccacactgggacatggcctaagtatctccatcccatggagttgaacactctccttgtttctggaaggatccagtctgcgtgctcctcaggcagtgcaggggcagtgaggggatgaccagcacagggtggccactcacaatctcctctcctctctccactgcaggctgcgggaacaccatcgggccaccattaaggtcattcgacgcatgcagtactttgtggccaagaagaaattccaggtaagccctgtgctgagccttcctgccctcagcctgcccctcgcagcctgatgcagctgcccacacctctcctgggttctctcctgcccatagtggagggtgtcaaggcctccgcccccaagccacacaggcaggcctatctgagacctgacagtgcctaccccaccgaaccccagacagcaggcccctcagaggacctatccttggaggcccggcctggaaccagggacacatgcagtgtcttcttcaccaagtagaaggcagcagccgtgtagctcactcagtcctcccgtggggtgggtcgtgcaaggcagcattagtgagagatgtgagggtgacatcagaatgactcagagatggtgcggagcctgccctgagtcaccaagctgggaaggcaggtcccccagaccccccagccctgtcctccactggctcagtgctctcattccctgctcctccaccctctgtgagttgggaggatggagggaggctgggccctgctctgtaagaggtggggtccccttggccaggtgaggctggagctccggggcttccataagctgccctaacttctccaggggcatgtcccccctacagaagccccttagagcccccagagtccatgccccgcagagaatgccattgatggcaggcatgtctcccctcctgccttggggacattcctcggatgaaggcggtggtggggggtactgagtcctggcttggaaatacatgtgtaggtgtgggaaccccgtatcctctgtgatgggtgatccagaaggcaaaaatcacaaagcagggaaggctggggggtgacttgcctgagtcccttggagcggagggcgtgtgacgtgcttgagtgagtgcgtgtctgccggagcagggcggggtggggcttctgagctgggggcccctggcacctcagccacagcctcaccagtcataaggcacagcccaggaaggctcagcaatgtccgccgaccaccaggacccacagtcggtggcatcccagcccaccaagacttatcctggagccactgagctccctgctagggtctggtcagggcttatgggggcctttgtcaagaggtcgttgggtcgggctgggaagatcatcttgacttcaggagcctgagatgagccaagataatgcacagcccatccagacggactgacagtggcattcaagtctggtccccctgcagccatgtctttcacaccaggccacaccttccactccaggccccaggattgacacaggcccgcccacagtctccttggtggagcccccacccatctgggccctggagccacctcagcctccagacttcacagggcggtctgggtgcagaccctggcacaggcagccctgggcaagttcttccccagctgtgaggggaatgagagcctaagggtttggcataagatcatatgcacgtgcctcacccgggccttgcccccagcaaccccaggccagcacccgctaggctcgtcgtcactctgagccccaagagcagccctcggccaggcccttgccaagagcagtatgcgggccctcgttctggccaccgggccaccatctccaggggggtttcgcatgcacagccctcccacagtggtgtttctcagctggccctcccacctgcatccccccagggaagggggtggttcatgactcaactgaaccaagttgtgtcaaagctcccagcagtgcctgggacctcttgcagtcaaaataaaagccatggcaaatgccactgctggccagtgcccggagatctgcctggcatgttctaggggagatctgacagcccctgtggaccagggtgtctccattctgggaccgtctcctctctctggtgctggcatggagggccttgctggagcagggagctcactcgggggcaatggaagagagaggccagcctcctggcagcaccagtgctctcccagacagggaaggggctgcgtgaacccctttgggactcagatctgggcagggcagtcccccgagggcagaggagaccatgggaagggccagggtgtgtcagttcgctggagaacagcatggtcgtgacagccgaagcagctgacgtcaccccagcagtagagcagagggacacagggagcctcccagggtggggctggtgtctggcctgagggtgcagagcaggtcccagcagggcagagccagagcccaccaaggcttgcagaactgcgccacttgggcatcctgggggctgcttccaaggtctgggggaacccagcagagcatgcagaccctgatggctcctgggcaggcctagctccaggggtggtgtgggcagcttccagctcaggtcaagagatcatccagccatccctttctccatcagccaggaaggacactggcattgaggttgatatcaaggatatcccatcgtgataataactaccatggcttccagtcttgtggtgaaacctcagatgcgtagcctcctggccaagcgtctgcaatttcatgttgttggagcattcgttgaatacctgggagttgcagctctctgtaagtttgatgtggctgaaccaagaaaaaaagcacacgatttctacagatattatgatgccgtcaaagattttgaggtgatgaggaaggctggcatctttcagagtgcaaagtgattttggaatataaagaatttctttgggttgaattacctagaagcttgtcagtgacctgtgttcctgaactgtgaaacatgaatatatgggccaagaaatggtttctcttggtaaataagcaattaacaaatacaaaaagagagagagggagagggacagagagagagagagagatcatctgcgccagccccagcaggccctgtcgctgagccacaggtgaaaaagctggtccctggggaggaacacagtgagccctgcactcccttccagacaggagggagtgggtcccctttcctgtcttaggacacaggccgggaccctgagaatggcccaggaggcttcctgaagcagactgggaaacccccaccccactgtctgcttctccactgctccctggccctgggagccttgcagaaacctggcaacagcaggatcctcgcagggcacagaggctcctgcacaaagccgctggggctccctccgacctcaccagctggctcttattgctgggagcagcatggaggggtggggccagggtgaggggagcagtagcccgtggcagtgaggagctgtgtgtggctccaggggctcccctagcccacctctcaggatgcttcccttcctcgacgcctgcctgtctgcttgcttgcaccccaccccacccccgctggcctcaggggctgctgacatggcaggtgacccctctgcctaccttgctggctgataagtccttggccaaccacccctgtgtctggcccaaggagccggagcctctccacccttcaagtgtgccttgaactccctgtccaccatcagtcagtctggacaggcctgcattatctcggctcatctcaggctcctgaagtcaggatgatctttccagcccaaccccagaggaccactggacaaaggcccccgtgagccctaaccgtatcctagcaggcatctcagtggctccaggataagtctctgtgggctgggatgccaccgggccgtgggtcctcatggtctgcgggcattgctgagccttcttgggctatgccctacaccaggtaaggctgtggctgaaggtgcagggagctctctgctgataggcccacccagccctgctcctgcagacgtgcacacactcaggtacataatacttccttgcccacaacaggcctgtttggaagcactcgcatctgcagaggctgctaacacacacacctacacccacctggtcacagtggcccagagactcctagggcttggttttcccctgccctgcctcccttcacctgcccacaccgcacccagatggctggaggtgccccatgcttcagcttcacagagctctgtggtctgcaggaggctcaccaccatgactcatgccatgttcaatgtgttctgaagagaggcttcggccacagctggctgtgactctggctctggcatggtgctggcttaggattccctgacctttctcaactcccatcctatgtcatcctcactccctcccttaaggcagagcaaggcagggctcagcatcccatcttagagaagagagcgtagaatctccatcatacagaagggacatacagaagggagaaacagagttcaacaacccgtcctacagaaaggaagatcaaggctcagtatcccatcttatagaagagagaggcagggctcagcatcccatcttgcagaaaggagcttagaatctccattatacagaaaggagaaacagagctcagcaactcatcttacagaaaggaggatcaaggcttagcatcccatcttatagaagagagagacagggctcagcgtccaatcttacagaaaggaggatcaaggctcggcatcccatcttatagaagataccaacagggctcagcatcccatcttacagaaaggaggatcagggctcagcatcccatcttacagaaaggaggatcagggctcagcatcccatcttacagaagggagctcagcattttcatcctataggaaggagaaacatcccatcttccaaaaggggggatcagggctcagcatcccatcttacagaaaggaagatcaaggctcagtattccatcttacagaaaggagctcagtatctccatcttacaggagggagaaacagggctcaatatcccatcttacagaaaggagaacagggctcagcattccatcttacagaagggagcttagcatctccatcttacaggagatgctaccaggtacaagagatgctaccagatgctaacagggctcagcaacccaccttacagaaggggaggattgaggctcagcatcccatcttaaagaagagagagacagggttcagcatcccatattacagaagggggaatcaaggctcagcatcccatcttatagaagacagagacagggttcagcatcccatcttacagaaaagagaattaagactcaacatcccatttcatagaagagaactcagcatctccatcttataggaaggagaaacagggctcagcatccccttttacggaagagagagacagggctcagcattttatcttacagaagagagaagaaggacttagcattcccatattacaggagaaactgagacctgaggatgttattactagcctgtacataagtacggtttttacgggccagagggtctgcctagagtccaaccccatgcctgcctctatcacagttcttggtgtgtcatttctgggcaatgccggcgatcctggtgcccagtgtggccccaggagcagcaggcccttccttccatggggcacagctgtgttgtgaggacacgggccccatcccagccctcctgatctcaggatctcccgttcagggcccagagagtggctagtgttgccagtgagggccctacctgcttgtgtcaggtggaagaggaaccccctgaacttctgaggcccagcctttggtagggaggaggtctctgccctgtcttgggattcctggggtccaaaacaatgttgggcgggctgtaagaactccaccaagcctccggcattggtggcagaacccctgggcatgtcagaagtgtgtctagagctgaaagtgggtacatggagacctgacctcagggtctccccatctgggaacttgctgcttcccagggtagaagtggctgcatcctcagattaaggtcaccctggtctcaggagtaggaccccaaagagaggtagcaggtgggcagggagggcatgttcccagacccagcccgggccctcaacggtacctgagcttcctcctttctcatcctgggcctcaattgcctccctctgacttgggctggccctgccccacccttccccaccaagccgcttggctcgtctcttgggccttgcaaattccccagcaaaaggcaggaaagccactagctcagtgctaaggtggctatttgagcactaatgatgactaccctgggcctcacccggtcacccagtggcctctcgggatagaggcagtctgttgtcctatgtgctggcttgcctgcagggccaaggccttcctaggccatcaaacccctgctcagcctggctgctccacctgagtgaggcccttgggagcaaggccacaaatgtggcttggggtttcctgatatcatgagatgctttgttttctctgttgtggtttcaagatgtcacctgagtcccacttataggcttagagctggcaacaagcctgggagccctggggtcccctgccctgcctcacatggccccagccccactgtgggagcccaagcagatgctcgtcacccacagcaagtgctgcaggctaaggccgtcatctggggccacccctgctgcctggcacaaactgccaggaacgatgcagaggagacccgctccctaccctgaggacagtggcggctgcagccagtgagcatgtcaagggtcagtctggggcccaggtaggtagtgggcatgcagagctgtgcctcctggtcagtgcctggcactgtgctgctccttgaccccttgggggggccagctcttcctgaagccattgagaaccagaactggtagcctggggtggtggggggtggaagggaggagacagcaggcccctgccggtgagtagacaggaagctgggacccagagaggccgagctgatggcccaggactacccagagacccatggccaagctgatggggacaagcttcgctactgtgcacgcttggaaccaggcttatgccatcaccacataggcgagctcccaggtcttcacaagcctcccgagggcagacactgtcactgcctgcactttgagccacatggctggggcacagggaggagaagtgatgcgtgtctttttgtcccgcagcaagcgcggaagccttacgatgtgcgggacgtcattgagcagtactcgcagggccacctcaacctcatggtgcgcatcaaggagctgcagaggaggtgggcacggccaaacggcagcggggagggtgcccgggtcctgcccagcccggccccagctgcatgatcagcggtgccggaggagggaggggctgagaccctgagttcttgcctctcaaccacccccttctcctcaccacccccacccctgcagagggagggcagctggccacggccacggttcacagccagcccaccaggcagctctaccttgttccccgcccggatctgagatgatgggggaattggggtaggggaggcgcgtaggggaggcaaacacccgcctccgtccctgctcaggtagcaacaccagcttcacactccccacaacttcaggacactcggcagccagcccacccgccttccctgtcacctctgagcaaggggccaggcccagccctgggaagacactgcctggtgccaggccccaccgcacgggtctcccccagactggcctggagctggagaccctgactgtggggagctaatgtgttcccatggagctagcaccatcctcccgggcctgcacagactcagagcagctgtgcctccgagatgggctcgcctgggaactagctccgtgtgttacagggcatggctgggagcccgtgtccatcctggccacaggcgaggggtcaggctgccttgcccatggctgatccactgcctcccactcctacccccagggaggaagtctgagaggcagcccaccgactccccctttccgagatccctgctcagccccctcgggagcatggccctctggggggttgggagtgacctggcaggccttagggtcgggggtgtccccagagtgggtggacagtccactgtcttgccgggcacgtcaagctgtctgtcccacagacgacagtgcatctgcgcagtgccagggccaggtgtgaactggtgtctgtgtccttctctccaggctggaccagtccattgggaagccctcactgttcatctccgtctcaggtgggtttctgtgtcagttactctgggcccagcagcctgcaatggactctcccgcacctctgccctcctggctctccccatgatgtcagaatgggccattgcacctccaaagtgcatgacatgaaatgaaagccagggagtaaggggaggtagaccccacccttagcaaagtggctccaaagtacgttttacaaaggaatattcaggtttcataagaacctacctgggtccctttaaattccagggcgttgaggttaggctctaggtgtggaaacatgaacccagggcaactttgcagaagggggtgatcctggggtggggtttgggtggggtgagctgccagcccagaattcaagagactatgggtgggggccttgcagggctcaagttgagagggacagaagcacctggctgcagcctgggggctggttttctggctccttgaccaaattccttgggtcccctggacacggggctgtgagtcattccggggaatgacagggaaaaggcacattccctggggtttccctagcccagatgccaacagcagccacggctcatagtgtgggctggtgtaacgggggcagtggaatggctgtgcccccagcctggagtcaggcctgtgtcgccctgggagtggaatggcatgggcttgcacagctggcagtgtggccagcttaggcagccccctagggctctcagaggtcagaggtggagagcgtggagcaggatggagcccaggtccccagctgcagccatgcccggccaccgtaccacccctggtatttttgtcatagcatgctttttaaaaatgtcctagtaggtttaggcattttgactctcagctacctcccccagccctaccaccccacttcccaagcccagctggggtccccggcccaccccagcacttggccctgatttgggtgttttatcccccatagaaaagagcaaggatcgcggcagcaacacgatcggcgcccgcctgaaccgagtagaagacaaggtaggctcacgcgccggcctgcggtggttctggttagcgtcctggggccagcaggcacctccctgtggtctgcgtgtgaacgtgaagctcctgcaggcctccccaccttcccgccagtgcctactgcagcctgcccagcaactcccaagaggggcccaggcccactgcccacctggcggggcattggtcccccatggaaggagccaggccaggctggtttctcatcctctgacaagtggcgtctttactggcaggtggcaccaagtgccccctccccccagctctttcccgctgcctctcgtagtctgctttgtgctctgcgagcctcctggctgtgtcctgagtggagggtggcagaagctggcctcacatcccagccttctcctgggcccagctgtctggggcctccacttggggccagccgagggctcagggaggtgcagggcccagctgggatgggttcatgggaagagaggcatcttctgttcaccccgaacccaccaggcccccactccccaccaggctctgtgcccatcactcggtccctcaggccggagcctctcccccaggcaccctgggagctgccgggggatctgggcggtggggagggcctttctcgggcccatggctgagcccaccactgccctttgaagtctctgtggtttgaagcgggctgttatcttgccgaacagcaagtccgtctacatggactttatctgaaagtagctgagaggctaaaaatagaggagtttcagttgggcagggagtgcgtctgccgcccggtttccctggcaacgcctggctctggcctgcttccatctcggctgcagccgggcaggcggggcaggcacagcccggcccaggctcctgctcctgccccacccgtcctggcccccaggacctgcagcgtcaccctctccccacctggcaccatctgcccatggcctggggcggccgtggggccctgagaccagcaaattgggtcatgcagaaagagcgaaggctggtgttcaggtgcctggccccatggggctgtgtgaccacagtaccctgagtcccatgggcctggccaccctctgtcagcacagacctgagcagggctggtgcagacctttgccaggcagatggcccagtgggagatagcgcccatctggcaggacaggaagcaagacccgggagaggtcagctcacaggattggcaagctcagaggcccagaagccttggcctctctgctgcccggggaacacggtgtttccctggctttctctttgcgcaagggctgggtgactcctggctggcacacccagtacagcagggccgggtaccctgtgttgttggcatggccaggagtttctagacatcaaggaaagccgtggtagagacagggagtggcacccagttccccagcctccactcctgcttccatctcggctgcagccaggcaggcggggcgtgaacatccctgacgtgcaggagtgtcggtggccctttctggacagcacaggctggggacagcccccgcctttccccgccactccctgccaagctctggttccattgcctacactactgtcccagacctttcttacggctctgcccctgctccatgggacaggccaccctctaagcccagacctggagtctggcatcctgcgggggtgatggtgggtggcagacagggcctcctgaagtgcaatggccccttcctgacgtgcacagcagccgtccagcagcctgctggggcctgggaacaaggacacagtcctcagtcagccaaggtcggtgtgggggcctgcagaggggccagcgctggccttgaaggcacaaaattatgcacccaatttcttcacatctgagcaacaaagggaagcattttccggagtccctgatccctagggcaaggtttaagaacaaggctggggccacatcctggtgccctgtcaggctctgagccggggccacgaggattctggtagattctgcatgcacagccctggtgggccctggctccctgccgttacattcgagtcctctgcctggggtctctgaggtggtgagtggcacccacagtcgacactaaatctcagccccgctgaggggtctacctggaacctggctgcccatcaaggagttgacagagctgtgctgacctaggtgggtaggtggtagcctacccggtccttgccctgccactgactggtgcacccctcagggacagaccctaggaaagggcctggctgggcctggagggcttggtggcacagcctggctcgagttttctccgttatcagtgcagccatcgggaccgtaaataccccaagcgcaatcctgctgacttcgggaagtaggggcaggaaatccagcagccgcccggccctcggaggcccagcaggcgtgcagcggtgccaatgcccgccggccccgccaaccccagccagagcccctggccttccctaccagcaccctcccccacctcatcccgctggtctggctgcctgccggaagggagtcaaggccccagcctccaactgttttctcagctcagctcagcccctcagctgggctgtgcagtgagtcccaccccaggccagcttgcctagccataggatgagaggtctccgggatgcacagctggctggcacccctccagggaggcctagagtgtccccctgcagggagttcaccagtgcaggccagctgagcttgttcagggctgcctcagtttccctggcagggagccctcttcttccttggtgtcctggccagggacccacattggagagaggggtctgggggtctcccttctcgtcacagtcctgcggcctcgtcaaaactcttgcttgacagtgcagtgtctgctccaacacagacctcccaactaccttgcaggacgtccccattccagggatcccttccacccctgtgcctgtcctggtggcttaggttctgcctcactccagggtgtggagagcagaaacccacccacacccgcagatccaggggcctcctcacagcgagtctacttcctgcgggcctccctcccctgtcaaatgagagggtttgactcctgcttgtgtccttagggtcaaaagtcacaaaagctgcctcatgccctttctgttttcatcttagattattgtcttctttatcctggagaggactcttatttgctcaaatgcccacataaatcctcttttacagatggggaaaccgaggctcagagaggctgagtggtcgcctgaggtcacacagctagttaggtgaagagctggtcccaaggaggacacagacaggggtgggagatgaggtagagagagcaaggaggggtttcatatcacccaaagtccgtatggagaggctgaggagggttgaggccaggggcaggctgggggcaccagcagcagggcccagggccttcagtgtgggccagggaccaatgcaggcggtcgggagaggtccggagagagctggccctgcccactccccctctggccccactgggcttcctgaagtcccacacagggctggcagtctgtgtgggggctgcataccccagacattctgaggaatcgatggcagaggccgctccagccctcctcccccagcaagtattcttagcttggtctccaggacctgccacactgtttacgttgggccctgtttattttgcaagctaagctcatactgcttttgctgatatgaggagcacagtgggctgggagagtttctttcttctctgtttttgccggaaatgttcatggctgagagccggacacaggggagtcctgggtttccatgccgcagttcagaaagcgttgggcgggaaggggcccccaccacctgacactcctttcactgcctccggtcgcagaatccaggcctccaggatgagaatgccccccaacccaggactcccaaaaccacaccctgcccatgcctttaccaagcttcgtgcatgaccccaacctccaggatgcaggcaggcccagcctcccagaattgggtgtttgcccccagacactgctaccctttccctcattccagtgtgactcctccatcaaccaggccacaagctggaccccaaggcttttttgtcttgggcagttccccgagctgcacccccagagccgccgtgctgctgttcatcctctccctttagcccaacccctgctgagttcaggcctttatcatctcttacttggattatttttccagccatataataagtctccggcctctcctcacacccaccaatccttcacattgtatattatttcttaaacactgctgaaatctcacttactaatatttaatatatcagaatttttgtgccagtatttatgtgtgagatacatacatgacataattttcctgtcttgtatggtcttcatcaggctttggtgtcaaatgtatgtgagcctcacagactaacttaagaagtgttccctcttttcctatattgggatattttgtataagattagaattttattttcctcaaatgtttggtggaatttaaaggtaaagacatctaggcctggtgttttctttgtgggaagattcatcattcctgattcaatcgctctaataattatggactgttcaggttttctatttcttcttgtatcagttttgataagttatatattctaggaatttatacatttcattttagtttccatgttcattggcatttattataattttaatgtccgtccattagcatttagtcccattttttattctcaatattatttatttgtgccttcactgttttcccccttagtggtcaaacttgacactattcccctgtcttattaaatgtttcgtggacttctggctttgctgatcctctctattgtgattttgttttgtttcattcacttctgtttattttattccttctatttacttggccttaatatactgttctttctctaacctctctaaattaagaagaggataattcttaattttcaggcttcctaaatttccttttcgttttaatttttctaaccactgtcaatctcatggctttctaaatttttaaggtatgcatttaaggttataaatttttcctttaaatatcatccaaactacatctcccacattttgatatatggcatttaattttaatcttcattcactttagtatttttctaatctccattatgatctcttgtttatcctaggagttctgtagcaatgtggtttttgtcattgttataattgtagcacagctttctcataatgttgccctcttgtcagagaaagcaatccatatgatattaatcctttagaatgttttgaaatatgatttacggcaaaaatgtggtcaatttttgtaaatgtgccttctgtacttgaaaacaaggtatattctgacattgttgggtgcagtgttatgttcatatccactggaacaagcttgttagttggtctgttcaaatcttctatattctcattggaatgtttttatctgcttgatctattattactgagaaggcatagggcaaatttctgtttaactttctaagaaacttctaaactgtttccaaaggatttataccattttgctttctcaccagtaaagtataaaggttccactttctccacagccttgcaaatacatggtcttttctattttagcccttttagtgagtatgtaatggtatctcattgtggttttgatttgcatttccctaatgactaatgatgttgagccacttttcatgtgcttattagccattcatagtcttctttggtgaaatgtttattcaactctcttgcccattttctaattaagtagtctgttctattattgagttgcaaggggtttttatatgttctggatacaagtcctttatcagatctatgacttgcaaatattttctcccattctgtggctgtcttttcatttccttaatcacatcttttaaatcacaaaagtttttaattttaatgaagtccaatttgtcttttcttatatggctcaggcttttgatgttttatctaagaactctgcctaatccaaagccataaacattttctcctgttttgttttgggtttttttccttctagaagttgtatagaattagctcttacatttcggtctatatttactttgaggtaattttggggtatgatatgaagtaaagtctagatttgttttgttttattcttacttatggatatccaattgccccagaacatttgttgaaaataccccatttcctcctttgaattatcatggcttcttggtcaaaaatcaattgaccataaatttataggtttatttctggattatcaattctattatgttggtctatatgcctttctgtaagtctatatgcctttctgtaaacccatactatactgtcttgattattgtaggtttacagtaagttttaaaattaaattatgtaagttttctaattttgttcatctttttacaaattgtttctgtctattctaagtcctatgaatttccatataaattttaggttcaacctgtcaattaaaaaagaagggcctgctgggattttgataggcattgtgttgaatctatagatccatttggggaaaattgacaacttaacaaaattgagtattgtaatcaatgaacatggtatatccctccatttatttgatctactttaatttctttcagtgatattttgcagtttggggcatataaatttggtacttcttttgttacatttactcctaaatattttatttgtcatgctagtgttaatggaattgttttcttaatttcattttgaattaattgttcattactagtatatagaagtaacattaaatttttatatcaatcttgtaaactgacttttctattcttggctttagccatttttgttgttgctattgatttcttaagattttctacatataggatcatgtcttgtggcaataaagacaatttttacttctttccagtcagatgcctttaatttctttgttttgcctaattgcactggcttgaacttcaaaaaaaatattgactagaagtgctagagcagatcttctggggaaaatcactcaatcaatttccattagctctgagttttccatagatgccttttatcatgttgagaatatttccttctatttttagtgtgttgagagctctcattatgaatggatattggattttgtcaaatgctctttctgtgtctagtgagatggtcctgtggtttttattccttattctactgatttggtataatacattaattttcaggtgttaaaccaatctcacatttctggaatatatcctacctgggcatgatatataatcctttttatatgatgctggatttggtttgctaatattttgttaagaatgtttgtgtcttcaacctaggaaagctgattgaaagaaaaaaaaaagaatgtactttatattcataaaggatactggtgtggttttcttttctgactttgatgtcagatttttaaatccttttctttttaatcctacaaccgtaggatttcaggtttgtcttttgtaaacactgtattactgagtttttaaaaaatcatttaatacatttatatttaatataatttctaatagatttggattgaattctagcagtgtattttgtgctttccacttgtactaaatctgtaatatttatttttctcctctttcttgcctctcattagattattacttctcattctacttttctctctactggttttgaagttatgtattctactaccatccttggaaaggttaacctagaacattttaaatgaatatatatcagaagtaattgctatatctacccatatctgtaataaaatagggatcctagaacactttaacttcaattattctccccctgacttagtactttgctgttgtatattttagttgaactgtgattaatttttaactcactaattggtagtgttttatacaatcaatatttgtttaaatttactcacccatttgcctctttgtcatttgttatttcttttttatctcagatcttacatctgggattacctttttatgtgactgagggattcatttaaattttcttcagtgaaaaactctcagattttgtccgcaaatgaccattttactgtcatgttaaaaaatatttccaccaattataaaattataggccttaggttatcaaaattcttttttcttagcacattaaaaatgttattgaactatcctttggcttccactgttaccattgagaatgaagatgatgaattgttgctccttggaagacaatctgtcttttttctccggcggcctttaagatctttcctttgactctagtctgcattttcactaggatatgttaataggtttctttttttctgcctgagctaccttactcagtggtttggtgtctttcatcagttctagattattctcagttaatacttcgtaagatttcacttcagtctcattatctccttctgaaatttttattggccagtagtagaccacctcactccccttcatatctcttaacctttttttttttttaaatcactttgtctctctgtactgtattctggaatccatcttccagttcactagttgtttctttgactgtgtttaatctgctgttaaaactgttcagtgaattttaaacttcaattattattattttatttataaaagttctgttgggttcttattcatatctgataagtcattttaatcgtatcttcctctttacttgcctgttcaaactaatatattttcttgaagtgtattaaatatggctattctatattgagcttctcttaattccagtatctaaagtatttctgagttcacctccctgtttgattttttcttctgctgactctcattcatggtgtttcatttcgtttctgttttttttttttttttttcattgtaaacttatatatcttaaaatttatctgtgggaatttttgaagtctggtgtgaagttggggtcctcagggaggaatcatgtttaccccttccattgccacatatgtgggtgtactgccagcctggacttttaattctaggctcaaagttttctaggccacttaggtagtatgaattcaagcctccaagctgagcatggactaacttgtgaacatgactttccaggacagaacttgttctccttctcttagcagtaatgcagttttctttacaatcttctcagggagtaggagatttttcattggccctcacaatgaaagcagagccctttgagggtcccagctttgtgtaagtctctgctatgagacttcctggggcaggcctgggctttgacacataatcatctattcctggtgaaaccaaagctcaagttcatctcactcatcaaataccttcagggcccctattacctctggggttccactttcactgagttttcagcctctaacctcccttacttcctggtcagctcatccatgctagccacagatatcattttaaattttctaatagccacttttttaatttaaaagaaataagtaaaattgattacaataatatattttatttaacccaatagatccaaaatatcatttcaatatataattaatatttttaaaactcttaaaattgttgacattcttctttttcatactgggtcttcaaaagccactgcatattttacacatttcaatttagacaccgagttttcatgagaacgacttggtctgtatttagatttcataaaatttaccattgaaaaaggagattcccatgcctaagtcatttcaaacatactgaagggttttctaataaccgaatgaaggatctatctttaaattttaattttaatttattaaaatgaaaagaaaattccattcctggatctcagtcaccacttttttaagtgctgtgccacacagattcagctatgggacagcgctgctttggacgggcatggccgtgcgcgcgtgtggggaggtgagtgtggctcccccaacgtttacccaggccagccccaaggaaatgctcagtgagtgcccatagaatgtgttgaatgtggatggcagggaccatacgggatagcacactccagtagttgccaactcatggccccagtgcccctctccaccccatgcccccaacagagatgcatccctgcagacccctcctgggctccttctccacagcatcctccccaagttcccctgcctcgagtccccagagctcatgacccacgcctccccgaggtccctaaggaatgtccgcttgggattctggttcttttccggttctctgcagccaggtctgttccctggcgtagttcgcaactggaaggtgctgctcagcagactgtgagaagtgtgtgtcggtgcaggcaggacacacttccaggctgtcccagaggccagggagcaccttgccactgaagggctggttgcatcagaaagttaggcagcctggactgccctggcagccccagacctgcctctcctcggcagctccccctcccctctgcaccaccccccgccccccacacccaacccaacactcctctctctgctgctgggctgctcttgagtgacagggccgtaaataggcaaaggcgggggctctgactgatcaaagggctccctttagaagccgtcattagtttgctattctgggaactggttattttaaggttagtgtattttttctttcctgaggagccgtcttagtggatggcggagtccggaggggctgcccttcagtcaaaccacacaagccctgttttgtctggggttccaaagataaacctataatgaaagcagcgtttgacgctgagcaccgccaccctgttcctgcacaggggtgggtgtgtctgccagggagtccctgtgcccagcaagctccggggaggcttgcaggaggcccctggggccaggttgagtctgctcccagggagcctgaggtgggaggtcttcagacctggcattctcacagccatcatggcttgcctggccagggaccgaggccccgtaccctcccccaacttcaggctacccccaaaggccacccctggaaccaggctcagcaggcacctctgaaccgcagcccagctctgcccagcaccttctttggaaagacagtggacccaccagtggccaggggaatgcacaaccctaaagtcaaaatgtaaggaaatgatgataccctgtgctggcatgggtgcggaagagcagacgctcttctgtcttactaggaggtgggaattaatgaaagtaacaactcctggaagggactctagcactgcctgtgaaaactagaaacccgtcatcactcctaggaaagaaaagcaccagggtcgggctttgcatgcaagctttgtcatgtgacaagctcaaagccatctgtttgtccatagagaagcgtggtatatactgagacacctcgacgccgcagccccagtgcccgccacagacgagcttttgccggcagtcattgctcgggagggatattattgatgtgttgctcagtaagaaaccaaagttgccaaggaacgtgatcgcatctctgtgcagccacagcacccaggacgcagctgggaagggaggccaggggacagctgcgctccgggatgctggggccgtcggcctcccccttcccaggcccagctcctgggcactgggaccaccgtgggcttggctctgagatccaccatgagttctcgctttgtccaagattgagatgcgccaggtagttggtgtgctcatttcgaggtgtttctttttccccccagtaaagtgatgtcacgtggaggtgagtgtgatgggaaagggaacctcagaaacaaggtcccaccttggtcctctggtctcccctgggaggaccacccccaatcctaacatcctgtgaggtcctccccactcagaggctcctctctgtgccacccatcctcggataggttgccatgaggttgccagaggctggcaaagggcacttgtcagctgcagattccagccctgccctgggacttggaggggatcatatccctttgaccaccaggtcatgacccccagatcatatcccaatgaccctctgccataccatgagcccaaatgaccctcaacctgccacagagacagcccccactaactgccactgggtgatgggaccgtggagagtgcccagctcagaggagaagcctgtctgatgtggctcccgtcctcctctgctggggttgtctacactgtccccactcggtgacaccaggagctggcattgcctctggttctactgctctggacagccctggcagcagtgccctagcctggcccagcacctactgagacagccgggccaagccccatcctgcaggtgcagtctcactttgtcactcttggttacccatgggaccctgaaccccataggaggggctcatcactcagggtcctcatccaggtgtggcccatccacacccagcatccagctgtgcacacagggccacacacagacccctttcccatccccccttcccatcccacacagggcaaaagcctgacctcctctcacgcctttggagccagtggctggggtgcaagctctgccccctacacgcgatggctgtgagactcggcgagtcacgtgggctctcagcgcctcagcctcctggcccccagtggaggggacaggcaccattatgccgatcgctcgcgtgcaaaggccctgtggcgtgggcagtgtcacaagctcctggcccaggaggcctgcttggctgatggcagagctcagagggtgtgagcatgaggatggcatcaggggtctctctgcaagttcaagttccgcctcaaccctactacgtggccctggccaggcctcctgaatccaggtcttgctttccccagctatccagcggcttcctgcttctcttaccctcagcaatcccccaagaactgttcttttccccacactagcgtctctctttcttggggtgtttctctcttagcctgcctgtgggggacagttgccaccctcaagcctctcctgaatgactctatttataggcctccaatattggccagagaggaaatttaagtctttttaaaaattcagctcaagtgtgtgtcaacttctgtgagtgcaactgcttcagagagaggctgggataggacagcaggcggcaggggcgtgtcaggtgcccgagcaggacggtggccggagcccgcagcggccgagccctcactgggcaccgtgtgcggatctataatcgacagcatcaattgcgggagtccggctgggctggccgcctgcaggggccagggcgtgagggcggtgcggagccttgtctgtgcggcaaaccctgcctggctgccctggccaacctcagaaaaacatgtattttggtcaaaatgggccccttttcaaacttgtcaccccgtgggtcagggcacagcctgcccccagccggttctgcatattaagcagtggcttggtcaccatcaaaaatagatgtcccgacccgagcctcccctccctcccggggaggggacctggccgtgccggctgggctgggaaaccgcgggcggggaaggaaggacggggcgaaccggcggcacaggcccagcacgtcccgggccctccccgtcaggtgtggaccccgaggttgtgcgggggcttggcggcagctgcgggtgggggtggggggcccgggcctcccgggctcgggttctggccccaggtcagaggtggcgctggcggcaggtggatgcccaggtcctcgccgcgccgctccgggcggtgggaccggcttcctgccctggctccgagcccgcaggtggggcttccgcctcactttggacggtggcgtccacaaaatggctgacgcggcgcacggccgtccctgcacggagccggtgtttactttgccgcgcgaacagcctttcgttgcccgggttccgagtgctccagaggcagatggaaatttttgtggattaaacacggggccgaggcgcgctgggctgtttgggttggcaacctgagccctccccaccccgttccgcgtccgctgcttcccgccctggtccggcgcttccattcatgccttcccgggtccctccgccacccctgcaggcccggcgtcccctcccgcactcccgcggcctccagggggtggccctgcaggcccagagcagcgtgggcctgaacccctctccacgtgtggaagacgctgcagcaataggaaggggctgctcctttgagggcccttctcaaacctggagcccctctggccgccagatctttgtctgtgaaacagcagccagtgtgtggaccaggcaggagtggatggggtgtgtgcccacaagtccagcacccagaaaacccccagcacacggtcccttttacagtggcctctgctctcaggaaggtggaaagcgccaggtggataggagggacggggccgtgacccctccctctgcccaagagaaactctctccctcaggtcagacccaggcctttcaagaagaggttgcagggtgtgcgggctgccaggaaaaggtctgtgcgggtgagggagcgcatcctatggatatctagaggaagagcgttctgggcggagggcacagcggttgtggggtgcgggctgaggcagtgcctggaccaccttggcaacagcaggaggcactggccagagccacggacaagggggagcctgggggcgcagaccaccctgtgaggcctcaattagaggagatgggggcttggggccccggagggctgagatccagctcatggctttggcagcattgttcttgcacgttcaggattagccgagtaaggtgagcctgacagcggggccagcacgcagccccctgcccctcgccccctccctgcccccagtcccccacataggtgtcaaagtgcacagcaccccctctcttccccgccccccgggagccgcaggtcaggcacacaagagccatctgtgtgggcggcaaggtggctgcctgtctgctgcccgcaaagggatgcttgtccagcagggtgaacaccccgtcagggcaggagctgctgaggagatgctgatgcctgggtgactcatgctacctggccacccatcctcgctgggctacaaatgggttcagcctcatgggcatcaggcagggcccgcctgggtgcacccgacaaacacaagggctcttgttctaaggctctgtgatagcccctcttactgagagggaccatatccaataacgggtggaaattgcactagcagggtcatgtgagggctccgagctttctccagaacccaggaatatcctcaaaactgaggctgggcacagtggctcacacctgtaatcccagctctttaggaggccaagacggggggatggcttgaggccaagcgtgatggtgtgtgcctgtggtcccggctgctcagcaggctgagttagaagaatcgcttgagcccaggagttcaaggctgcagtgagccatgatcacaccactgcactctagcctgggcaacacagtgagatcctatctctaaaaataaaagtaagaagtattttttttttaactgaggcccttctggagggatggagggaccagaagtcacaaggagcagaaaggaaaaaagcaaaggaatccttctgaagcactgtgggcatttattcattcaccttgtgccactgcctggggctgcagtgtgagtagggtgggctggcccctgctccttagaatgtacagccccatggctgggcagggggacgcacatagtgacccgtaattacatatctgtctgtgtgaaggagaaagtactcggttttcccagtcagtggagtcaggagcccagagccaaccaggagtgagtgaggaggaggagggtgacacagggtggaagagtgtccagtgtgtgcagccttgcaaaggccctagggcacgagggcacatcctcctgaggccatgagagcaggtgaggcagagctggtgagcgagggatggcccggccgggccaaggatccaggggtggctccggcttcgtgggaggagggttacaggcaggtgaggatgcagttccaggagtggtgaggggctgctgtgggatgagggagagcatcagcactttggactagggtggaggccttggggccagcccccagtctgccagccccaccgatgagaacaagcagactgaggggagaaaggttggagaaggaccccgagcttctgctgtgagcccccacgtggggatgctttgctcggaggggtgctgaggtaggagggtcaggagggtctggagctgtatttggacttggcaggcaaccaaaaccccagtgcttagaggtcaagtggaaaagaaaagaggaagaagatgggggagtgagagagatgggaaggcagtgagggaagccttggggaggccgtggtcaggggcggcacaggggagaagcaggctcatgtgactcagccctgagcccagccgggcccccaaagacgctggaccttaaagacacaaagatgtgatgcatgtgtgttcacagattagcggggagcagatgccgcatggaggggcgtcagggagtacaccgccttcccaggtgagggtgtcctggaggaggcacaagttctgctgggctggactggacccagcaagagagcctgagcctggaggacccctctggcccccatctcccactttcagcttcagctctgaagccaccacccagaaccacatacctgttcttcccaagtttgctctccctagcggagggaaagacgggaggtccacagattaccttgtctcttgaaagcaagatgccaccagtggggaccaatgtacagagaccaggcccagcctagagtgggtatagctcatcacacccccagaagctgtgcggggaggaaggcaagcaggcagcacagtcaagacctgagtttgatgactcagagggtcctctgcctgtggttggcgggggtccaaggggtcttcccatctaactcgccacctcctcccacgtcccactcaactccaccccacagcagccaagaagccagggcatcacttgaccttccgctgcgtcagtctccgcatctcgcctcccctacccccgacctctcgggtgctgtagggatgaggtaggagtggtggctatgaactggaggccttcgcctcgggctggagctcagagcagtccctgctgctgccagacctgcagttggggcactgcacccatgtctggggaggccacggacagggccccagggtctcaggtgacctgtcttgtgtatcccacttcgtttctctctttccctaaaggtgaagttctggagcaaaaagagcctgagctgtgagccgaggggctcctcctcctccaaactgacacccagtcacagagcaattgctaaagacacagtcatgcttgggcccagagtgggccccacggagcttcccccaacccagcctggcttgagcaggcccctgatctaaaccaccctaccccacacccactggggctcacctggggtttggccagcatccctagaaatcagaagcccgcccctaattctgccagcttctggctttccgttgccatggtgacacccagcccccagctacagatcccgccaactcttccctgccattttgcaagaaacaatatttttctgctccacaaacttggcgggaccctgcctttccccgggtccatgaggaaccccacgggttccttgccctggagtctctccagctctcatcccctgagtgcctccacaagcaggggtcccatggggcgggggccgggggaacagggggtaagtgtggccaaccccttgcacagggcttggagatggaggcccctccccaggtgagaccggcctttggccccctgccccactcacacagggacaccctttgtgtttttccacatctgagagccaccgacatttcttagatgacgttttcttgaacccaccgtgcttggtgcccgttaagtacttctactgcagcagcctagaaccgacacgtgtgaaaccattggcttatggcgcgatgcacttcctcccggcatgcatgaaaacataaacgtaaataccaaaatacacagggactattcggacaccacctgaaatcattccatgtcccaccagaagccagcacggcccctggccccctgccaggtgacgctgccccatggcagccacagtgctgatgaagctctgtttgagatcaccgcccggctaaggccaaggcggccacgtcagttctcacggctcctcccaaactgaggagcatggaggaccctgggcattgatggcagggtggcaggaagcacccatcgctttcctctcccggatcttcccagcacccttccaccttcagcctttataccccgagaccaggcgaggcctcccactgccgacccaggcctatcatggggcctgagaagtagtcctcatttcctcactctcacaccccgacacaccctttccatggggaaggaaaacgtgccccgaaggggcctgtgtccaggttcctgcccactcagcccctcggggccgtgtctccctgcgtcagagctgggcctgaagataatgggcccactgaggtgcaggcggtggacagacccgggaagacctcgtgggtttcccaggaagacagagactgggagccattcttcccggcggcagcggctctcggcctgtccttgtccccacacaagcccccactgctgcgccgtccctcctgcgccacctgacagatgtggcggtgagaaaacgatggggcagggaaacgttcgccattcggtgccaataaaggccgcctttatcccgaccgtaaatggtttctgtgtggagtgagactgtgcctgtcccgggcctaaccccccaagggccagagaggcgaaattagatccgtggggagagattttacaacgtatgggctggtggcaagtggcggcaaaccgtccccacggggccacaatggggcattgttcacggcctcacctgggctgtctccagcaccccaggatttacgaggactcggcccagagcctcgatgccggccgctccgggcagacctggagggggtggcgggggggaggccctgtgaagaggaggacagtgctgggggctgggccacggagaggccgggcagcgctggccccagcccccagctcccagctccccagagacagccagccaggaacgggccccaacctgcctgcagaccaagcggtcacatcgcgaatgagtcctcatgctgtgcgtcccccactgggcagccagaggtgtgcctaacggggccaggaggctgaagacaacctttccttgggctctcagcgatgccagctccagctgctgtgtcatcaaggtcgggcttggctggcctcttcctagcagaccttccaaaaccccgcagactcccgtggctgtaccagccctgcacctcctggccacctgcccctgcgtacccaccacccttgctcgggagctcgagggccctttccccactagcatctgaccgccttcttgtatgtcttgaaggttctttgccttctctgtgcagcagggccctttacagtgtagtctggcccctcctcctcccccgggccccgtacttcctccattctgccccttctcaggtgtgcgggacctttttacagccccctgcttgtgcctgcactccctcccctgggagcctgcctcaccctgaccacatggccttcggcacccagcttgagtgtcccatcctgtgaagccagccggttcccccaggcacaggggatacctcttccctttgggcacctgccctgcgtactgtgccagcctccaggttggcccaggcagcccaggctgctcagggtcatggccaacccagggcaccgcggtgggcagatgcagcccctttccaggccaacttcagccctctcaccctcacaggggacccaagtgcacagccatccacagcggccttgggacaatactgagtcttgagttaggggtgtctctcctcaaccctgagagcagccccttttcccaccctcagtgcccccacttgtggcccaggcccaagcaagcctgcatggtgcaaacccacatggcagcccagggcccaggaatggctgtccaagaggaaggggctggaccgtccacgccctgggttcccaaccacccttcccctcctggtcacctttcggcttggcatcaggagggcttgaagaagactcctcagccccacctgcagacctagctagttgccaaccacctggggttgtgcccagtcctcagaactcacctgcccatggtcatccgagccgttcccacaaaagccttccttgggatcctcagccgtctggggggcctccttactggggtcacctcaaaaacagctgtagaggggtttgcggcagcagcagcagacgtttttaaactaattcattggtgatggcaaaattatgccgagttccctgaaaaaaaaaaaaaatacccactctatttcctcattaacataattgcaaacagaacgaattttcttgatttcgtgtaaacaacagcttgaaatagtttataatccttgcaggtatcaaattaagttcttacttatggtctggaaattaattacccttgcagcgagacaaatgtgaaaactgtgtatttttgacaagaaaatgaagcagctattggggaaaatgtaacttaatcgtagcagagaaaattgtttataaattggtcgcgttgtttgaactctcgcctctgtggctcagggctgggttgatctatgcatgtacatttgcctaatttgggacaggggaaggggctggaggagcaggaacaggacgggggaaggagaggaagaagaggaaggagagcagagggtacccgcgtgaagggtacccacgaggaaggggacattagacaagaatgcaggtggtcaggcggcacttacctggcaggtgaaatctaaacaggcaccttcaaaggaggacaaagcagctcccttgggtaactaggaagaggacaccagctggcgaggggcaaagcaaaggacctgggacaggcacgtgcctggaacagaaagggagccagtgtgtctgcatcaaagtgagtgagagagcagcgcaggagagaaactctcagaggcaggcaggggccggaccacgggggcggtggtgctcagattccatgtggctgtccatccatggtgggccaggaggtcactgttgtggtgacaaccagcgctctttggaatggactgaagtggaatgtgatgtttaacttctgtagctgtaagttcgagtgtgtgtgtgtgtgtgtgtgtgtgtggtgtggtgtgtagcatgcttgcatgcctggacacagtgtgtgttggcatgtgtggtgtggtgtgtttgtatgtgagggcagtgtgtgtgttttgttgtatgtggtgtgtcttctacgtgtgagtgtggtgtgtgttgtgtctgcatgtatcgtgtgtgtggtgtttgtgtgtgtgagtgtggtgtgtatatgttgtatccaagacagccaaagggaagttccaaggggctcgtgcactcggtgtccagggagcagcatctgtgctgtctgcaggtagtcaccgttctccatcctgttacagcaaataccctcctctgcatttttcccttgtgtttgatttgccaggagcagaatttctgggttggaatcgggaacatttagaggagcttctcagtagagttgtacagagtggaaatgagtcggcaggctgcatggggggttccagtcacagcacagagggtgtgtgttttcggtgcctgccctcctgagctccaagtgtcccacgcctgcccgtcagtcctcatgtctacctgggcgaccccattttgaagatgcagaactgaggtccggagaggcctgggtagctgcctaagggtggggtagaagcatggtgccggctcagccaccctcaggtctccaggctcccagccaagggctccgataaggctgctgggacctgggggctgtgagcagatgcagacgtccacagttcccagggctctgaccctgccctgtctccagagcccacagccccacccaaaaggccaggaggtcacagatctgggatcctttcccgccaccttcaagaagggaataaagccacttcctgctccatcccagtggcctgagggtgtgggagggacagaggcctcccccagcagggtaaccctgcaaagagggggctgacagccgttcctgcttcctactgggcagaggctatagaggaggtttccagcgcctcagtgcaggcagctgagcccagacccctgggctgtccttggaaccactcccagcccctgccagctttgtagcctctttcttccccaccccacttgcctcacctcggcccaaacctgggtactcccagctgcagccctccccactttgcctgctctgaggctgtgtagggcccagggagtgggggaaggggcctgggtcccgcacaggattgaggtggcgtttacagaaccgggggccagagcagctgtggccgtgaaggttccaagcttgaagtggaaagggttttgatgccaaggtccaacgcccagcttatcattgtgtaaatctgggcaccacacatagcctctctgtgactcagtttcttcaaccctaaaatggggacatgcttgcgggggttcaggagatccccattgagcacggagaagagcaggtgctgtccactcagtgaccatctgccgtcaccattccccaagttatgggagaattcagctatggtaagagcagagaacaggatggcgctggggcaggaggagaaggtgtggctggcaggcactcatgaggacagggtctcagagcccattctagagaatgttccagaaggcatggggaggcaggagaccaggtgtgcccagggtggggacactggtaatgggaggtgccagagctggtgacagaagcaatggaggtgggtgcagggctggggcagggccaggcagtggctcctggggtgctggtggcccagacagactagagatggtggaagggtagagtgcagtcaggtttggagtgggtccactctttgcacagaccagccccctagaggctccccagttccaacaggatactgggctccatggctgtcacgtggagctgtctgtaggtggactggcttctgacccactcggggtgccggaccctgccctgtgcctgtaggggcgggcactcacctgcccttgcagtcccctctagctctccagcttcctgctggccagtcgtatcagctggctcagcagcaaaggcttcagaccaggggacttaggtgagagaaatttattcctcacagttctggaggctggaagtccgagagcaaggttgtggaagggtcggctcctggtgagggccctcttcctggctcataggctgggcccttcctctgtgcttacacatccctggtgctgccgccttctcttgcaaagacgtgagtcctatgggaccaaggccctgccttcacagtctcctttaatatttatcacctcctaaaggcctcgtctccaaacacagtcacattggggattagggcttcaacatgtgaatttaggagggcacagttcagttcataacacaagtcctccgtcgggccactggagcctggggagatgcccccactgcatgctgaagggcaggaagtgagggaggggagagcttgttgcgggggtgtccttgcctctcagggccacgcccactgcctgcgccagggaagaccagcagtgacagggatggtgtccccgcagcccctgggttaacactgcctcctcccttgctcttcttggcagcacagacctcagaaggctggagccccgggcaggcccaagcacagaaaaagccagagcagggtctggggtctttgcctccagtagggtgttgggggagctttgtattctctgtggctggaggcgatttcgccagctgcggagcggggcgcggtgggcacattcacccagactcacaccggcccaggacgtgctgagggtgttggggcccatccaccctccactccgcttttccaggggtcaggcagggggaggccacagggtgcccagcttcagccacacccgccttctgacaatgcgaagcccacctggtctgtgagctgtcgcctctgtcctcacagtgacagagctggctttgagggcagcaggacaggggtttagccctggctccggccctgtcgccagccggcagcactggggccaccagcacagcctcccagccctcaccagtattaactgtcatcccaagggggccactgaggcagcggggagcctgccctggaatgtgccatcctcgggcgcaggcagcccttcatgggcctgcccaatgtctattaattaagccccctggagactccaggagctgggggccttggctcagtgccctctcataaagttctgctctctggggaccgtggctctggcagccaccctgcctctcaggagccagcctagtgcctcctgggtccccagggtatagggccagaccccaaggcttagtggcaagaggcccagcagatgctcattctcccggtcaaacccctagatgacactcactggggaacagaggggctgggtccaggaaggaggcgtttgcagggcggggttgtctcctgaagactgcgagctagaggggagaagccactgcatgctcccagcccttcacctcacagtcccggaatggggaagctgagtggccacccacccttggacgttccctgagcatttccccactcagagtccagaagcccccagccccagcagaccctacagcgctacctgcaaaggccagaccggccagccagggaggtgggctagacagtgccctggccaccacagggcaacccctcagctccacttcgccacccagaggagctggccctggccactctctcagagcaggaggtgacatgaagggaaggtggcaggatgggagtgcccatcagccggaaggccacgggagtcaatggtgaggggcagagtgagcaaggggctcagggtagcccagaaaacccagccgggcccccccccccacgggcacccaggaaccgccctggctttgctggaggacctgccatggctttgccagaagaccctgggactgtctggagcatcctcccaaggactcgcccctagtcaggaaaaaatagggccccggagtcagcaagggcttcctgggggcccaggtcagcctggacggtggcaggactcggcgaggtggggatggggcttggaggatgtggcagagttcccatggtgtgtgtagaatgatattccctccagaccacggtgccttctgggctctggagaatgcacctgtgttcccaggagctttaggggtacccaggtggtgtgatggggagcaggagccagttgttcccaaacctcgccctttctccctgcaggcactggcagagctgggggtgatggggcttcagtggagcccgccaggactggggacacaagcctaggcctgtaccgtctgcagccccatctccaggtcccggcctgccccagcctgcccacccccagcctgtcccccaaatgcccagggctgtggcctgcccagacttgccagggagctcctgtgcccttcttttctcctggcctctcagaagcactccctgatcctctccccacttccctcctcccctctcatccccacctcgggcccaccagctcccaccctgctatgcccatggaccccagggtcagcttttatgcacactcaggtactcaggacaccccacaccagccattggatggggccgcctctgccacctgctccagccacctggcagatcccactcggctcacacagagccttggccagcatgtggccgcagccccaactgcagcggaaggtatcggggagtcgaaggcagaggggaaaggacgggatggcgggtgaaccacacggggaggagcctggagctccttctgcattttcttaggaagtgctgcagggacccactggattctctacagcgcccagtagcccattagaagatacagaggcagcaatattcacagggccagaaacaactgcagttcacccatgctgtgcaccagctcccacaccacccatgccacgtgcctgctctccaccgagccctgcaaatgcctcggcacatcagcaagcacaggcctcctgcaacgtcattttgcagaagggaaactgaggcacaaaatactccactgccaccaagtcacccaactcagtggtagagctgagatctgaatgcaggccgcctggtcaagcccatctgtgaactagaaccccgccgccctgggcagaaacaaggctgtattgacggtgctgggagagatgaggggagggagggatggaggccggaacagagccggctgctcccctcagagggctgggtgtcaccccagttttgtctgtgggtttgtggagagcatcactgaaatttctaacttgacagagtggttccagggctcatatagaagcataaagaggtgaaaatagctgatatttctaaaggcaaaagctaacgagtggggttgcactgcccagcgtgaagctgcagccaccattctccacactctcctggcccttggcacaggatgagccttgcagacggaggcgacaccaaggccttcccctgcgcccacacccagcgtctggagctgctggaaatatgtgtccccaccatgaaactgatgctgctgttcatcccattttgtgtatgaggagactgaggcacgggcccacagttgccagctgggatttgtcccaggccacctggctcaggtcaccggaacatgtgacaacacatgtggtcagggagaggcagcaccacagtcagatacaatgctgacagggacggcagagttccacaggcaatgaggcccccggggtaaaaatgaagcagtttgaaaacaaaaccaggaagagtgtctggccatcccgggcctgagtttctgcccatgggcagctgccggacaagccctctggtgtgtcagcgggtcaggctgagccagacgtggagatgaggctgagagccggaagcaagggctttgtctctagaagacgcaggggtggttcacaggccgctggggacccaggtcacagagcctttcccccagctccagcctggctggggagagcaaaggctgcagctgcacagggcccctccctgcctgcccaaagctgctaccagacagcaagctggggagaaaactgcagccgacgacggagagggacgacattttgcaagtgaaaactcaaatctatgagaaaagcactcgccccgcagtaggaaagcaggcaaagaactagaaagacaatttacaaaaggatctgaaggtcctcactgcactcatcctgtaaggtggacttggggcctcatctggccccgctgcctgtttttgtaaataaagttttaatagcacatagccacgcccaccggtggacacatcgtccctggctaaccttacaccaccttggcagagttgagtcgttgtaacagagatcgtgtgaccaacgaagccagaacgatttactctctggccctttagagaaaagcgtgctagcccttgctctaagagtttcagtgaagagacgcaagatgcagaaatgaacctaattgtgtggtcttccgtgctggggaagccgaggagaaatggaagtatgagccggttccctgctccagaaatcgctctgatgacacgtatcacggggattaaaaaacattcctccccccttgacctcataatcctccttccaggattctctccctaaagaacaaatcagagttatgcacaaacaagctaatcacagccttatttataatagtgagaaattggaaacagaccgcatgtgcagcatttgcgggatgttggttcttgttatgcacattagggacaattatgcagctttcagtcatccctcagtgacccaggaaaatgccccatgtacaaggttactggagacaaacatggtcccagtttctggggtgggaggtggtgcccaaaacatcaccttacagaaaatgcccggaaacgtgtctctggagggtggacttagagatatgtttttgaaacagattttttcatatttttcaaaatttctcccgtaagtggttcttacctccataacagaaaaagagtaaacaatcaatgtggagtgaggaagaagagaggggagggagagaggaagggagggaggtacgcagggaggcagcaaggggacttccctgctgaggacgctagcccctccgtaatttgtctgtccttcccagcctgcctggggccacatgggccactgtgcccagtgaagcctggcttccttgtctgtggtgccagccatgtgggagggtaggcgacccgccttgggctgtgtaacgcaggcttgcctcttccttaccccggttgtgccagtggctaggcaccaggtaacctgtctgtgctccccaccgagcagctgggccgtgtctgctttccgaggaggctgcaggtaacccttctctaacctgctcagcccccagctccatcttccacctgtcctgggggatccccattcattctctccgtgggcatcatcagaggctcagctgtaccagaccactgcccgggagtacgttcgggctcaggtttcccttgagggtggcccccacctgacccctccccgcccctctcttgtgccctgagagaatagcgtgcccccagagacagtaaaagcctggcttgcgtgctggctccggtgacacacaaaggcctctgcttctccactctcaggccagcccgagagggacggcaccaccgggacagcaccagcgggggcatggggaggggtgacaggttgggcggggtccctggggctggggcgtagcccctctctgcaggccccacagtctgtgaccgtgcagggagggtgctgggagtctcggctctttcggaaggcgccagtgtttccttgtcacagaatgaagtaaatgggacgatgaaggggcagtgtttaaatggctgctttagcccgtttggaagtctgctaattattctcttgaggaaagaaatgcaggttcattattataatgagctttgggcaaaatatttcatcgagcctgacaagccgcagcgacgcctcgaacgtggccggctctgaaaggcctcctattctgctggaagctaattggcccggggtcttcccagccctgtgctgtttgtgtgctattttaattcgcttatgaaaagcccccgctttgatgtccgggaccagataaggccgggaggggaccctccatggagagcgggactgtgccgcccgcggtcgctgcactgggcctcctcgcccccccactccgggcccggggccagcgcgatgtcatgaggtaactgaacaaacagtcctgctgaaaaatatgcttttgtttcactaataaatccctcctcggaacactcccgggccgggccctcctcgggcccagcctaccaggccttcccgcccagtgcctccgcaacccgcgccaggacagccggcggtgggcacaggcgggcgaggggcacccccaccccctccagggccccccttccctcagcctcctccccacccacccgagctgcctgcctttcccgcactctcctccctgacttcctcccacctaccggcctcttccgacctctctctgcctctttcccccatcacgatactccagtggccaccttccctgcccaccatgcctcctggcccccaatccggtcaccaacttgaggctgcccctgacaagccctggctgcagcatgagggaagcagcggtagagaaggccaagtttgggcaccttgcacagcctcctggagcctcggtttccacatctgtaaggatgagacaggaacggtctctctgggggcagggccggtggtacctggagccctccccactgagcacctggcccagtgcccggcacgtggcaagtgaaggcggctgcttcccgcccctctcatggacaccactgtgggcaccacttgggcaccctgtgggcttattttccctgcccactgccaagcaccagaccaagatctgatgccatctgcccagggcattgagggtgaacccatccaggctggcccgccttccagccctcccccagcacccaccaagcccctgcgatatcccagtggaagataatggaggtgttacggggatgggctagaactcggtcctggcatcacagagctaccccggtcaaaaatataccatgtaattacagaccaggaaaattactgtgcaggagcaaagcagggcactgtgccggagaggaacaggggtggtcagggaagacctccgagggaggggcatttgaaaatagcattcagagttgctattaataggctctgatgcagaactgagcagagaagaaaacaaaagaggaccataatatctccacagagaactatcattaattttttaaatgggagtcctcaggtaggttggttgattgagtgattgattgattgataatcttggttctatttgaatttctagaaaattccaacagtacagaaaggtctgaaatgaaaggtaaataccttcatgaccatgccccctttccctaggataccccttgttatcctagaaatacccatccttagtgtgaggagagcagcattccagacgcttctctgtatgttgcatagaaaaaggatggttagatacatgggcagattaatggatggacagattgttgtatggaggattaggggagggataaatggatggatggatgaacacatggacaatgggtgggtagatgggtgaatagatgggtggacagatggaaggatggatggatatatggatgcatggagagacagagaaatagatgcagagatggagggagggagggaaggagggatggataaatggaggaatggaggaatggatggatggaggggtgggtaggtgggtgggtaggtgggtggccagacaatggatgtgtgagtgagtagatgaatgagtgggcagacagacagacacaccatcagaagcaaatataaatatggaatcaagggatgcctgcagcttttgaattgttgatttttttctttttttaagaagaaaccaaagtaaaacagaaggaattgctgaattcagataaatgtttcttcaccaaaagagaaattcatttctaaatgtcactttcaggttaaggaaaataaaatgtgggacgctggactcatcgtgggtttttgcggtcttctctcagctttgtgtggtagccagcgacgctgcaaccccgcccccgcagcctcctggtgcagcacgtgttcatttatgggttgttgttaccgtggcattggtccaggtttgtgatacttgtgcacagcttgggggctctgcttccctctgtttgttcgtcttggtgctgtgtatgaaggtggcaacagactccccatagtcctctcaccacagacacctcttctcagttcttcgtttccagttggactcatctcctgactggttgggtttctgcctcggtcgctgactccagaaggccccacggctcatgcctgcttccctgctatcctcctgtgcactgttggcctttatcatctccaccacgtgctcaacactccaggccagagcccttctctcaaatcccctttggttctagccatgtttccctgagctcttccctctctgtctctaattgatgtgttttcctcccaaaccctccttccttgcataattctgcaactgaccttttttctggccatcctagattgggtttactgttccctggtactcagacctgcttaatgctcatttcttcagttttctggggaagcctcaggggccttactgataagaactgtgtggaaggtaagcattcaaagttcttacatggtgaaaatatcttcattcaaccatggtgccctattgatagtttaagtgggtatagaatttggagctgaatgtaattttccttcagaattttgaagacctcgtcctatggttttctagcatccagacttactattcagaagtcttatacttgctttagtctcatacttttgtaagtggcctttcttttcttcctggaaatgtttagtatctaccatctggactcaggggtttcaatttcccagagaagttccctgtggatggctttgttcattgactgttctgggcacttggtgggctctttggaaactttagtccttgagctctggaaaggtctctgtatgatttctcatcatggaggccaccatctctgttctctctttctgaaattccttttaagtcagactgaagacatttttaatgacactttgatgtctcaactttcttccccttttttatggcattatattcttaactttatctcttcagagttctaggaaatgtttttagcagtcctgtttttaatatcccagagcacacgcttgctctctgaccgtggtcatggcattccgccctcatttgatgggcacgacagctcctaggatctttctggagactccagatacatcttatatcttaagttctgcttaattccttgatcttctgtttatgtttggccagccaggcccctctctctcatgttctgaatgtttttcaatgtttgctcgggatctgtgcatggatgggcctgctggcatttaggatgtgttgacaatgactgggggaggtgcctgtcattacactgaggaaccccatatgttagagctctgaggctgctgcatctgagagcttgggctcgaggtacagggctggcagccgggagtcccacctgtaggacgctctgctgtggcagagggacaggacatggacctcatgctcagccccttcccatcgtcttggtgctgtgggcctgatgtgtgcctccacaaggactcccgccttcccagcatggcattcagagcagcagatggcttagactcacccccgcccagtcttggcacccttacagccccggcgagacccgggtgggcgtggaccctagcgtcccttcaccctcaggctgtgcacctccgcagtgccgtgtcctgtctggagcctgtcacacccctgtacagctaccccaatccaaatggagcctcccccaggaagcccctggtgggaatccgtccccacgacccctgtccggcttccctggctcattgtccctgttacaacccagatttcccttatcgcaactggtcctagcctgtgacctcctggggtggggaatcatctctgcaaacacagctcctccacccttatcagtgctttgtgaaggcagcagaacgttctcctgagccagtgtctgggtcacttgagcaatggctgccaagtccatgggcctgcacgcatgaggctgtgcctgtgtctgtgccgctggagaccttcttgaggttcactgccctaaaggccgcatgaggggacagaaggtgaacacagggccctgcttggtctgacaagcccaggcggggcccttgccgagcgtcagggtggctggcagccaccttctgtgatcgtcctccttctgggctgcggtctagggctgcacattcaggatggggatgtcccagtgggcgcgcagcacaagggtcagcagacccctggctggaggaggtcagtgtggggggctgcgtgggagacggtgcagcagtgggcctgggagctgagcaacggtggctgggatgggtggagaccaccaaagaggaggggccggcgaaagccaggcttcctgcaggctcaagcctggaaaacggtgctcagtgagcaacacattcccgttctacagtttcctgagctcccgagtgcccgccgcaggatgacagtgggacagtcctcacaggggcatgctcaggccctgccccaggcagaccccacgccctggcacgcagccccaccggctgtgccgcctctcgttcctgtcctcctggcaccgccggccacccctcagcccagccctcatggttctctaagccgccgcctcctcaggaagcctcccaggcacccatgctccctgcactgacccccagaccccagctttggccatgcactcccagacggctggtccccacacaaactttctgtttcaaggaacagaaacacccctgaaacttgtctaagaaggaaatgtgtcaactcacatacatgaaaagcctgagtccctcctcaaagtcctcccctccctccttctctctccttccttctttcccccttccctccttccctccctctctgcttccttctctccttcctccctgagacctgggacgccgaggagggttccgttccctcccccaccctggcagtgctcgggggctccagttgaaaatgatgggggacacatttgcatcacagcctgcccggccggctctgtggcccctgatcttcctactgcagcctctgccggggccggaagggcatttccgggaggcgggaacagcatgtatgaaggcagagctccttcccggagaggagggccagccccgtccccaggggctcccggctttctctctccccctacattcctgtctccatgcagcagccagagggactttaaaacataaaccagaccacagcactgcctgctcaagccccccatggcctccctcttccctaggaagcaatccaggcacccttccatggccgtgggccccacgcccccgaggccccacgcccccggggccccatgcctgcccttgcaacatccccttcctgactccacccagcctcctgggggcttccgcctcaaggcctctgtgcctgtgtgagtggcaccctggggttgtgccatggccagccctcaaaccatctgaagtctgctgttggcacctgccctctcctggctgcaaagctgccccctcatggcctcaggtctctgccccagcctccaatccctcattactgccccagcctgtgcctgtgcctggaggctgtggcctggctctccagctggaacagaagctctgagaagacagagctggccagcaccatctctcctgtgagaaccctgtgcctagaacggagcctggtacagaggaagaacccgacagactgtgagccctgtcttcctcttggcaccatgagtcacctgtcaaactgaggggctggcagagctggagggagttccatcccagccccaaggtgcctggagtagcttatggaggtcactgatggcctcaggatgccagcaggccctctgatgcccagggctcattcaagggcatctgccctgtgtcctcatgcacctccattcagggaacctgggctccccactctcacaggggtggagacctgcacctctttttcacccccaaacccgcctgccgtcagtgcttggagcaaatgcccctcccccgccatcttttcatgactctcccccttcctcaaccctgcgcctggtcaccaagtcctgacaacacctccagcccctgtctctatggtcccctccttgatctggagccattcagccacatggagtatgtcctctgtcgagggggcagggactcaaaggatgagagaaggaacagaggggaggaccaacatctcggctgatcctggtctatttttagttggtggtgggctgtcactccggaggccagtgactgcgtcatcagtgccttttgatcttgttgccgcaagatacacaggaggcagctgctcactgcttgtggaaagaatgagggcgggcacataggcctggggtgtggggagcattaatgagtgtgagtgagtggcggatgagtaggtagatggatggggagctgcagggagggagggttgcagaaagggatgcgtggaaggatggttgatggatggatggttagatggatgaagagatagatgaatggataaagaggtgaaaggatgaatagagagatggagggaaggagggctgaataaagaaatggatggatggatggatgatggatggatgggtgtgtgggtatgtggatggagagatggatgaatggttaaagaggtggatggatgaatggagagatggagggaaggagggatgaataaagggatgggtggataatggatggatgaatgggtaggtgggtgaatggatggatagatggttgagtgggggggtagatggagagatgcatgaatggatagaggtggatggataaatgcagagatagagggaaggagggctgaataaaggatggatggatggtgggatggatggatggatggatggatagatggatggatggatcgatgggtgtgtgggtgggtggagagatggatgaatggataaagaggtggatagataaatggagggaaggagagctgaataaaaggatggtgggtgggtggatggatggatggggaaatgaagagatgggtgggtggatggatggatgagtggtgaatgaatggatggatggggagatggagggaagggaaggctggataaagagacggctgggtgggtgagctgatggggaaatgatggataggtggatgggtagattgagaaatgatggataggtggatgggtagatggatggaaggagacaaggaaggaaggaaggaaggaaggaaggaagggtggaggtaagggagggagggagagggagcaagcaggcttggatgagtagctaaagcacctcaagcaagggtgtctcccttagaaatacatgtgcctccaagtcctcgaggctggcatcccctcctgctccatctgcctctgcctgctgggcagaccagtctgctgtcctaccaaggcctaggtcttgactctggactcttccatgctcatcagagggtactgttggagcttcctggtcaggctgacccagctgcctctggagcctggcctgggatctggagagaaagcacctgtgcagacggccccagcgctatgcccttctcaggcctgctctgcacacacagctttcctcatcccggcctcatgcactgtgggcaggagttgtcctagcaaccatcatccaggcacctgctgcgtgctgagcaccatgctgggtgcttcctgtgctctcaacagccttatgtggtcagtaccaatccctccccaaattacccccatgctcagggtgtcactgagggtcccaagtctggggtggccaggtcacagcttgaacctgggcagcctttattctctaggggccttgggggtgtctaggctgccaccacagcatccacactccccactagagcccacataggtcttatgggtgccacagcagggaccccactggacctctgtgctttctggtggggggcttgtcagggagctcatgggcacctctgggttctaagaagctatgctgaggcccacagggtagttctgagttcgggggaccctctcctggccctgtggggtcggaggaggtcctgggagcccacctcctgtagatccaaacacctgatctcagctcaggatcgccactccagtgccccatcccagagcctttgagagtggggacagggtgtcctgttgtagttgccaagcccaagaaagatgaggcacccaggatgcctgacagtagagttgcaggggggcaggcaccatcgcccccagccccaggctggccccagtccctccctatgcaggcagaggggcaattggaagaggctggagactattcaggagagggtgggagcagacacgggagtaggatgggggccctggaggtactgggtggagctgcccccagcccttcctgctggcctccccagagctccaggctctgaggccacaccctcacccaaggcaagttgctcagggggtctccaggctgtatctaacagctgcctgtgccgaaaaattaagcaccgctgagtcgccgcacacctgtcagggtggaggggacttgggggaccagccagctggatatgttcccttgcaggcgggcagggctctggggagtccaagtgtgcacacagtcctgggtgagggctccgttagatgaatgtggacggctggcggccggggcttgggagatcaagaagtccctgaggaagaggacagtagccaggggcaagacctcacacgcctctgcccatcctgggaaactcaccatggcattgtggttgaagggtcagtggccaccagagagttcctgctgcagtgtggaaaagacaaacaggcgagtgaagtggataaagattcaggttgtgggagggagacttgaagggcaagttggccaagactaaaaagtggagtcaagctcagtgctggtgacgatgttggggagaggggcctccagcgccgtgggggagaatttcaagagccttttgtgaaaatggtcaggctgctgaacgtgagaccacactcaccctgtggtccagtgatctccttctgagaatccgccctggagcagtaacacccttgggactgagaatggcttctgggttgtgtgtcatcgctgtccaggagtggtgaaaagctggactctgactgcctgtcatccagagggagcaaacagccaccctgtggtgaagccacaccacatatgatgaggggctggaggcagcagaaagggggctataggaccctttgactcaagggctaaccatgatgtttcattaagggagaaatgcacttgctgctcctggaacattctggctcactcccgcctcaggcccactgccctggctggactccctgcactgaacgctcctcccagctcatgctttccaaagtcccctgctcaggaggccttccctgagcccctgccccctccatttcagacatctccatctgatgtctgagccctgaacagacacaggtgtctgttcagggctcctcaaatgcacaaatacatgtctgtgaccacagcccaacccctgggcagtggctgcccctctgcctctggaggtcccctccaaaaccttggtccctgtccgcagagggtgtcagggcttgaggtcaacagggaggtctcagggcaacagagcccagtggcactcctgaccccaggagacagagggaacccaccctcaccctagtccacatgcccgacccatgacccaggcctgtggcgccagcctgcacccggctctgctccacaggccaactctgcgcacgctcctttcaagggttaacggtgcaagctcctcacggcaccagtgcgcttgcctttgacatgaaaatgtttttgcagcaggctcggatgccagcatttttgtggttgcagtcagatgtttttaactacgttggacagaacccacggcggccctttccgtggcttcagccagtttctgagcgctaccttgaacccctgttgcaccccaggaggagaatcacaccagtgccccctgacccccagccttgtgcagacactgatacccttaggatgaagctgaccccagtcgtggcagccaccccagcagtcagggaaggacctgctggggcatttcagatcctgagcagcatgtaccctgtgaaagaacaggttccccaattttggttcatggtacctgagatgacggcttcagatgatgtccctggccagggaggtggaggacgctgggcagagccctgggcattaactcagggccatcacagaggtggtgagagctaccccgggtctggggactgttagcacagacctgagccgaggcccccttctcacaggggcctacccacttacgacccacctcctctcctccatggcaaaggtgatacattagactcaaagagacatgatatccccttgggctgcaacttaaattccaaggagagatcctgaatccagagtcacatgtatgttagaaacctctggcactctcccctccccagccagcacctaccagctttgcgcaaatgctccacatttgcattttaaaagccctgagaaggcctgcagtgaaaaaaactaacttcgtataacccaactattcccaaactctatctacaaaatatttttctcttttatcattaaagaatatgcattaacacctaaaacccactatcctggcaaaaaagtggcaggattgtctgaaaaacacatggccagccaccctgcaccctgagttccacaacatctaaacccagtgtctgctggccctcagagtgggagcgcgtgccccaacttccgagccctaggaaagggtcttgtctgctcttcccctcagtgtcaggtgacccaagagtgtgggggtcaggaatggcgtccttgtgcccttgtcacccactcctgtgggtacacagcttccctttctgcaaagtcacaccccaagccctggcttgagcatgtacacaggctgcagcccgtgttcctggagccaccgtcccaggtgtggctaaggcccccacagagtgtgcatcctaaggtggttcagaggtcctcagaaagtgccaagaggccttcctcagaggaagagcaagggtaggtgcctctggcatgagccagatgatgggagctgtcacaggactttgccacccggggtgaggggcctagaaacccctctccaccagatgccttacaccccccatccccacacgcacacagcttggaggctggaagcccccggaatgcggcccaccctgtctccagttgttccctaccagcccagctgctggtccctaaccgggcccacctgttgggtccttagcaccagctgcccagagcccccagcccctaccctagtctgatgacccaggcctttccccctgcccaggctagccttgtgctcagctgccagcacagcccccaccacacactccccaacaggtgtctccacaactgccaggagacagctcagcttagctgatcttcccctaacccctaggcccagcagaatcacatctaggagagtgggccacatgcctcttggaaggcaggtggcacaagaggttcatcccaccctccagcattacccagccccacaggacccacatcctgctcccagctccagcctgaaaggagctagtcctctccagcccctttgaaaagaccagctggacattctccagggagattctgccctacaggattagggagtaccctcacctggcctttgttcattggttcattcattcattcattcattcaacaagtatttgccaagcatccctatgctccaggcatcagtggtaggccagacagccaaagtctctcctcccaagggctgtggcccactaggaggacagacaatgacagagcattgtgtgctctatgcctgcccatgtgctgaggaaggagcaggagaggaagacaaaccagagtttaagtgaggagtgggcaaggcttttatgaggcccagcccaccctcccctgggcaagctggggatttgggaatgggagacatccaacacgtgtcagcccatacatgagggtagaagtccagttgaaaacacacctgaaacagcagggtccaaacaccaggtgccgagagccttcctgacattgaaccttccttgaattcctgaggtaaaccttatgtgatcttgactcaagtccagctgctgatgcatttttaggttttagcatctgtgttcatacctgatttgggcctagaattttcttgtgtttgcttgagcagttatggtgcctggggttttaccttgtcagataagttgagcaacctccccttttggctagtgctctgggatggatgggatggatgtcgtctgcttttttaggtaattatagaaatcacccccaaaaactagactggaaaccttttagaggagggtaggtaactggcatttgtgtctccccaatgggtttatgtttcttaggattttctaccgcataagccacttttggtattttttgccttgaaacttatccatcatattgtgttttcaattttattgatatgaaagtatatatcataatcacttacaattattcaattccctcggtagcagtagtattcattcctaattcttatttgttactttacttgcttaaggtttatctactttactggctcttcaaacaacctgcatttggttttattggtcaattctttttcataaaatatttttctattttgctaatatcttcctttgactttgttcattcttttctttgtatttgttttggtgttatttttctagcttcttgagttgaaagcttagcacatttattttcaatcttttttattttctaaaattgccatcgatacttctccaaataccctataggaagcatcccacactcttggcatgtaatcagctccttgtaaatccatcctaagattttctctctgccttattttctctttaatcaaagagttatttagaagggtactttttaaacttcaagatgtatccatctgttgctatttttattaataattttctattttacatcaaggtacagatttttagaaatttatggagttttcctttggtgcctaataggatcatttctgtgacctttttgtatatgtgtggaggcggtggagtcttttctgttaattgtgttaaacttgttagtggagttctgcgactcctccacctcctgacttaccttgctgtttgtttgtttgtttgtttgtttgttagtttcacccactgtggtttgtcagtttctgagagacaggcactaggatggccaataatattgtggatttcttgatgtgttggttttgttcatttgtttttcctgccccatcctctgggcccttaaagcctgggcacatgtgtcctctccttacgtctggggaaatggtctccattgagggtttgagtctgcgtggcttccgcctcccttccctcctgctagagcccctctggaagctgctggaagccatgtcctccacatcccctggctcttccttcatcccatactttcttctccctgacagagctgtcaaggggagtgcctacaccccacctccattgctgctcaccctcccctggcccgtgctgggcctcggccatctctggggctgtttctaggcccatctaagcgaggggttccttaacctgccttgcttttgcagctgcctgaacctccctctaaggacatcagcactcttcggaggccaggtccggcctgctctgctgccttggtgggaagctttcgtccctgcagggtggggtgggtctgtcaagtgttcggtggcccctggctggtgctgtagcaacacgggtgtcagagggcggacaccgaagcctggtgctctgtgcgagtcccgtttcctcgcctctcagctgtgtgactccaggtgcagaggccccgcgtggggcaggagcactgcaagcgagaggatgggaaggtggccgtgggcctggcaagggttggggaatgtggtgagaatggtgcccatggggtcacgccagccacacacactttctcgagaagtttcaagtggagccacagggccattgtgtgtcctgaatcattgctctggctgagggagtctggggacccatgagggccagatggatgggctcagatggagtgggaggccattgggaagtggctggtaaaaagcctcatgagggcagagccccactgaccccacacagttacccatggtgtcccyttccccacgtggtaattctggactgttcacagtggcttccaaggcctttgggatgggccttgcktkctrcccttctgctggaaaccctcccagccatttgaggtcctgccctctgctcaccttgttccctgtgcccatgacatctccccaccttttcctggctgctatgtactggtcctataggggttccttaaagggtgcatcttccaagccactcctgttgccctcctctgcakccacatccctgctctgcacacccccaccccagcaagtgtgtgtgagctctgtagtcgtgtcatggccccagtgatgtcctcattctatccctgtcccttcatggcagagtggactttgcagggtgactaagtgaaggatccagagatggggagatgatcctgggttatccaggggccccgaatgtgatcacaagggtccttctaagagggaggcaggagggtcagtcagcggagaagacagggggatggaagcagagctcagagaggctgaaggtgctgtgctgctggctttgaagacggaggaggggccacagcccaggaacgcaggcagcttctagaaaaccggagaaggtgaggaatgaatcagccctagagcctccagcaggtatcagccctgctgacaccttgttagcccggtgagactcctgacctccagtgctgcaagatgtcacacacgtgttgcgctatgcttgtggtaacatggcaccacagtgcaggatgctgacacaagcaccagcacagcgccaggccctggggtatagtgtggataagatggactggaccctaccctcctagggatgtccctctaggaggtggaggtggggaaatggggacagatattaggccattatggcagaatgcaagtgtttagttagaactgtgctaagtgcgtaaagagagctaaaggctacataataagttgtgagcctacctagggtattagcagaggtgtcccaaggaagctccctgtgagccaaaccccaaaggatgggtggaaattagctcaactaagtggagaggtgggatagtcatgggccaasgccccaaggcaggaargaataggcctggtctgtgggtctgagaggatggagagggctgaacacgggccaaaggagaaagttagggagggaaggtggagtccytggcaggggctcagctcagaacagggggagccccaaaggatgtgaggcaagggagcaatgaacaaatctcaccattgtgagatctgaaattcagaacggtggcataggccagagtaggacattgtgaaaaagaaacaattagagaagcagaaagagtgcttggaaatgtcaattatgctgctgaattaaaaaaaaaaaaatcagtaaaagatggaagtaaatctccctgaaagtggaatgaagactgaaagacagaaaatcagaacacccaagaaacatgcagactcaatccaaggacatccaatatcctgctattggaagttccagaaagggagatgagaggaaatagagactaaagaaagggcccactgagaacctctagcagaaaagagcagccactgtgtcatcatgcccttcaggaacagcagagataaagacaacattctagaatcttctcaaagaagtaacaggcgattttccaaacatgggcctctgaacagatcagtctttggtagagaaaatttatgaagagagatgccttcaaaattgtgaaggaaaataaaattctatacctagccaaagtatctatcaagggtgaggatacagtaaagacattttcagatactcaagaacttataaaatttttccaagtcactgcaggaaaaaagtatagaatttgctttctatcccttttcttagaaggttctggagaatgcactccagcaaaacgtgggaggaaaccagggaaaaggaaggcaccaacaacaaggaggcagaagaccctacacagacagaacagggaggtccaagcccagcagctggctcagggctacaggcctccagcccaggcagcccaggcaggagcagaggacaggatactcctgaagaggccacccaggaagagaaaataggtgggactgggaagaaaatctgcaacggagcttccaaaacagcggaggatctccctgagggaggtgttgttagagaagagagcagagaagcaggagaacccagaaaggaaatgtgagcacagtataccccctggctctgtgggggacccaggcagtgggcatagatttcatcaaaacaatggggaagctgtgctggacagttagagggtggacaaagccgagggtggggtgagagcttaagcctcaccttcatacaaggaagattctagtagctaagattgacaagtcgagaaaccatgtggccagcatgtcaccaaaagctgataagaggaccagtgatgggcttcccgrgagtggagmtgggcatgcacamtaaggcctggaggctkrtgmttatcsatmatatagcaggcstgccctttccacagcacaaacaccttgacacacaccgtcacacacacccatattcgacacacacattcacacaaacacacccagacacatgcatgcacatggataactaactcttccagcaagagccaccccctggctgaagtgtgaggctgtccatggaggggccagagtagaggggaggtgggtgaggaggmtacgcagaggccctgggaggagggaggctaggcccaggggtggaaagaagacagatacgagaggggatttggagacacaatccccagacttggggacgagctggatatggtggygawggaggkgagtcttcaggamagacccccwggttctggcttggccatatgttggaggctgaaacgattcatccagacaggagcagggaggaggacatgcagggcctgaaagkttctgaggtgtccacgtggaggtgtttgcyyggcagtttaggctgcaaggctcagcagggagattggagctgaaaacagaggctgcaacatggaggtggtacctgaagaaggggtgtggatgaggttgcctggcaagagattgcagggagaggagagagtgagaatggggccactcaaggggtgaacagggccttgcagtacaggaagcagctgggggtggcgggaagaagacagtcaggagcttgggcatcctagaggcccccgggacagctttgaggaaggaacgtccccacaccacagagccatagaattctgtacttggcctgtctcagtgccgtgccgcatccatcctgcccctggcaccggagggtacactgatcagggacacgagttcccctgccgggcacagagcaggttcccagtgagttctggggcctcagtgactgggcaaggacaggggcgtttggacaggggaggccgggtgtggatggaagctgtacgatggggcctgggccagggattgtgggccagctccgagctcagacattggtctgcacatgtggctggtgcaggaggcgcagtgtgctgggcctcagcctggacacggctgtcccatgcgcagagacagggtcacggtggaaagagagtccagagaacatgggaggtgccgtttccctgcggcgggactggggctggggcccgacttccccgaccctgctgtcgggcgtgtgccttcatagcccaggaagccagttcctggcagggtgggctctgcagccaggccgccagggtgcagacccagaccaatgggaggccaagggaggcccgcagcccagaccttccgagccctcagcctgctcagctcagtgtccttccagggaaatgggcgtttcctgtgggaaggtgccaggggccccgggtgctggaagagcaagcaccacgcgggggggtaggggcgccccagccctctactggccagtgtccctccagtcgtccagcccttgctgccaggggccccgcccatgtgcctggaatcacaccctggacgcttccttctttgggttagatgtcgtcgtcttcaacaaatattttctgaatgtctgctatgtactagactctgggaacacaggggaaagtatgtggacctgcccatgaggaagtcagtacagtggggccatgaacaataaacagacaattaattatccttcgcggagctgcgcgggggcagctctcccaaagcagtcagtcattcacacttcagtatgaatgagtctccgggtactttgctcagtaacggactggaccagcgcggcctccacgccagggactggggcaagggtggagtttggagtaaagagagaggcarggcaacccctttccacagacactttaccacctccccacattgacaagctggctccccagggccacccggagccccttcctcagatcctgtccccattggcatggtctcagcccctcctgccccagtaccctctccccgaggcctcgtcctccccgccatcctggaaacgattttgttgtctgcagagattatgtgtaactgcctgtgagttataagcctccacagcaagcagcctgttacctaaccaggcctggctcatgccaatgtcttgagtaattattggggggcgggggctgtccagcccgcagcagaacctctccgagggagtgctattgtttttcatgtcagctgcattttaaggctacatttcacgtcagctgtgacttggaaggaaagagggcccggcctttgaaaaatgaagaaattgagccggggttgggggcggggagggcargttaacccttcgggctccagtattccccagcttcccagggtctcctggcagtaaccaggccagctgggggtcagaacccgcggccaggcccagcagccgcctcttggcagcgctgatggaaaccgccgtgcggttccgcgcagacagtcacggaaactcaggcagacccggcgttgggtgcgccaggccggtgtgggagcactttcccccgccccctcctgctgctgcttccccgaaggcctccccagcagacctgcagctgggcacccacagggtagaaatgccctggattggctgtggcacaagagggmtggcccagcacacccagcccaccactgtgctcccagagggagaacagagaggggtgcagagggccagagaggcacggggctcccctgggcacccctcgtcttggggcccctgccctgcctccactcagaatcccactatgtgcttggagccatgctgggtgctggggagacacactaaccacttccccatatgctcacagccagagagacacacaggccagcagcctgtaaaccactgggtgtggggtgtctggtcctggagtgacaaggacagggaggaagaaagccaggcaggtggcccatgagccgtggagtaggtggggaaggggacatctccaaggaggtgacatcggagcagtcctctaaggagtttggagtcattttcagtcactcacaagccacaggagggcttcagcctgaagctcagaggtgatgtgcttagatgtcacagagccgggaggggaacaggctgggctgcagagaggaggccaggcacagtcacctcgtgttgctgtcccccaggtaggagataagggaccagagtcagggcaggtgggagaaggggaggttcttggttcagctgctgctgagacagtgaccctggggacagcccaaataagagagaactttgccacccgcagggtcccagagtagcagaagcttcagggctgatgtgtgcctggtgaatcagcctggccccagacctcctctctctgcttgctttcctgtccacaatccagtgcttctgtcctatggtccccagcggctgctcctgcattcaccatcacatctgcattccagcagcaggagggaggtaaaagacatgaaggacaggccccactcctgtaaaaccctacacagaagcggcccacgtcatccccctttctgtccacccgccggaatgtgacgcacgcctgagtcgctgcaagggcccctggggacggagtctctattccaggcaggcaaacactcagcttaattcagggttctgttgattaaaaaaaaaaagtggggtcgggggggcgggggagagcggctatggagacaagtggctgttttgccagagggaaaattccacatgtggcttggaggccagaccagaaggactcagataggagttgggcgcttgagggaggaaatgggggtacacttcagcggctcaggccagggtgtaagtagcaggtatgtggtggtactgttttccggaatgaagaggaaggggcgggcagaaggcagcgagagctttgtttggggtgtgtcgaattcaagatgcctctgagacatggaagtggtgaggtcaggggccgggaaccctatggtggtgttggccctgagtccaagccaggcaccaccgggcacatagaggtcttgaaagctcgaatgtggggaggccagcaacagagggaacactacctgcaaaggggcgagggcaggacaaaggctggcagcaccacacaggagccagcagggaaggggccacagccgggactcagaggaggcagccacgtgcagaaaggcacccatgggaacatggctcctgggagctggaggacytcagcaggcakggactagcacccaagaagamaactctgagaagtcaggacaggagatggtgtcgtcagggggctgctggaaggtttggtgaccggagcagcaggtgccagagctgaaagcactggttaaacgtgatgggtaaacacatgtctatttcagcttctttgaatcccactaaggtgacagtaaaggcatgaaaaacatggaaacatgtaaatcaactagggtaaagtggtcaggagaaaagaggagaccaaaaatatgttgacaaaggtttggaagctgggaagcaggaggacagatggagactggcctaggagactggagagggtagacaccaagccctgcaggaagaagagccaccaagaatgaggcagttcccaacccaggaccctgacaggcaggtctcaccccagcccatgaagccagatgctactgattctcaagctcagctagagacaggttgagtctccagaaaagctgagcctgagaggttctgaacttggagccaccaggagcagttgtrggtggggcaggagctctygtgatgaaaacaacagggattcagtaaatgcattcmakctaaaaaggaagamctcctcccccacttccctcatcaactcccagaatgcccggtggggcacaccattgttttcagaacaccagcaataaagcagacactccacatttccagagagaaaaagtaagtcacacacaagagaatagaaaatcaaaacggtatccaatttcttaacagcaattcagaaagctagcacatagtagagaaatgccttcaaacatctgagggaaaaaatgatttcccatccagaattctatacctagtcaaactctcaggtatgagaatagaataaagacatttccaaacatgcacagtcaaaaattgtatctaccacatgccttttctcagaaagttacttgaggacgtgctctagcaaaatgagaggaaaaaacaaagaaagagaaacacaattcaagaaccagggagactccaacaccaaaaacaaaaggccaagagaattttcaacatgagtgaaagaagttctagcattacagctgctcagcatgcctacagtgcaaacagtcctgctaagactccaggaagaaatcccagaagaaaaaaaaaatgaaggtgatagactgccagtattctcaataggatgaaagaagttttacaattcttacagaaagttcaagaatgaattagtgacagatgcagtaaaaaacaagcaaaacctaaggccatttgtaacccaagggaaaacaagaagatgtaatcataacagaccacaggacacagctaaaaacagtgattacatagtgacataaagagttatatactgtttgtgtaaaacgcaaacagtaagtacttatttagcctagaattctaatttaactgtattggaaagataagggagtggggagggcaggggcatgagaacaaaatcttgatcacttctcttccatgttaggcagtcactagataatgtctaaagtgacaaaatttcaaggaacagcaatgtaaatgtgtagtttggaaataccaaggtaaagccaagagatagtcggtagggttgaagggctgcctctgggaacagaaattagagatagaagatctagcgcccagggaaggctgtttaaagatgggagagcttcacgggttttctcactaagggtaagaaaatctaagaaggaagtgatggtgccagagaatagggaattctgccaataccctggtggggagggggagggggarggggargaggatgagaaggaaggaggagggargaggaaggaagagggaggaggaaggaggaggaargaggaggaaggaggagggaggargaaggargagrgwkgagggaggaagagagagaaggwagagattggccaaaggagctctgagaggggaaggtgggtgcatgccaccctggctgggaacagcaggtgtgtggtgaaggggaaagaccagcaggccctttacaccgtgggcacaggctcaggactggctgcggtgctacgcaggagccctctgactagctggggctggggctktgcaggataaggccagtgagagaagaggaytcactggtgggtgcctcctccccacctttagcaagggttgacagagggatctgggctcttccctgggcaggcatcccagagctatgacctgaatgatatcttagatgatctccaaggccccgggatctaagtccctgttaagtcccctgttaaaggacctaggtcctcccaatggcctgcaaaccacacccagtctagtcagcatgtatccccacaccccagtcccagtgtcccaagaacctcttcctccagccccgggagcaggaagggcgggctgggagctgcaggatggggcctgaatctctcatcaactcacagggtcagcctgggccaggcaggctgggggccagcccaggacctccttcctgggtggagaccttcccacccttccactcaccttccgagcattgtgggccttcccaggaacccccacatctccgtggccctcagacctctgacctcccaagggcaccccacgtgtgtgccctccagcaccctggccacagagccacacacctgggccttcccctctccccatcatcaggtaacccagcacaggctggcccaacccctctctaggcctcagctttcctgtcaggaaaatgcagggttaggagctgaccagggagtctttgaaaccgcaagggtacccttgggagaccccgtgcaggtcttgtcaaggcaggacagggaagtggtgatgatgagaggcagctggtctgggtgctcagccccaccccagcacccgcccaatgggccccctgagggaagctgcccatgctctctgcgccccattttctggcctctggcatgcagatggcagccctgcctgcttcccagtatggctgtgaagccaaaggcggcgatcaatgggatgttctcagaatgacaggtgctctgtgatcagcagcagctgctacagggatggccatcgggtgcagggcaggatgtccctgaggaggcacctcagcagacgtgatgggtgcctgtgcccacagttgggccatgagaagaagtacgtggcccggcctgccctacaccatcagggggtgcttggaccagtggcggctggaaataacccatgaacaggggagagaaggggtgaatgccttgtaggcctggaacactgtggggctgtcgaaggtgcttctgcctccaggaagccctccctgactgtggagacacaagaagctctccaggtctctgggtccctctggtactctgtgccctgaaccaccacccttaggcccagatctattcctgatccttctctagacttcagtcagtttcctcttgatgtcctggatggccacaaccatagtgtcccctccgctcctctctcccccacttccttccacattgcccctcctcccctctccccttccccaccactgctcccctccttcctccagcacccttctccccgctgccctcccctcccctccccgctgccctcctctgcctctctccgttgccccctcctccctcccccaccagagccctggaaggctaggtacagcgaggaagtggccactccatgacccccagtgatttcacttctctgagcctcaagagtctcacctgtccagggtccatgggatatgcctgactcagcccctggcacatggtcttgcagtggcctgagctggacatgcccctggtaggaagctggaaaggaggccctgcccgtgtaccaggagcctctgctccaggggggtggcctgaggcccaggcagacctccacctccaggcagccctgcaggtggacagctgggcctcaggcttaggacctgggacaactgcctagactacccccagccttcctgacaggtgatagcttcattgtccccaggacacacaccagcccggtccccaccctaccctttcccascacccctgagggaaggcctggcccctcasgcacartkggggttgcccggcatcttggcagatgggcagcgttagagaagccttggacctgggcccttgcaaacggaggtaccagagggctgaactagatgagggacttgaaggctcagatgcctgtgcgggacctggcagggtgggggcttccgggctgggagactaggacagggtgcctgtgtcccctcctgggagtggggccgtcagagctccgaccgcacagggtcatggggagcaagaggaaccaggatacccacaagctgctcgctcagacgggctctgcgactccacaactcaccttcccctactgcaagatcagggagatgggacgcagtccccgcccatgcccagggccttggcagggtcaggagagccagtgcaggcaaagcaccaagcaccctgctgcctgggagaccacagttgcagcaggaagccctcctcaggtctgcccgcctccccggagcatgttccctctgtagctcccggtagggcctgtgtggagaaggttgctgatggcatcactgagcggcccagctgtggggtgaaaggcaaggctggggctgatgctccccaaggcaggaggagaccatggtctggctggggctgccccaggtgacaactgtagggtgtggggaaggtggctgccaccgccgtggtccacagggcctggccagggctccatggggcagaagccatgcccagctcagggggcttcactccactctcccactttgacctggtccctcccctctcccccagagtgacctggacactagcctcctcccagtgggagacagatgtgggcaatgcagctgctgttccctgctcagggcaggctggtgcccaaggactgcccaccagaccaggggataagaggttggcagcatcgtccatggttatcccacagctaggaggctgtgggtgtgggagaacatgctgggtaggggtgcctgtgtgcctctggagtcgaggcaattagaggccctgtggaagcccctgcacgcaaggggcccacgcgccagggcagaggacatagccccttcttgcttccctgagggacgggaggcctgtggacttctggagacaatggcagagtcagggcagccaagccgggccagtgccctggagccgagtcctccccccacctgcccacatgccccacccctctccaagcttctcccctcataggatcccagagccccttgggacctctgtgaagactgcatagatgtgagggagtctcagccttagggtgggcacctgggcgcagctgtcaggccccaagtcagccccaggcacgtggacctgggagccagcctcaagggcaggggtccccgagcatccccactgctgccccgccagcaaccgtgtcactgggaggcaagaggctgggttcctggggtgggcaggcttccccgcttcactccatttgcagcccctgtcttgcagaggcaaaatggaggttcagagaggtgagcaaacaccaggtcccatgtttgcacctggctgtgaccgtgcagtccactgggcccagcagcaggaactggggcaagtgccccgagacgggaccgagacaacagtggggaaggtgggacaggcagctgggggaaggccagagtgtccagcaccagcgccaggggccgttccgacaggctgaggarcggcggggagcggggcttgccaaatatgtccagatggggctggagccccagcaacttcctgccctcccagcctgctcccccacctcctcacccccttcccaggctgtcagcaggggctggggggcagcagaaccccacttagccacaaggagtgcagccaggggctggctcccgggaggacatgggcagaggcttaggtccccttacacacacacactgctgcattcgtgcaggatgggctcagcgcctgctgtgcctggcgtggctgtgtgcatggcatggtggtggcatggtgggagtggtgtggcacatggtgtggcacatggcatggctggggctggggctgggttgtgtagcatgtggagtggcaaggtgcgtgacatggtgtatggcatggtagtgtgcccctcgagccatgtgtccaggtggggcagatcatggagggcgcccaggtgcggtgctgaggctgagcatgcactggctggggagggtgggcagagcaggaggaaatcccttgttctccggagctggagagccagaaagagccctgcagcctgggcctcatcatcacacctcgccctcaaggcctccaggcacagcatccactgccagcctctgctcctgcctctgagggtctgtctccaaggtcttttgggggctgccccagctcccccaacacagacagcaccagagctgggcccacctgtgaggtgctgagttccccatctcagagactgtgcgagcagaggcagggaggcgcttgatgtcggatggagaaaggacaggggaggggtgtggggctmagggccccgccaggtgaaggaacaagcttggaagggtgtcsttatgtmtgagagttggggagacacccccaagccccagatgggcytcgaatgccaggcagggccaagctgggcccagaagtgggaaggatcccttggctgccccaggaatgcaggttccggggcaagaatccagccctggctggttgaagtccatcccaagtctccctccccacgaggctcctgcagatgccaggaatggggctggattccagattccaagcctggccgcccagcccctatctgggaccccagcccagagcccccaggcctggcctccaacctggccccagcctcaggggagctgaattcagagaatcctgtcctaggagccagaagcgggggagggagggaggscgsccytstcytgggtgcaggccmgggggctgggggctgcccgcccgtytkggtyarccgsarstgccaamccgsccctggckgagtyakkgggcctycatytycmrgcctkgcttgaggtgggaatagcagtgaggttggacatccaggcacctggarggtgggcagggctccctgcggctggggtggccagtggcacctggctgttgcccccctgcaccccagccctttggcccccaagtstctgccacctccctggggttctgctcccatattcctcacacccagcacagaacccagcatgtctcctgtagacacctgcatataaaccctgactcacacacacacacacacacacacacacacgcacacatgcaggccaggctcctcggccagtcaccctaccggcagagctctagacatttctggcctctggtgactattcttcaggcagctcaccctgcaagtctttattgagcacctactgtgtgccaggcagtggtacagcaagggcagaagccccacctccaaggagctgaccccctgccgtggcagagacagaaaacaaaggcagcaccacagcgacgagggcctgagaggaaagtggagcaggagcctgcagcatgctggggcaggggtgtctttagaaagggtactgggagggccctggcaagggacttaagtaattacttaaaggagggaaagggtggcctggggctcacagaggaaaagccttcctcatggaggcggcggggcakcgggctcascctgcaktgtccaggagcgacgggaagcctcgtggggctgttgggagacagcaagacctgggtcagcagagcaccgtgtggggtaagcagatgacagggcagtgacagggtgattcggscccggtcagtggtcccaggggtcggggacaggtgggaatcgaagtcataggaggcggggcaaaggccacggggaaagggacagagctgctcccaaggacgcaccaccatggggtgccccatggcgtggcgggggtgggggtcaggacctttagcagaaggtaaagatgagaccaagaggcagatgggtggaagagttgaaagcagccaagtgtcaccaaggcatttctgagggagagggacacgactagtggctcaaatctttagaaatgaggggatgggtctggtagagcaccccagattcaaggcgggtggcttggggaaagcagggagaagggtctggaaactgctgctgagcaggagcccccacacccacagagcaggtgcagggaggcccatctgtccatccgtctgtctgtggggaggcatggtgacgtttcagcccggaggtagaagttttcacccaggaggtagagggtgaggccggactgcactccaaggggaggaggtgggagagcacagcctggctgctgccaccaagctccccagaagaggggacccctccccccgaacaccagcacatgtaggcagaaagacttggcstgtggagccctcagcytccacgcccaccagcagggactgggtggtgatgtcagcaatccccacagaaaggagggctgcacagccgtcccaggagccagcactgtccccgtgattctacatgcagcctccacaagtgtgtcgcatggaaacaagcagtggagagccacatgtgtgtcacatcacgcctcgcctcactcgtgctaaacctcgctgaccaggcagaaccaggcacgagctgcgtatcaaagttgctggaaggagaaacatcagatccctaagctggttacctggcaggcaggggccctagagggaaatggggcaggtgaaatggagatgtgtctttgaaatgtctttatttggcgggagaacgtcttcatagggtacttataccatgaaaaaccctgtacacagactaattttgaagcaaacatgtgaggcgttcacagaaagggttcaggaagacaagcaccccagccgcagagagcccgtgggctgggggcacggggcatggcarccctctcctggggatgggcaggatggggcacgtagggcggaggaagaggctcacatggtgtgcgtgtttgggagcaccctgggcagcctctcgagtgtccagagagaggacaccgtcttgagccagcagggacagccaagagcgcccggggagaggcctgggtggagacagaacacagcaggctgtgggcgtggccaatgttgagggacggaggtggccagaggcctctcagtggtgccccagggagctggggacgaggggcctcatccttcccctgagcccctcccttcaggcccagggagtggcctggggcccaggagagcccgctccgcgctcacagcctccgttcccagacacgcccgggcctgagcccccaggctgcactgtgccacagaacagactcccyggcccctccctgctcgagaggtgaccaaggcccagggtctcccagcgagcaagaggccattgaactgttgttggctgtgcagtgccctgccctcggggaggcsgcctctaagaagcacacaccaccagcaggaaccgggcagacagaggtgggggatggaaagcaggggaagtggccacagccaaaccaggagggggaagggagggggcctcaccaaggagaccctcacctggggcctggagaatgagaagggtctggaggctaaggagaggggtggatgctccaggaggcagggccagcccatgtgagggtcctgaggtaggaaccagaggaaaccggctctggggcgagaagggcagcgcccagggggccacaggggccggcggcgagggaccctcagccgaggctggtatctcgagaacagcagggatgcctcaaaggttctcgcccagcaagtggacattgtggtgtgggagatcagcaggtgccggtgctttctctgtctgcaggaaggagagggggtsatgggccccagaggcctctgtcttagagaaaaatggtggcaacgtgggacagactgaggaagccagcccagaaacgtcccgtcccaaattcaggaatatttagggtatacctgctgcacgccaagggcagtttcaggaaggggacctacttctgagaagcaaacaccaccagtagggaccaggcagacagaggtggggatggaaggaagccagactgacctcacgtggctcacagccactggcagggtcgggggacaggtgccaaactatccacatgcccgtcaggcacctggaggagtgtgaaacggcatgcagaaagraggaagcaggcttggggctgggggccagggaccggcgcgctgggaagcaggctgcagagtgaggccagggatgggggctgggccagaccacagggttgtgagcggactctggcattgatccggagccactgagggttagagcctatgacaggggtctgacttccagtggtatggggccaccctgctgggctggggaagggaggcgagaggaagtatctaaggtctgcttgtggacttccggggacagcgaggggtattgcwggggtcctaggggctggtgcaaytcagaggttccagatggcccagcaagtggctgagggcccagggtaggggaggatgtgggggcagcagggccgatgtgggcagacstggagcaatgacacgagaacggccaggcagccctgggyttyccctgcccacctgcccccgtggccgggytggggtttggctgaggcagcagagcgctcgctggctgcccgaacaaagtgttctgcctggtgtcccctggcamtccgggcytctgcgggctcgccagagggggcagctcaggaggcagcggcagagaatcaaatgcaggtggggcstgtgcccaccgccagcacaaacacggmtcmtgggcccccagcctgccsgamgttcctgcccgcctggcccccaaacagaggccgatgggacgagccctgcccggggttgcactaggtgggcaggtgggcaggtgggcagctgcctcgggytyttggacagagccgcccctgcctggcgtctgccggcaggaagctcctgaggccgggctagggataggccagcccttgggggaggctcgagaccccatcccagcctggggcttccccaccccytcccacctgcctggcagtgaggcagctccctggcctctgggtgcacctgggcctcctgcccaggccccttccaagggaagagggcaaaggggctccagtgccacccagggagtgttgtgccacgtgggcccccctggctctgccactgactccctccatgacctctgtccccaccctgaagttgacatgaatgtccgcacggagcakcctctgcaggtctgtgaggctgtggatgtgacagctctggctctggcacaaacgtcagccccaacccasatgcagggagggaggtggctgcgtgtccaggagcacggggccatgtggcaccggctcatgtcagcagacacggcacacatagaccccctgggggctatgacgaggtgagggctgagccgagggagaatccaggaaggcgtgcgggccgagaggaagaggaagggaggctstggtggctggagccagctgggggagggaaggcagcaggggmtgggatccctcagcccccacagccgtggtgcggactttgttgtttgctcagagtacaaagaagaggccttctccgggttcttagcagacgagcgcgacctctccgaccagggagacagacaagaggggaggttatgaggtcacctgggagaggtgtgggttccagctcccgtcgccactccccgactggatgccagaacgagcctgtcgtctttcacctccagacagcagggccctggctcccagtatcaaagcatgtacaagagcggtctctagggcagttctgcgtagacgccaaagtacaggaagacgtgcaggaactttgtgccgtcgacccttgaacaatgcagggttggggcaccgacccccgaactgcccagtcaaaaacccatgtataacttttgactccccagaaacttcactaatagcctcctgttgactggaggccctaccaataacataatcaattaacacattttgtatgcttcatgtattacaataaagtaaagtaaggaagagaaaagatattcattcagcataagcagatcattgtaaaggtcttcatcctcgtcatcttcacgttgagtcagctggggaggaggaggggtggctcttactgtctcgggtgacagaggaggaagaaaatccacgtagaagtgcacccacacggctcaaacttgggttgttcagggtcgatgatacacaaaaaggacattctaatccagtggggaaaaggtccatcattccataagtggtggggtatcagcaggataacctgcaaaagtaagtctgtaggtcagaaatcaatcccaggcgattcaaagatttagggggtaaaacacaaatcaaaaaagtattaggaaaaaagattttggcgttggaatggaggaggcccttccaagcacgcacaggatgagaaggcataaaggaaaagatggatggctttgaccacgtgaaaaagtgaaaacataagtaagacctctgtgtggcaaaacaaaaaaataataaatgccataaacccatacacgagacaaatagcacactagggaaaaacatgtgtgatgtgtacttgacatctttcttaacatagagtccttacaaatcaatgaacgtgaaaaggcccagtcccagcctcagcttctctgctcagcacccaccctgggaaggagtgggcttggggggcttctaccccctcactccagccttggggccccgggaaattggccggggcctcacttactaattcaacaaacatttgtgcagcgccaactctaccctccatgtatttactgggcaccttctaggctccaggctccaggctctgggagactgtctagggttaagacggtgactgcctggcctagagctgggcctccagctggtggcaaaacaccaagcaaggagatcaataaaccgggacatttcagggagtggtgaaggcttacaggaacatggggagagatgagacgaggaggccgcccaggattttgagctaaggttacaaagcagcagaggacagcgggtgcaaaggccccagggcccaactgagatgggcgctcagatcaacacgggcatgctcagtgccggagaggggccagcggagcctctgggggcactgcaaaaggagactggattttactcccagtccagtgggaattctgcagaaggatttggcccaggctgggagggaaggctcagcctggctgttgcctggaacaagcggggaacaggttgggggcatagccaggcagtgaggtggttgtgacagtccaggcagaagatgctgccagcctgggcaaggggcatggggggcaggctcagagcacatgctccagaccagagagccacagacaccaggtgcacaccagggaccctgggtagttggtcgtgccctgtggatacaggattcgggccggcttgggaggaatctgagctcccgctgggacacgctgagctgtggggctgttggcctgcaggccttggagcccctggagagagcaagtagctgacggggacatcctagctagccgaggtcccaggaagggaacgagggtcgtgtggtgacgatcttgagatattcccccacagtcgtcagccagggacatggcgcccctgaggcccttggggggccaagcatccgtcagtgggcagaggctggcaaaagtggatgtcagcagcagggggaagggtctttctttcaccatcttgggcctctctcagagggaggcaaccccgctcctggggggtggtcagtgagggccagccaggcagcggcagccccaggaagggtgttggggtggagctgaccaggcctctgccgcatggttgcgctgtgccgaggacccgctgaggacataaccgaccatgagcggtgtgggtccccagccgcagcagagcttcctctggctgctcggcagacaacagacaccagggacagagacaaggttgaggatttggtctgcagcctctgagcggacacactcaccctcagtgcgtgccaattcagccccaccacaggcgccagtcccgagcctgagcacaggggctgccacgacgctcgactctctgggccaagactcacacacagcctggacactgcccgggtgaagggctctgggggacagggggagcagctggtatgtgtgtgaccatgggtcccagactcagtgccatctgtctccccattaggagatgacgcctggtacctgcccaagcacccaagccatgggagttgctgcttgctctccacgcagctttgtcccagcagcacccccaactcctgtgatgggttgcagggggtgctcacctctgtggcacacacaaaggcccaggggcctgggggtgcatgcaggtgcactccaacccttgggcagcccagagaacaacctaatggaaagtgaagggaattgtacaagtgtgtacaagggtgcagggtggttcctgccttcttgcacgcacagtctcccacactcatacagccacaggttcgtacgaggtacacatatgtgggctcacctagcatgcctcccgtgtgcacagcagtgctcctttggcctcaggccacaggcatacatgtgcaactgtacgtgcactctaggaatccctaatgatcatggccatcgggtggctcgcagtgcactgagcaccatgctctgtccctggtgtcttcatgcctcagtccacttgatcccctcagcatcctcctggggaaggtgctacagctgccctgttttataggcagggaaactgaggttcagagaagcaaagtgacttgcccaaggtcacccggccaggaagcggcagaggcaggatctgaccccagacccgctgcggcacacacacgcctgcctgcacgctcccgtgaggaggtgctttgtgcccaaggccctgcagcagtgtggggggttctgaggccatctcccactggccacagcacagcaagctccagcagggcagctgccccaaggcctggcggtaaaacctcagcagcgagaaacacggtcgacttttgtccaagaactgaagcactaaagcaaagtcaaacacaatcgctccatgccctgccacgaaccgcgaccttaccacgtgctgtgacctattgccacttgtgcccagctccacacaggagccgggtctgacatccgattgctcagagcctggtatgaaacattctaggtaccgccctgagagtggcttagtaactgctggttcctcaggacagacaggaggaaggccaaggtgacctttgccctgcgaccctacagagggccctggggaggccctgcctggtctttagacactgcccaacaaggatgctagaaggggcagtgagttttctgcctcctggggaactgcagcccaggcagagaacaggacccccaccctgggagcagcgggtgtgcccggcctctcccgcctgtccctggccagtctgccatccacgaggccagggcctttggcggtcctaggcggggatcaaggccgggcaggttctgcaaaaatttcccttgaaagactctttttcaagattttcttttgaaaacaaattcataaccacatcaaacaggaatccccgttgccttgggtttgatcgccggccgcccggggctctctaactagctgttattctaattgcttttttctcttccgagggctgcataggtctcttatggttattaatttggtgagtgcaggccgggcacaaagcagcttttgtctgccttgccttttaatcactatcaaattgcaaataatggtggaggctgagatccccaaaattgatctgtcccagcagttcttggggaaccggccccagtgcatagagcatgcactgccttcccccagggcggcagctccccgatggcacctgcccggatgcacctccgcatgggtggggtctggcctcggccatgggaggtgcttctcaggctcctccatcgccaaaaaaaaccaaacgtgccagcgagatgaaggcgccctgcccgcagagtggtggggtgggactcttcagggacacgtgctgtgacaagtgcttgagtcagagctaagactctggggctgccgaggagccacctgtagcccaggcctgggcccttctcacaagggggcggcaccatgatgcatcaaactgtggaaccgccctgggcatccagcccacatcctggcccacccccggggcctctgtcaccagcagctgggatgatgagagcatgtctctggggccagagaccctagccagtccctcaaagccccagttggcacaggcagcagttgaggtgagcctgggaccagccagagccaggcatgggctgacgctggcccaggcagcttcagggagcccttcagtgtccgtcggaggcaagctcggccctgtggctgcctcccgaccccaaaggtggctgagtgcctctctacacggtgccgggactccctgccgggaggagctgtcaccaaagtggctcaggactgagcgctgattccagccacaccctcagcctgcactgcctgcctgcggccctgacacccactgtctctttctgtcccaagaatcccctgtgaaggcctccacacccattagcacatgtgggacttggacagatgttcgagtgccataatgtgaaaatttatgaaaccacaaatgttcatctgtgatgtatttggtgctttaattaatgccaaaccaattgatacccaagctggggcctgcacagttagtgacagtaagccacgcggggcaaacctcgttccacactaccagtatgcggggcccagggagctgaggtgagccctaggacacaagcccaggctttgccctcaaagacccacgctggctgcacctttgatctgttacgctctcgtaggtctctgggcgtcagtttcctcatgtgcaccctgaaggctgagagacctcccatgacccctaccaggcatgagcaggtcgtgggactgagagggctggtcctgccggcagcaggagccacgggggtcagggtgtggctgaacaagaacgagacctcaggccgttccccttcccagaggccccgccccaccctgccttttgctttcgccggctcctaacttgacacactgtgtccccccatatggcagctccgtggtctcgagatggagccttggggtgggagctgtggggacaggatgggagacatggcactttcagccagtgactctgaccttcttttcctgggcctcagtgtctgcatctgtgggatggagtgtgggcctctgtggctcgtccccaagtggctttgcagagcactgaagtgctggcgggtccttgggtgtgagagaccccggtggatggccgtgggcccttgcccgtgccaaaccacagaagtcctgcacccctttcttccatagtgtgggcctcacatcaggtttatctgggaaaaataaaacatggggctccctctggcctggaccgtcagacctcggatgtacacctgcccttgtgttcaggacagttgggtctcagactcaccccatacctgcaaggcagaaccacaggggagccagggagcctccacactgcagcccccaccacccagggctggaagtgggtcccctgggctcctgctctgggcagggcacagtcccaccctcccaggtggaggctgcccacctagccctctagacagacgctcggccccactcaggcaggcgcccccctctcatctcaacctctcacagcaccctgttggccgcctcttccttagcctgctcagcctccgtggtaggtgctgtgggtgaccaccacagcacccaacccttgaagctggcccgggtccacccagaccctagcaaactggttggaccctctctggccatcccggggcttgtgcccaccttcacccagcagcatcttccctggggttgttctcacccgcacagaacccagccttggcccacacctcaccccaagcctatccggctggatcagcagtggggccgggcgcatgagggaccaggcccgcccggcgcagcctagggtgcagacccctggagtgcacggccaggtggaccgggccagctcccgcctgctgcctgtgcttagggccagtggttgacgttgctgtggctgagtcatcttcgtgcctctctctggagccatacgtttccctgaagcagctctgctgttcagcccttatcgcgtgctgatctgtttgcccctcccccaccacttctaggtctttccaggcctccaggtacccacggtgggggagggtctacttcattctccacagagcacgctgaggggctctcctgcaagaacaccgcaggctgaaggaccagccctgtctcctgtggccaccaacagagctgtgcgccctccccgaaccctcactcatgctagggcccccaggtccaacctcctagggagaggggtccccaacctggactccctcacctgccctagtctgcccctggggttggccctgctccacccagcacctgctctgagggtgccagggtgccggcctgccggccagggccttccagtctccccatcaaggctggatggccacttcccacccggggcgggctccagcctcattccccagcggtgctgtccttccaaggagctctcagatcacctggctgtccactcgtttggggcttctctgctgcctccgcagcactgcgaggcctctgatcacctactctctgtgctgggtgcatttcgggttctgtcctgccttgacctccctgccagctttgcagggcagccaccctggcacatagctcactgcagaaccagcccctgagaaggtggaggccacatggctagccagagggcacgctctagggcactgctctgaccacagaatgtgggtgcagatggtgtctgggaaaatagtggtgtccccgctaggttaaagacatggcataatggttcctgggggatgacaaaaaaacccacccccacccccttgcagaaagcatcacagaggcacaagccctgtgccctgcaagcccctcctggaagtggcccagcaggggcatcccctgcacacccaggcaaagcccaagccctctgcctcctcaaccaccccaggccctgcccatgagccagccttgctgaactctgccctctgtccagttctcctccagacacagtagacatagcccccagcctttcttgacccttaacccaaatgtccccaagcctggcctcaagaagccaaaggctgccgcaaacccaaatatttcaggtccgggtccctggtgcagaccctgccatgcggggatgtggcacagaaggccggccagcctggggagcagagaaggaggagaggagagctcctggccttgagcctgaatgcctgtggacacatatagggactcccagcacgcacgggatggattccaatcggcacacatgcacattccttgcacacacacaggcgcgaccgagggccttgcagacatagggtgcacacgtgcgtgccgcctgcatacagcatgcacttgcagagacggttggcaccttcccttctctggccccaaacctgggccctgaggctgtctgcacacctgggtgcttcccaccactgactctctcgtctgcctttgtccccgcaggtgacgcagctggaccagaggctggcactcatcaccgacatgcttcaccagctgctctccttgcacggtggcagcacccccggcagcggcggcccccccagagagggcggggcccacatcacccagccctgcggcagtggcggctccgtcgaccctgagctcttcctgcccagcaacaccctgcccacctacgagcagctgaccgtgcccaggaggggccccgatgaggggtcctgaggaggggatggggctgggggatgggcctgagtgagaggggaggccaagagtggccccacctggccctctctgaaggaggccacctcctaaaaggcccagagagaagagccccactctcagaggccccaataccccatggaccatgctgtctggcacagcctgcacttgggggctcagcaaggccacctcttcctggccggtgtgggggccccgtctcaggtctgagttgttaccccaagcgccctggcccccacatggtgatgttgacatcactggcatggtggttgggacccagtggcagggcacagggcctggcccatgtatggccaggaagtagcacaggctgagtgcaggcccaccctgcttggcccagggggcttcctgaggggagacagagcaacccctggaccccagcctcaaatccaggaccctgccaggcacaggcagggcaggaccagcccacgctgactacagggccaccggcaataaaagcccaggagcccatttggagggcctgggcctggctccctcactctcaggaaatgctgacccatgggcaggagactgtggagactgctcctgagcccccagcttccagcaggagggacagtctcaccatttccccagggcacgtggttgagtggggggaacgcccacttccctgggttagactgccagctcttcctagctggagaggagccctgcctctccgcccctgagcccactgtgcgtggggctcccgcctccaacccctcgcccagtcccagcagccagccaaacacacagaaggggactgccacctccccttgccagctgctgagccgcagagaagtgacggttcctacacaggacaggggttccttctgggcattacatcgcatagaaatcaataatttgtggtgatttggatctgtgttttaatgagtttcacagtgtgattttgattattaattgtgcaagcttttcctaataaacgtggagaatcacaggctgggctgggcactgctctcaccttggttcctggggcatccatggggtctctcacagacaggacccctgcagttcccctggaagcagtgcccaggtggctgtggaataggaacgctatgtccgtgtactgaggagtaggtcagggttcagaggggctgcaagatgccatcgaaggctctagcttaaggacgtcgctcctgttctgggccctggggctggccct

SEQ ID NO: 23885 - DNA, 9017 bp, Homo Sapiens
cccaggggctcaagccgcacgtgagaaagtctgggcatctgggattcggagagtatagcctgtgagccgctttcccctccttactgtcggttgcatcccttcgacactcccgaggccgtcgcgggccactggccctctgcagccatgaagacaaagcccgtttcccacaagaccgagaacacctaccggtttcttacatttgctgaacgactggggaatgttaatattgatattattcaccggattgatagaactgcaagctatgaggaggaggttgaaacctacttttttgagggtctgctgaaatggagagaattaaacctcacagaacacttcggaaaattttacaaagaagttattgacaaatgccaatcattcaatcagttggtgtatcaccaaaacgagatagttcagagtttgaagactcacctgcaagttaagaacagttttgcctatcaaccccttttggatttggttgtacagttggcacgagatctgcagatggatttctacccacactttccagagttttttttgactatcacctcgatcctggagactcaggacacagagttgttagaatgggctttcacctcgttatcatatctttataagtacctgtggagactgatggtgaaggacatgtccagtatatacagcatgtacagcacactcctggctcataaaaaactacatataagaaattttgctgctgaaagttttacttttttgatgagaaaggtctctgataaaaacgcacttttcaatttaatgtttcttgatcttgataaacatccagaaaaagttgaaggtgttggacagttgctctttgaaatgtgcaaaggagttagaaatatgtttcactcctgtacaggccaggcagtgaagctaattttgcgaaagctaggaccagtcactgaaacagaaactcaactaccatggatgttaattggagaaacactcaaaaacatggtcaaatccactgtatcctacatctccaaggaacattttggtacattttttgaatgtttgcaagaatcgctcttggatctacacacaaaagtaacaaaaactaactgttgtgaaagttctgaacagattaaaaggttgttggaaacataccttatacttgtaaaacatggaagtgggacaaagatacccacgcctgctgatgtctgtaaggtgttatctcaaacactgcaagtagccagtctctccacatcttgctgggagaccctcttggatgtaatttctgctttgatcctgggtgaaaatgtttccttgccggagaccctcatcaaagaaaccatagaaaaaatatttgagagcagatttgaaaaacgtttaattttcagtttttctgaagtcatgtttgccatgaagcagtttgagcagctttttctaccaagctttctgtcatatattgtgaattgcttcttaattgatgatgctgtagtcaaagatgaagctctggccattctggccaagctcattctgaacaaagcagcacctcccactgctggctcgatggcaattgaaaagtaccctctggttttctcaccgcagatggtgggattctatataaagcagaagaagactagatccaagggaagaaacgaacagtttccagtattggaccatcttttatctataattaagttacccccaaataaagatactacttacctttcacaatcttgggcagccctcgtggtgttacctcatattagacctcttgagaaagagaaggtgataccactcgtcaccggcttcatagaggcactcttcatgactgttgacaaaggaagctttgggaaaggaaacttatttgttctttgtcaagctgtaaatactctactaagtttggaagaatcttctgaacttcttcatttggttcctgtggaacgtgtgaagaatttagtattaacctttcccctggagccatctgtgttgctgttgactgatctctattatcagagattagccttgtgtggctgcaaagggccactttcccaggaggctttaatggaattatttcccaagttacaagcaaacatttcaactggtgtatccaagattcggcttttgacaataaggatcctaaaccattttgatgtccagcttccagaatcaatggaggatgatgggctctcagagcggcagtctgtctttgctatattacgccaggcagaacttgttccagcaactgtgaatgattatagagagaagcttcttcatttgagaaaactaagacatgatgtggtacagactgctgtccctgatgggccgttacaggaggtgccgcttcgttatttgttaggcatgctatatattaatttcagtgcactctgggatcctgttattgaactcataagttctcatgcacacgaaatggaaaataagcaattttggaaagtctactatgagcatctagaaaaagcagctacgcatgctgagaaggaactacagaatgatatgacagatgagaagtccgttggagatgaaagttgggagcagacccaggaaggagatgttggagctctttatcatgagcagttagcattgaaaactgactgtcaggaaagacttgaccacaccaacttcagattcctgctctggagagctctgaccaaattcccagaaagagtagagccacggtccagggagctttccccgcttttcttgagatttatcaacaatgagtattacccagcagatctgcaagttgctccaacccaggatctacggagaaaaggcaaagggatggtggcagaggaaatcgaagaggaacctgccgcaggagatgatgaagagttggaggaagaggcagtgccccaagatgaatcctcacagaagaaaaagacgaggagagctgcagcaaagcaattaattgctcatttgcaagttttctctaaattttcaaatccacgggccttatatctggaatccaaactatatgagttatatcttcagttgttgctacaccaagatcaaatggtgcaaaaaataaccttggattgcataatgacatataaacatcctcatgtcctcccttacagggaaaacttacaaaggttgcttgaagacagaagctttaaggaagagatagtgcattttagcatttcagaagataatgctgtagtgaaaacagcccaccgagcagatctatttcctattctgatgagaattttgtatgggcgaatgaagaataagactgggagtaaaactcaggggaaatctgcttcaggcacccgcatggccattgtcctgcggttcctggccgggacccaacctgaggagatccagatattcttagacctgctgtttgaacctgtgaggcatttcaagaatggagagtgccattctgcagtcattcaagcagtagaagacttggatttgtctaaagttcttcctttaggtcgtcagcacggtatcttaaacagccttgagatagtattgaaaaacattagtcatctgatcagcgcatacctgccgaagattttgcagatactgctctgtatgacagcaaccgtatcacacatccttgaccaacgagaaaagatacagctgagatttattaatccattgaaaaatttaagacgtcttggaatcaaaatggtaactgatatctttttggactgggaatcatatcagtttagaacagaagaaattgatgctgtgtttcatggtgcagtttggccccagatcagcaggcttggatctgagagtcaatattctcctactcctctgctgaaactgatcagtatctggagcagaaacgcaagatatttccctttgctggctaaacagaagcctgggcacccagaatgtgatatcctgaccaatgtttttgcaattctctcagcgaagaatctttctgatgccacagccagtattgtaatggacatagttgatgaccttcttaaccttccagatttcgagcctacagaaacagttttgaacttgctggtaactggatgtgtataccctggcatagcagaaaacatcggtgagtctatcacaataggaggaagattaattctacctcatgtacctgcaattcttcagtatctcagcaaaaccacaataagcgcagaaaaggtgaaaaagaaaaagaatagagcacaagtcagtaaagagcttggcattctttcaaagatcagcaagtttatgaaagacaaagaacaaagttctgtactcattacgcttctccttccattcctccaccgtggcaatattgctgaggatacagaggttgatattctggtgacagtacaaaacttgttaaagcattgtgtggaccctacaagcttcctcaagcctatagcaaaacttttctcagttattaagaacaaattgtcaagaaaattgctttgtacggtttttgagactctttctgattttgagagtgggttaaaatatattactgatgttgtcaagcttaacgccttcgatcaaagacatcttgatgatatcaacttcgacgttcgctttgagactttccagaccatcacctcttacattaaagaaatgcaaattgtggatgttaactacctaattccagttatgcataattgtttctataatctagagttaggagatatgagtttaagtgataatgccagcatgtgcctgatgagtatcatcaaaaagctacctgccttgaatgtcacagagaaagactatagagaaatcatccaccgttcactcctggagaaattgagaaaaggtctgaagagccagacagagagtattcagcaggattataccacaatactttcctgtttaattcaaacctttccaaaccaactggaattcaaagacttggtacaacttactcattaccatgacccagaaatggacttctttgagaacatgaagcacattcagatccacagaagagcaagagccttgaagaaacttgcaaaacaactaatggaaggcaaagttgttctgtcttctaaatctcttcagaattacatcatgccttatgccatgactccaatttttgatgagaaaatgctcaagcatgaaaatataaccactgctgccacagagattattggagccatttgcaaacatctctcttggtcagcgtatatgtattacttgaaacatttcattcatgtcttacaaacgggacagatcaatcaaaaactgggtgtcagtttgctagtaatagtgttagaagcattccactttgaccacaaaactcttgaagaacaaatgggaaaaattgagaatgaagaaaacgcaattgaagcaattgagttaccagagcctgaggccatggaattagagcgtgtggatgaggaagagaaggaatatacatgcaagagtttgtcagacaacggacaaccgggaacccctgatccagctgactctggaggaacatcagctaaagaatccgagtgtatcacaaagcctgtctctttccttcctcaaaacaaggaagaaatagagagaacaattaaaaatatccaaggaaccataaccggggatattctccccaggctacataaatgccttgcatctacgactaaaagggaagaagaacacaagcttgtcaagtcaaaggttgtgaatgatgaggaagtcgttcgagttccattagcttttgccatggttaaactaatgcagtcccttccacaagaagttatggaagctaatctgccaagtattttgctgaaagtgtgtgccctactcaagaacagagcccaagaaatcagagacattgcacgcagcactcttgcgaaaataatagaggatcttggtgtgcacttcctccaatatgttttaaaagaattacagactactcttgtccgtggataccaggtccatgtgctgactttcaccgttcacatgctgctgcaaggcctcaccaataagctgcaggtcggagatctggactcttgtttagatataatgattgagatttttaaccatgagttgtttggtgctgttgctgaagagaaggaagtaaagcagatcctctccaaagtcatggaagcacgaagaagcaaaagttacgactcttatgaaatcctcggcaagtttgtaggaaaagatcaggttacaaaactcatccttccattaaaagagatcttacaaaataccacgagtttgaaactggcccggaaagttcatgaaactttacgccgaatcacagtgggattaattgtaaatcaggaaatgacagctgaatccattctattactcagttatggtttgatcagtgaaaatcttcccctgttaacagagaaagaaaaaaatccagtagccccagcaccagatccacgtctaccaccccagagctgccttctgcttcccccaactccagttcgaggtggacagaaagctgttgtgagcaggaaaaccaacatgcacatatttattgagtccgggcttcggctgctgcatctgagtctgaagacttccaagatcaagtcttcaggtgaatgtgtcctggaaatgctggatccttttgtgtctctcctcatagactgcctgggctccatggatgtgaaggtgatcacaggtgctttacagtgcctcatctgggtcttgaggttcccgctaccttccatagaaacaaaagcagagcagctgacaaaacacctcttccttctgctgaaggactatgcaaagctcggggccgccaggggccagaacttccaccttgtggtcaattgtttcaagtgtgtgaccatacttgtcaagaaagtcaagtcttaccagataactgaaaaacagctccaagttctactggcctatgctgaggaggacatttatgatacttcaagacaagccactgcctttggtcttctgaaggcaattttatcaagaaagctgttggtcccagaaatcgatgaggtcatgcggaaagtatccaagttggcagtctctgcacaaagcgaacctgccagggtccagtgtagacaggtttttctgaaatatattcttgactatcccctgggtgacaaattgagaccaaacttggaattcatgctcgctcaactgaattacgaacatgagaccgggagagagtccaccttggaaatgatcgcctatctctttgacacgttccctcaggggctgctccatgagaactgcggaatgttctttatccctctttgtctaatgacgatcaatgatgactctgccacgtgcaaaaagatggcatccatgacaatcaagtccctacttggtaaaatcagcctcgagaaaaaagattggctgtttgatatggttaccacttggtttggagcaaaaaagcgcttaaatagacaacttgctgccctgatctgtggcttgtttgtggaaagtgaaggagttgattttgagaaaagacttggaactgtccttcctgtgattgaaaaggaaattgatcctgaaaactttaaagatatcatggaagaaactgaagaaaaagctgcagatcgccttctgtttagttttcttacactgataactaaacttatcaaggaatgtaatattattcagtttaccaaacccgctgagactttgagtaaaatctggagtcatgtgcattctcacctgagacatccacacaactgggtgtggctcacagcagcccagatttttggattactctttgcctcttgccagccagaggagcttattcaaaaatggaataccaaaaagaccaaaaaacacctcccagaacctgtagcaatcaagttcctagccagtgaccttgaccaaaagatgaaaagtatctctctcgcctcttgccatcaattgcattccaaattcttggatcagtctctaggagaacaggttgttaagaatttgttgttcgcagccaaagtcttgtatttactggaactttattgtgaggataagcaaagtaagataaaagaagacctggaagaacaagaagctttagaagatggtgtggcctgtgcagatgagaaggcggagtctgacggagaagagaaggaagaggtgaaggaagagctcggcaggccggccacgctgctgtggttgatccagaagctgtcccggattgcaaaactggaagctgcttattcgccgagaaaccccttaaagagaacatgcatctttaagttcctcggcgccgtagcaatggatcttgggatagacaaggtaaagccgtatctcccaatgatcatagctcctttgtttcgggaactcaacagcacctattcagagcaagatcctttgctgaagaatctatcccaggaaatcatagaattactcaaaaagctggttgggcttgagagcttctcattagcctttgcctctgtacagaaacaggctaatgagaaaagggcactccggaaaaagaggaaggccctggagtttgtaactaatcctgatattgctgccaagaaaaaaatgaagaaacacaaaaataaaagtgaagcaaagaagagaaagatagagttcctgcgtccaggatataaggccaagagacaaaaaagccatagcctgaaagatttagcaatggtggagtaatgtctccctgtgctgatacaagcatgaactttctggaatattctgctagtctgaaattacagcaggttgtctggggtagggggaggcgttttttttttgagacaaggtctcactctgtcacccaaggcggagtgcagtgacgacatcacagctcactgcagcctcaacctgggttcaagtgatcctctcacctcagcctcccaagtagttgtgcctcctaggcacacaacactatgcccggcaaattttttgtattttgtattttttgtagaaacaggatttcgccatgttggccaggctggtctcgaacacctgggctcaactgatccgcctgcctcggcctcccaaagtgctgggattataggtgtgagccaccctgctcaaccaggttttattatttaagttagttaaactttggatagattgtataatatatagtttaatgtaatcatgctcatattttttaaataaataaaacactatagtaaaaaaaaaaaaaaaaaaaaaaaaaaaaa

SEQ ID NO: 23886 - DNA, 1908 bp, Homo Sapiens
acaagatggaggattcggcctcggcctcgctgtcttctgcagccgctactggaacctccacctcgactccagcggccccgacagcacggaagcagctggataaagaacaggttagaaaggcagtggacgctctcttgacgcattgcaagtccaggaaaaacaattatgggttgcttttgaatgagaatgaaagtttatttttaatggtggtattatggaaaattccaagtaaagaactgagggtcagattgaccttgcctcatagtattcgatcagattcagaagatatctgtttatttacgaaggatgaacccaattcaactcctgaaaagacagaacagttttatagaaagcttttaaacaagcatggaattaaaaccgtttctcagattatctccctccaaactctaaagaaggaatataaatcctatgaagccaagctccgccttctgagcagttttgatttcttccttactgatgccagaattaggcggctcttaccctcactcattgggagacatttctatcaaagaaagaaagttccagtatctgtaaaccttctgtccaagaatttatcaagagagatcaatgactgtataggtggaacggtcttaaacatttctaaaagtggttcttgcagtgctatacgtattggtcacgttggaatgcaaattgagcacatcattgaaaacattgttgctgtcaccaaaggactttcagaaaaattgccagagaagtgggagagcgtgaaactcctgtttgtgaaaactgagaaatcggctgcacttcccatcttttcctcgtttgtcagcaattgggatgaagccaccaaaagatctttgcttaataagaagaaaaaagaggcaaggagaaaacgaagagaaagaaattttgaaaaacaaaaggagaggaagaagaagaggcagcaggctaggaagactgcatcagttcttagtaaagatgatgtggcacctgaaagtggtgatactacagtgaagaaacctgaatcaaagaaggaacagaccccagagcatgggaagaaaaaacgtggcagaggaaaagcccaagttaaagcaacaaatgaatccgaagacgaaatcccacagctggtaccaataggaaagaagactccagctaatgaaaaagtagagattcaaaaacatgccacaggaaagaagtctccagcaaagagtcctaatcccagcacacctcgtgggaagaaaagaaaggctttgccagcatctgagaccccaaaagctgcagagtctgagaccccagggaaaagcccagagaagaagccaaaaatcaaagaagaggcagtgaaggaaaaaagtccttcgctggggaaaaaagatgcgagacagactccaaaaaagccagaggccaagtttttcaccactcctagtaaatctgtgagaaaagcttcccacacccccaaaaaatggcccaaaaaacccaaataccccagtcgacctaaagtcagtgattcaactggaaggaaacctcaatgctgcctccagagctttttggaaatactcagatcctggccgcctttgtaaccttctctaaacgtcaggcctggacttaaaagattttttaaaacctccataagtagtccaggggcggtggctcacgcctgtaatcccagcactttgggaggccgaggcaggcggatcacaaggtcaacgagatcgagaccatcctggccaacatggtgaaaccctgtctgtaccaaaaatacaaaaattaattgggcatggtggtggacacctgtaatcccagctactagggaggctgaggcaggagaattgcttgaacctgggaggcggaggttgcagtgagccactgcactccagcctgatgacagagcaagactcagtcaaaaataaataaaaataataaaacctc

SEQ ID NO: 23887 - DNA, 4326 bp, Homo Sapiens
cggccccggcggtcgctccctggacccaacccgaggctgacccaggcccctgcccatgcggggcgcccctggctcggaagagtcccccgggccgggagcagctccaggcagcggccccggaggaagaggaagaagggacagtgctcagcttgggggacccggaccctcgccgcggcatttggagccgggggcagtcccgaactctgtgcttggcaccgccgctccgagtagggcagcgcctgccgggactctgacccggaccccctgcgcctcgtaggcggcggcgccgccgcgccaccctgttcttccgtgtctccctctgcctggcggcagtcacggccaagaacctacattaagaaacgcattcagatgcatcagccgtttgtaaagcacctgtcgtgagccagagagtattatgagggaggccgaggacttcatgctccggacagagaaacggcgctgggattagggattgccacttctgagaggatgctgggaatctgcagggggagacggaaattcttggctgcctcgttgagtcttctctgcatcccagccatcacctggatttacctgttttctgggagcttcgaagatggaaagcccgtgtctctgtcaccgctggagtcccaggcacacagccccaggtacacggcctccagccagcgggagcgcgagagcctggaggtgcgcatgcgcgaggtggaggaggagaaccgcgccctccgcaggcagctcagcctggcccagggccgagccccatcccatcgccgaggcaaccactccaagacctactccatggaggagggcactggagacagcgagaaccttcgggctggcatcgtggcaggcaacagctccgagtgtgggcagcagccggtcgtggagaaatgcgagacaatccacgttgctattgtctgcgctggatacaatgccagccgggatgtcgtcaccctggtcaaatccgtcctgttccatagacggaaccctctgcacttccaccttattgctgactccattgcggagcagatcctggccacgctcttccagacctggatggtgcccgctgtgcgtgtggacttctacaatgcagacgagctcaagtctgaagtttcctggatccccaataaacattactctgggatttatggtctgatgaagcttgtcctgaccaagactcttcctgccaacctggagagagtcatcgtccttgacacggatatcacctttgccactgacattgcagagctgtgggctgtgttccacaagttcaaaggtcagcaagtcctgggcttggtggagaaccagagtgactggtaccttggaaacctgtggaaaaatcaccgcccatggccagcccttggaagaggctacaacacaggggtgatcctgttacttctggataagctgcggaagatgaaatgggagcagatgtggaggctgaccgcagagagggagctcatgggcatgctctctacatccttagctgaccaggatattttcaatgccgtcatcaaacaaaaccccttccttgtgtaccagctcccctgcttctggaatgtgcagctgtcagaccacacccgctccgagcagtgctacagagacgtgtctgatctaaaggtcattcactggaactcccccaagaagctccgggtgaagaacaagcatgtggagttttttcgcaacctctacctgaccttcctggagtatgacggcaatcttctgaggcgggaactgtttggctgccccagtgaggctgatgtcaacagtgaaaacctccagaagcagctgtctgagctggacgaggacgacctgtgctatgagttccggcgagagcgcttcactgtccaccgcacccacctgtacttcctgcactacgagtatgagcctgcagcagacagcacggacgtcaccctggtcgctcagctgtccatggacaggctccagatgctggaggccatctgcaagcactgggaggggcccatcagcctggccctctacctgtcagacgccgaggcccagcagttcctccgctacgcacagggctctgaggtgcttatgagccgccacaacgtgggctaccacatcgtgtacaaggagggccagttctaccccgtgaacctgctgcgcaacgtggccatgaagcacatcagcactccctacatgttcctgtctgacattgacttcctgcccatgtatgggctctatgagtacctcaggaagtctgtcatccagctcgatcttgccaacaccaagaaagcaatgattgtccccgcgttcgagacactgcgctaccggctgtccttccccaagtcaaaagcggagttgctgtcaatgctggacatggggaccctcttcacattcaggtaccacgtctggacgaaaggccacgcacccacaaacttcgccaagtggcggaccgccaccacgccttaccgggttgagtgggaggccgattttgagccgtatgttgttgtgagacgtgactgcccggagtacgaccggaggtttgtaggctttggctggaacaaagtggctcatatcatggagctggatgtgcaggagtatgagttcattgtgctgcccaacgcctacatgatccacatgcctcatgcccccagcttcgacattaccaagttccgttccaacaagcaataccgcatctgtctcaaaaccctcaaggaagagtttcagcaggacatgtcccgccgctacggctttgctgccctgaaatatctcacagccgagaacaacagctagcaccaagaagcccaccactagggggagacatgctgtaggggaagtgccactcgctgtttggggcccggccttcaaattcaaaattgagccatgctttttcggtttgtttttatttatctctttggcccagccaagctgccctcactacagagaccttggacaaggatccagccagtccctctctgccccacaaccctgcattcccagaggttagctatgcagcccacctagatgagtctcttcaagaatgggaaatcaaggggtgacagggagtaaaagggttatcatcttactgcaaagccacaagatcagggcagggctttaggatgttctggatgctttttaataattatgcttcccatcataactggggagaaagggaagtcagggttctaggggttattcgtcccaggaaatagaagtgaaattgtctttattaagtgaaaactttcccctttgccctgcaatgtagctgggcattcaaacggagggcaaaccgatgatctaaaccaaccacttggaaaaacccaatggggacattgtaaccagagggtcctggaggtggggttgatgggtttccttatccccaaagtcactcctgttttgttttgtttttctttgggggttttgtttatttttggggctggcaatccaaaatagaaaatctgatcctttgaggctctaaaggaaaatcagctgcctctaccaaccaccctctatcagcagtggcccaggaaggaggtcaagcatcttcggccgatatttaaacatgggcagcttccttcaggatgatcaccgaggctcccgtgactttgaactccctactctccagaatccaggggctatagcgatggggactgcggaattacgagggctggctgttttacaccggtcacattttctattggcagtgactgattcatgggaaagggctttgaaggaactacttcagtgcacacacaaggtacgaacctctcaggcctttcgaagaactttcataattcatgaaagcccagttctgaagattcacgtatccatctggagacctacaggaagaaagtgattgggttcctctggttcttgcctgcttcactgtggatgggaagaggtgacaacctcagtctccctttgggacctgtccaagggtaggcaaccaccttcaccttcacacagattgaggagacactggactttttacccattttctttaatcttcaatattaatattgtgtttacattgatgagaacaagagttaatgccctaccctctgctgggctgtttgtattgagttgcaatgtgaccagcgaaagctgcatttaataaatgaaagtacagactgtttcttccccattcccctcccactcttgcaggaagctactgagacacaccttgacatagagagctaaattgcagtggataaacagcaacttcacactttctgttcccccattctatttttctcatcatttgaactttagccttttttttccccttttgcctgaagttagatcccactctgtctctaactcaaaccatcttcaagttttccattccgcatctttctc

SEQ ID NO: 23888 - DNA, 1772 bp, Homo Sapiens
cgctgagaggctgagtggagttcactcacatggattgaggcccagttcctgggagaagagatgctgggcaggaaggtgtctgcatgtgggactctgtacagcccggtcctctcccacatctgggaggggccagagtcagacaactgctgggttcgtccctaagagaggtcatctgactggctgttcagcctaggctgcacacacccccactttcctctaccaggccacaccggagcagtgctcacacaggcaatctaccaggccacaacaacgacacccacctcacctctggcacctctgagcatccacgtacttgcaagaactcttgctcacatcagctaagagattgcacctgctgacctagagattccggcctgtgctcctgtgctgctgagcagggcaaccagtagcaccatgtctgtgactggcggggaagatggcaccgtccctcacccaggagatcctcagccacctgggcctggccagcaagactgcagcgtgggggaccctgggcaccctcaggaccttcttgaacttcagcgtggacaaggatgcgcagaggctactgagggccattactggccaaggcgtggaccgcagtgccattgtggacgtgctgaccaaccggagcagagagcaaaggcagctcatctcacgaaacttccaggagcgcacccaacaggacctgatgaagtctctacaggcagcactttccggcaacctggagaggattgtgatggctctgctgcagcccacagcccagtttgacgcccaggaattgaggacagctctgaaggcctcagattctgctgtggacgtggccattgaaattcttgccactcgaaccccaccccagctgcaggagtgcctggcagtctacaaacacaatttccaggtggaggctgtggatggcatcacatctgagaccagtggcatcttgcaggacctgctgttggccctggccaaggggggccgtgacagctactctggaatcattgactataatctggcagaacaagatgtccaggcactgcagcgggcagaaggacctagcagagaggaaacatgggtcccagtcttcacccagcgaaatcctgaacacctcatccgagtgtttgatcagtaccagcggagcactgggcaagagctggaggaggctgtccagaaccgtttccatggagatgctcaggtggctctgctcggcctagcttcggtgatcaagaacacaccgctgtactttgctgacaaacttcatcaagccctccaggaaactgagcccaattaccaagtcctgattcgcatccttatctctcgatgtgagactgaccttctgagtatcagagctgagttcaggaagaaatttgggaagtccctctactcttctctccaggatgcagtgaaaggggattgccagtcagccctcctggccttgtgcagggctgaagacatgtgagacttccctgccccaccccacatgacatccgaggatctgagatttccgtgtttggctgaacctgggagaccagctgggcctccaagtaggataacccctcactgagcaccacattctctagcttcttgttgaggctggaactgtttctttaaaatcccttaattttcccatctcaaaattatatctgtacctgggtcatccagctccttcttgggtgtggggaaatgagttttctttgatagtttctgcctcactcatccctcctgtaccctggccagaacatctcactgatactcgaattcttttggcaaaaaaaaaa

SEQ ID NO: 23889 - DNA, 4208 bp, Homo Sapiens
gaattcggcacgaggagttgagagtgatccaggaaagtgaagcaggagatgcgggactgccccgggtggaagtgatcctcgactgctctgacaggcagaagacagaagggtgcaggcttcaggcaggaaaggagtgtgtggattctccagtggaaggagggcagtcagaagcacctccttctctggtatcctttgccgtctcatcagaaggcacagagcagggagaagatccacgctcggaaaaagatcacagcagacctcacaagcaccgagcgcggcatgcacggctcaggaggagtgaaagcctgtcagaaaaacaagtgaaggaagcaaaatctaaatgcaaaagcattgcccttcttctaacggatgctcccaaccccaactccaagggggtgttgatgtttaagaagcgacgtcggagggccaggaaatacaccctagttagctacggtactggcgagcttgagcgagaggcggacgaggaggaagaaggtgacaaggaggatacatgtgaagtagcatttcttggtgcaagcgaatcagaggtggatgaagagttattgtctgacgttgacgacaacacacaagttgtgaactttgactgggattctggactggtggacattgaaaagaaactgaacagaggggacaagatggagatgttaccagacaccacaggcaagggagccctcatgtttgccaagaggagggagagaatggatcagatcacagcccaaaaagaagaggacaaggtaggtggaacgccaagcagagaacaagatgctgcccagaccgatggcctgagaaccacgacttcttaccaaagaaaggaggaagagtcggtaagaacgcagagctctgtgagcaaaagctacatcgaggtgagtcatggtcttggccatgttccccaacagaatggcttcagtggggcatctgagacagcaaacatccagaggatggtccccatgaatagaacggccaaacccttcccagggtctgtgaatcagccagctacccccttctcgccaacccgaaacatgacgagtcccattgctgactttcctgcacctccaccttactctgcagtcactcctccccctgacgccttctccagaggggtttcaagtccgattgctggcccagcacagccccctccatggccccagcctgccccgtggtcccagccagccttttacgattcgtctgagcgaatagcttcccgagatgagaggatctcagtgccagcaaaaagaacaggaatattgcaggaggccaaaaggagaagcacgacaaaacccatgtttacttttaaagagcccaaagtaagcccaaatcctgaactcttgtcactccttcaaaattcagaaggcaaacggggcactggagctggaggtgattccggaccggaagaagactacctcagcttgggggcagaggcttgtaatttcatgcaaagctcctctgccaaacaaaagacccctcctcctgttgctccaaaacctgcagtcaagtcctcatcctcccaaccagtaactccagtttccccagtctggtctccaggagtggctcccacccaacctcctgccttccccacatccaacccatcaaagggcaccgttgtctcctccatcaaaatagcccagccttcttaccctcctgcccggcctgcaagtactttgaacgtggctggtcccttcaaaggaccacaagcagcagtagccagtcagaattacacacccaaaccaacagtttccacaccaacagtcaatgctgttcagcctggtgcagtgggaccatccaatgagcttccaggaatgagtgggagaggagctcagctctttgctaaaaggcagtcgagaatggagaagtatgtggtcgattcagacacggtgcaggcccacgctgctcgagctcagtctcccactccatctctcccggccagttggaagtactcctccaatgtccgagcacctcctcctgtggcctataatcctatccactcgccgtcttacccactggctgctctcaagtctcagccatcagctgcacagccctccaaaatgggcaagaaaaagggaaagaaacccctcaatgcattagatgtcatgaagcaccaaccgtatcagctcaatgcatccttgtttactttccaacctccagatgcaaaggatggcctcccccagaagtcatcagtcaaggtcaattcagccctggccatgaagcaagctcttcctccccggccagtgaatgctgcctcacctacgaatgtgcaggcttcgtcagtgtactcggtaccagcctatacctctcctccttccttctttgcagaggcctcctcaccagtcagtgcatccccagtgcctgtgggcattcccacctcgccaaagcaagaatcagcctcatcatcttattttgtggcaccaaggccaaagttctcagccaagaaaagtggtgtcacaattcaggtgtggaaaccatctgttgtggaagagtaatcttgtagctgaagctgagtgtccactttgcttgaaatgaattgtttgcagtgtttcttgagtccctgagaatgcctagcaaagtcctcaacttacttaatttcagatatgtcacctcctaatctgggtccaaggagtataatatttttaatgagtcaaaaatccaactcagattgacctaaaatatatttatcttctttgcacacttaaaaaatccaggagcaccccaaaatagacatgtaccgttatattaagtaagcaggagacttaggatttgtgctgtagccacaagaaagacagtgatcagtgatatcaaacatcaggaatcagcctttatgtaacataacagctgtcctcctatggtgaaaggttcaaatgtagtgaaggtataacctatattgactgagatttcccttttaggtagtgccttatctctattactagtgttaaaggaataaggaatctatgaaggacagggagcagctctggtctgtcaatctcagccacctgtttgatatcacagagaagatactcggaggattgttggaatgtatatagtttagtaagaagtgggtaagaaagagggtcttaattactgagcacttattatgtattaggttctttgccagatgtttttacatatataaactcatttcagaaaacttatttaaagtaaatggggccgggtatggtggttcatgcctggaatcctagcactttgggaggctgaggtaggaggactgcttgaggccgggagttggagaccagcctgagcaacatagtgagaccctgtctcaataataataataataataataatagtaataatgaagtaaatgggataaggaaagaaggataattatctttaaaggttgattcccaccctccctccccagttacttaaggaactaagtgagtacatctccagttgcccatgaaagcataagtttgttttcctcagctgaggcaagtggtagagtatacaggataacgaagtaacatgtaaaaggcaggacgcacataaaggtgtacatggctattgtttcacctggagaaaccacatgattgggacctgaaggtttactgactgactacaggggctgattgtgaagcacgaggaaccccatgtgtgtggagactgtagggtgagagcacacaattattagcatcatttctgagtgatctcacagattttttttcttgtgtttgttttgctttttgacaactgcttctcccacgttccttgcaattctattctctcaccttcactttactatttgtattcgatggaccaggataattcaggcaaggttaccttgtaaacttgaattggccacacaccatgttgtcacccagctggctatgaagtgaataatggtactgaaagtaaacctgaagacctttctcagatctattttaagtctgagtctgaccaaccatggaaaatattcgacatgaattaatgtagagaactataaagcatttatgacagctccaagaaaagtcatctactctatgcaggagatatgtttagagacctctcagaaaaacttgcctggtttgagggtacacagtaccattttaatcttctgaaaatatctgtattcctgctctttttctgctgtcactgtcaatctgctatatttttcactatcctattaaaatattactgtctcctttaaaaaaaaaaaaaaaaaaaaaaaaaaaaaa

SEQ ID NO: 23890 - DNA, 1956 bp, Homo Sapiens
ctgaacaggaagcagttcgctcgcgcctaggttggcgcgggctgggaggtgttccagccctttaagatgttgcgcgtggtgagctggaacatcaatgggattcggagacccctgcaaggggtggcaaatcaggaacccagcaactgtgccgccgtggccgtggggcgcattttggacgagctggatgcggatatcgtctgtctccaggaaaccaaagtgaccagggatgcactgacagagcccctggctatcgttgagggttataactcctatttcagcttcagccgcaaccgtagcggctattctggtgtagccaccttctgtaaggacaatgctaccccagtggctgctgaagaaggcctgagtggcctgtttgccacccagaatggggatgttggttgctatggaaacatggatgagtttacccaagaggaactccgggctctggatagtgagggcagggccctcctcacacagcataagatccgcacatgggaaggtaaggagaagaccttgaccctaatcaacgtgtactgcccccatgcggaccctgggaggcctgagcggctagtctttaagatgcgcttctatcgtttgctgcaaatccgagcagaagccctcctggcggcaggcagccatgtgatcattctgggtgacctgaatacagcccaccgccccattgaccactgggatgcagtcaacctggaatgctttgaagaggacccagggcgcaagtggatggacagcttgctcagtaacttggggtgccagtctgcctctcatgtagggcccttcatcgatagctaccgctgcttccaaccaaagcaggagggggccttcacctgctggtcagcagtcactggcgcccgccatctcaactatggctcccggcttgactatgtgctgggggacaggaccctggtcatagacacctttcaggcctctttcctgctgcctgaggtgatgggctctgaccactgccctgtgggtgcagtcttgagtgtgtcctctgtgcctgcaaaacagtgcccacctctgtgcacccgcttcctccctgagtttgcaggcacccagctcaagatccttcgcttcctagttcctctcgaacaaagtcctgtgttggagcagtcgacgctgcagcacaacaatcaaacccgggtacagacatgccaaaacaaagcccaagtgcgctcaaccaggcctcagcccagtcaggttggctctagcagaggccagaaaaacctgaagagctactttcagccctcccctagctgtccccaagcctctcctgacatagagctgcctagcctaccactgatgagcgccctcatgaccccgaagactccagaagagaaggcagtggccaaagtggtgaaggggcaggccaagacttcagaagccaaagatgagaaggagttacggacctcattctggaagtctgtgctggcggggcccttgcgcacacccctctgtgggggccacagggagccatgtgtgatgcgtactgtgaagaagccaggacccaacttgggccgccgcttctacatgtgtgccaggccccggggtcctcccactgacccctcctcccggtgcaacttcttcctctggagcaggcccagctgaaccaatggaggcctggggacatctggcatggtcacccctgcacatgatctgaggccagctccccttccctgagctgcctcctgcttctccctcaaagtctcctacccttctcttcctcttttaagccctctcttcctcgctttccttcctacctagctccttgttggtgagcttcttgtgccttaatcctgtgacccagccccttacaccactttccaccttcctgtccgaagtacacggacactagctgccccaggaagttgtgtgattttaaatcacttctgtctttgctggaaagtgtatttgtgcataaataaagtctgtgtatttgtt

SEQ ID NO: 23891 - DNA, 2695 bp, Homo Sapiens
acgcggccggctaccgagccctttgtgagggctgtgagctgcgcctgacggtggcaccatgagcagctcaggtggggcgcccggggcgtccgccagctctgcgccgcccgcgcaggaagagggcatgacgtggtggtaccgctggctgtgtcgcctgtctggggtgctgggggcagtctcttgcgcgatctctggcctcttcaactgcatcaccatccaccctctgaacatcgcggccggcgtgtggatgatcatgaatgccttcatcttgttgctgtgtgaggcgcccttctgctgccagttcatcgagtttgcaaacacagtggcggagaaggtggaccggctgcgctcctggcagaaggctgtcttctactgcgggatggcggtcgttcccatcgtcatcagcctgaccctgaccacgctgctgggcaacgccatcgcctttgctacgggggtgctgtacggactctctgctctgggcaaaaagggcgatgcgatctcctatgccaggatccagcagcagaggcagcaggcggatgaggagaagctcgcggagaccctggagggggagctgtgaagggctgggcgcccctccctccctgtcccctcttctggctctgtgtgggtccaagtgaggcctggactgtccacgctgaggcacagcctggagaggggcctttgcacgtgtccctacacctggagtcctctgctcctttctccagactggcttaagccaggagccactggctgctggtgtgagggtctgggctgctggacttgaggcagagcctgcagcagctgtgtggacactacccagccctactcctctgctgggtgggtctgcagatctcacaccacagacagggctgcctgtgacctgctgtgacctgggagcagcttcccctggagatgctggtcctggcttgaggggaggggcaagtgggaccctgccacctgggcactgagcagagggacctcccccagctctcttagcaggtggagccccagggcctgggacagcctgccgctgccagcaacctcccactgctgcctagggtgcagcgcccactgtcaccctgccttctgaagaagcccacagggctcctaaggtgcaccccggtacctggaactgcagccttggcagtgactggacagctgggtgggggatgctccctgctggccctgggaaccttggacaggccacctcaaggcccctcggctgcccctcctccctgggcctgctggggcccctaggttctgcccatcaccccccgcccctgctggccttggtgctaaggaagtggggagagcaggctctccctggcaccgagggtgcccaccctctccctggtgtggccccgtcaacatcagccacagcccagccccattagtgggttagcgggtctgacctcagccccactcaggtgctcctgctggcctgcccaagccctgccctcagggagcttctgccttttaagaactgggcagaggccacagtcacctccccacacagagctgtccccactgccctgggtgccaggctgtccggagccaggcctacccagggaggatgcagagagctggtgcccaggatgtgcacccccatattccctctgccctgtggcctcagcccgctggcctctctgaccgtgaggctggctctcagccatcgggcaggtgcctggtcgggcctggcttagcccaggtggggcttggcagaagcgggcgggtgtggaagatattccatctggggccaaccccaggctgggcctgcgctgagcttctggagcgcaggtactgggtcttgctaagtgaactgtttcccaggaacacctctcgggcccatctgcgtctgaggctgggagtggcatctgaggccgggagtggcatctgaggccaggagtggcaggctggtgggctgggcgtggggttttctgggccctgcccagtactgccctggggacttggtgggctcctgggtcagcagcatcccacccctgggagtctggccagctgagccccagggtggcaggggcattatagcctggtggacatgtgccttcagggttcctccggggccaccttcctcaggccagtgctgggttcaaagggctgtgtgtgtgtgtgtgtgtgtgtgtgtatgtatatgtgtgtgggtgcacacatctgtcccatgtatgcagtgagacctgtctacctcccacaaggagcaagggctctgcccgccctctgctcattcctacccaggtagtgggaccccgggcccccttctgcctggcttgcctgcttctgccctttccagaggggtctcactgacagccagagacagcaggagaagggttggctgtggatcaaggaaggctgcccctgtaccctgtggggaaatggtgggtgcatggctggatgcagaggtggaaggccctgggccacaggcgagagtgggcgtgtcacctgtcccaggttcccagcaagtctgcagctgtgcagtcctggggtccctgaccctgtcgcccagggggcgtgctgtccagcaggggccctgccttgcaaggaacgtctcttccggcggctgggccgctcctgcctggtctgggctgtgtgtggcgccctttccttcttgtttgttcctctgtgttctgtgtgcgtcttaagcaataaagcgtggccgtggctcgcgaaaaaaaaaaaaaaaaaa

SEQ ID NO: 23892 - DNA, 3863 bp, Homo Sapiens
atgcctgctctgggcccagctcttctccaggctctctgggccgggtgggtcctcaccctccagccccttccaccaactgcattcactcccaatggcacgtatctgcagcacctggcaagggaccccacctcaggcaccctctacctgggggctaccaacttcctgttccagctgagccctgggctgcagctggaggccacagtgtccaccggccctgtgctagacagcagggactgcctgccacctgtgatgcctgatgagtgcccccaggcccagcctaccaacaacccgaatcagctgctcctggtgagcccaggggccctggtggtatgcgggagcgtgcaccagggggtctgtgaacagcggcgcctggggcagctcgagcagctgctgctgcggccagagcggcctggggacacacaatatgtggctgccaatgatcctgcggtcagcacggtggggctggtagcccagggcttggcaggggagcccctcctgtttgtggggcgaggatacaccagcaggggtgtggggggtggcattccacccatcacaacccgggccctgtggccgcccgacccccaagctgccttctcctatgaggagacagccaagctggcagtgggccgcctctccgagtacagccaccacttcgtgagtgcctttgcacgtggggccagcgcctacttcctgttcctgcggcgggacctgcaggctcagtctagagcttttcgtgcctatgtatctcgagtgtgtctccgggaccagcactactactcctatgtggagttgcctctggcctgcgaaggtggccgctacgggctgatccaggctgcagctgtggccacgtccagggaggtggcgcatggggaggtgctctttgcagctttctcctcggctgcaccccccactgtgggccggcccccatcggcggctgctggggcatctggagcctctgccctctgtgccttccccctggatgaggtggaccggcttgctaatcgcacgcgagatgcctgctacacccgggagggtcgtgctgaggatgggaccgaggtggcctacatcgagtatgatgtcaattctgactgtgcacagctgccagtggacaccctggatgcttatccctgtggctcagaccacacgcccagccccatggccagccgggtcccgctggaagccacaccaattctggagtggccagggattcagctaacagctgtggcagtcaccatggaagatggacacaccatcgctttcctgggtgatagtcaagggcagctgcacagggtctacttgggcccagggagcgatggccacccatactccacacagagcatccagcaggggtctgcagtgagcagagacctcacctttgatgggacctttgagcacctgtatgtcatgacccagagcacacttctgaaggttcctgtggcttcctgtgctcagcacctggactgtgcatcttgccttgctcacagggacccatactgtgggtggtgcgtgctccttggcaggtgcagtcgccgttctgagtgctcgaggggccagggcccagagcagtggctatggagcttccagcctgagctgggctgtctgcaagtggcagccatgagtcctgccaacatcagccgagaggagacgagggaggttttcctatcagtgccagacctgccacccctgtggccaggggagtcatattcctgccactttggggaacatcagagtcctgccctgctgactggttctggtgtgatgtgcccctccccagaccctagtgaggccccagtgctgccgagaggagccgactacgtatccgtgagcgtggagctcagatttggcgctgttgtgatcgccaaaacttccctctctttctatgactgtgtggcggtcactgaactccgcccatctgcgcagtgccaggcctgtgtgagcagccgctgggggtgtaactggtgtgtctggcagcacctgtgcacccacaaggcctcgtgtgatgctgggcccatggttgcaagccatcaggtgatggagactcagcagagcttgagggccctcccgcccccctcatcctcccgtccagcctcgactaccagtatgacacccccgggctctgggagctggaagaggcgaccttgggggcaagctcctgcccctgtgtggagagcgttcagggctccacgttgatgccggtccatgtggagcgggaaatccggctgctaggcaggaacctgcaccttttccaggatggcccaggagacaatgagtgtgtgatggagctggagggcctcgaggtggtggttgaggcccgggtcgagtgtgagccacctccagatacccagtgccatgtcacctgccagcagcaccagctcagctatgaggctctgcagccggagctccgtgtggggctgtttctgcgtcgggccggccgtctgcgtgtggacagtgctgaggggctgcatgtggtactgtatgactgttccgtgggacatggagactgcagccgctgccaaactgccatgccccagtatggctgtgtgtggtgtgagggggagcgtccacgttgtgtgacccgggaggcctgtggtgaggctgaggctgtggccacccagtgcccagcgcccctcatccactcggtggagccactgactgggcctgtagacggaggcacccgtgtcaccatcaggggctccaacctgggccagcatgtgcaggatgtgctgggcatggtcacggtggctggagtgccctgtgctgtggatgcccaggagtacgaggtctccagcagcctcgtgtgcatcaccggggccagtggggaggaggtggccggcgccacagcggtggaggtgccgggaagaggacgtggtgtctcagaacacgactttgcctaccaggatccgaaggtccattccatcttcccggcccgcggccccagagctgggggcacccgtctcaccctgaatggctccaagctcctgactgggcggctggaggacatccgagtggtggttggagaccagccttgtcacttgctgccggagcagcagtcagaacaactgcggtgtgagaccagcccacgccccacgcctgccacgctccctgtggctgtgtggtttggggccacggagcggaggcttcaacgcggacagttcaagtataccttggaccccaacatcacctctgctggccccaccaagagcttcctcagtggaggacgtgagatatgcgtccgtggccagaatctggacgtggtacagacgccaagaatccgggtgaccgtggtctcgagaatgctgcagcccagccaggggcttggacggaggcgtcgcgtggtcccggagacggcatgttcccttggaccctcctgcagtagccagcaatttgaggagccgtgccatgtcaactcctcccagctcatcacgtgccgcacacctgccctcccaggcctgcctgaggacccctgggtccgggtggaatttatccttgacaacctggtctttgactttgcaacactgaaccccacacctttctcctatgaggccgaccccaccctgcagccactcaaccctgaggaccccaccatgccattccggcacaagcctgggagtgtgttctccgtggagggggagaacctggaccttgcaatgtccaaggaggaggtggtggctatgataggggatggcccctgtgtggtgaagacgctgacgcggcaccacctgtactgcgagccccccgtggagcagcccctgccacggcaccatgccctccgagaggcacctgactctttgcctgagttcacggtgcagatggggaacttgcgcttctccctgggtcacgtgcagtatgacggcgagagccct

SEQ ID NO: 23893 - DNA, 5859 bp, Homo Sapiens
atgcctgctctgggcccagctcttctccaggctctctgggccgggtgggtcctcaccctccagccccttccaccaactgcattcactcccaatggcacgtatctgcagcacctggcaagggaccccacctcaggcaccctctacctgggggctaccaacttcctgttccagctgagccctgggctgcagctggaggccacagtgtccaccggccctgtgctagacagcagggactgcctgccacctgtgatgcctgatgagtgcccccaggcccagcctaccaacaacccgaatcagctgctcctggtgagcccaggggccctggtggtatgcgggagcgtgcaccagggggtctgtgaacagcggcgcctggggcagctcgagcagctgctgctgcggccagagcggcctggggacacacaatatgtggctgccaatgatcctgcggtcagcacggtggggctggtagcccagggcttggcaggggagcccctcctgtttgtggggcgaggatacaccagcaggggtgtggggggtggcattccacccatcacaacccgggccctgtggccgcccgacccccaagctgccttctcctatgaggagacagccaagctggcagtgggccgcctctccgagtacagccaccacttcgtgagtgcctttgcacgtggggccagcgcctacttcctgttcctgcggcgggacctgcaggctcagtctagagcttttcgtgcctatgtatctcgagtgtgtctccgggaccagcactactactcctatgtggagttgcctctggcctgcgaaggtggccgctacgggctgatccaggctgcagctgtggccacgtccagggaggtggcgcatggggaggtgctctttgcagctttctcctcggctgcaccccccactgtgggccggcccccatcggcggctgctggggcatctggagcctctgccctctgtgccttccccctggatgaggtggaccggcttgctaatcgcacgcgagatgcctgctacacccgggagggtcgtgctgaggatgggaccgaggtggcctacatcgagtatgatgtcaattctgactgtgcacagctgccagtggacaccctggatgcttatccctgtggctcagaccacacgcccagccccatggccagccgggtcccgctggaagccacaccaattctggagtggccagggattcagctaacagctgtggcagtcaccatggaagatggacacaccatcgctttcctgggtgatagtcaagggcagctgcacagggtctacttgggcccagggagcgatggccacccatactccacacagagcatccagcaggggtctgcagtgagcagagacctcacctttgatgggacctttgagcacctgtatgtcatgacccagagcacacttctgaaggttcctgtggcttcctgtgctcagcacctggactgtgcatcttgccttgctcacagggacccatactgtgggtggtgcgtgctccttggcaggtgcagtcgccgttctgagtgctcgaggggccagggcccagagcagtggctatggagcttccagcctgagctgggctgtctgcaagtggcagccatgagtcctgccaacatcagccgagaggagacgagggaggttttcctatcagtgccagacctgccacccctgtggccaggggagtcatattcctgccactttggggaacatcagagtcctgccctgctgactggttctggtgtgatgtgcccctccccagaccctagtgaggccccagtgctgccgagaggagccgactacgtatccgtgagcgtggagctcagatttggcgctgttgtgatcgccaaaacttccctctctttctatgactgtgtggcggtcactgaactccgcccatctgcgcagtgccaggcctgtgtgagcagccgctgggggtgtaactggtgtgtctggcagcacctgtgcacccacaaggcctcgtgtgatgctgggcccatggttgcaagccatcagagcccgcttgtctccccagaccctcctgcaagaggtgatggagactcagcagagcttgagggccctcccgcccccctcatcctcccgtccagcctcgactaccagtatgacacccccgggctctgggagctggaagaggcgaccttgggggcaagctcctgcccctgtgtggagagcgttcagggctccacgttgatgccggtccatgtggagcgggaaatccggctgctaggcaggaacctgcaccttttccaggatggcccaggagacaatgagtgtgtgatggagctggagggcctcgaggtggtggttgaggcccgggtcgagtgtgagccacctccagatacccagtgccatgtcacctgccagcagcaccagctcagctatgaggctctgcagccggagctccgtgtggggctgtttctgcgtcgggccggccgtctgcgtgtggacagtgctgaggggctgcatgtggtactgtatgactgttccgtgggacatggagactgcagccgctgccaaactgccatgccccagtatggctgtgtgtggtgtgagggggagcgtccacgttgtgtgacccgggaggcctgtggtgaggctgaggctgtggccacccagtgcccagcgcccctcatccactcggtggagccactgactgggcctgtagacggaggcacccgtgtcaccatcaggggctccaacctgggccagcatgtgcaggatgtgctgggcatggtcacggtggctggagtgccctgtgctgtggatgcccaggagtacgaggtctccagcagcctcgtgtgcatcaccggggccagtggggaggaggtggccggcgccacagcggtggaggtgccgggaagaggacgtggtgtctcagaacacgactttgcctaccaggatccgaaggtccattccatcttcccggcccgcggccccagagctgggggcacccgtctcaccctgaatggctccaagctcctgactgggcggctggaggacatccgagtggtggttggagaccagccttgtcacttgctgccggagcagcagtcagaacaactgcggtgtgagaccagcccacgccccacgcctgccacgctccctgtggctgtgtggtttggggccacggagcggaggcttcaacgcggacagttcaagtataccttggaccccaacatcacctctgctggccccaccaagagcttcctcagtggaggacgtgagatatgcgtccgtggccagaatctggacgtggtacagacgccaagaatccgggtgaccgtggtctcgagaatgctgcagcccagccaggggcttggacggaggcgtcgcgtggtcccggagacggcatgttcccttggaccctcctgcagtagccagcaatttgaggagccgtgccatgtcaactcctcccagctcatcacgtgccgcacacctgccctcccaggcctgcctgaggacccctgggtccgggtggaatttatccttgacaacctggtctttgactttgcaacactgaaccccacacctttctcctatgaggccgaccccaccctgcagccactcaaccctgaggaccccaccatgccattccggcacaagcctgggagtgtgttctccgtggagggggagaacctggaccttgcaatgtccaaggaggaggtggtggctatgataggggatggcccctgtgtggtgaagacgctgacgcggcaccacctgtactgcgagccccccgtggagcagcccctgccacggcaccatgccctccgagaggcacctgactctttgcctgagttcacggtgcagatggggaacttgcgcttctccctgggtcacgtgcagtatgacggcgagagccctggggcttttcctgtggcagcccaggtgggcttgggggtgggcacctctcttctggctctgggtgtcatcatcattgtcctcatgtacaggaggaagagcaagcaggccctgagggactataagaaggttcagatccagctggagaatctggagagcagtgtgcgggaccgctgcaagaaggaattcacagacctcatgactgagatgaccgatctcaccagtgacctcctgggcagcggcatccccttcctcgactacaaggtgtatgcggagaggatcttcttccctgggcaccgcgagtcgcccttgcaccgggacctgggtgtgcctgagagcagacggcccactgtggagcaagggctggggcagctctctaacctgctcaacagcaagctcttcctcaccaagttcatccacacgctggagagccagcgcaccttttcagctcgggaccgtgcctacgtggcatctctgctcaccgtggcactgcatgggaagcttgagtatttcactgacatcctccgcactctgctcagtgacctggttgcccagtatgtggccaagaaccccaagctgatgctgcgcaggacagagactgtggtggagaagctgctcaccaactggatgtccatctgtctgtataccttcgtgagggactccgtaggggagcctctgtacatgctctttcgagggattaagcaccaagtggataaggggccagtggacagtgtgacaggcaaggccaaatacaccttgaacgacaaccgcctgctcagagaggatgtggagtaccgtcccctgaccttgaatgcactattggctgtggggcctggggcaggagaggcccagggcgtgcccgtgaaggtcctagactgtgacaccatctcccaggcaaaggagaagatgctggaccagctttataaaggagtgcctctcacccagcggccagaccctcgcacccttgatgttgagtggcggtctggggtggccgggcacctcattctttctgacgaggatgtcacttctgaggtccagggtctgtggaggcgcctgaacacactgcagcattacaaggtcccagatggagcaactgtggccctcgtcccctgcctcaccaagcatgtgctccgggaaaaccaggattatgtccctggagagcggaccccaatgctggaggatgtagatgaggggggcatccggccctggcacctggtgaagccaagtgatgagccggagccgcccaggcctcggaggggcagccttcggggcggggagcgtgagcgcgccaaggccatccctgagatctacctgacccgcctgctgtccatgaagggcaccctgcagaagttcgtggatgacctgttccaggtgattctcagcaccagccgccccgtgccgctcgctgtgaagtacttctttgacctgctggatgagcaggcccagcagcatggcatctccgaccaggacaccatccacatctggaagaccaacagcttgcctctgaggttctggatcaatataataaaaaacccgcagtttgtgttcgacgtgcaaacatctgataacatggatgcggtgctccttgtcattgcacagaccttcatggacgcctgcaccctggccgaccacaagctgggccgggactccccgatcaacaaacttctgtatgcacgggacattccccggtacaagcggatggtggaaaggtactatgcagacatcagacagactgtcccagccagcgaccaagagatgaactctgtcctggctgaactgtcctggaactactccggagacctcggggcgcgagtggccctgcatgaactctacaagtacatcaacaagtactatgaccagatcatcactgccctggaggaggatggcacggcccagaagatgcagctgggctatcggctccagcagattgcagctgctgtggaaaacaaggtcacagatctatag

SEQ ID NO: 23894 - DNA, 4560 bp, Homo Sapiens
ggcggaggctccgggacggcgagcggcgggcggcggaggaggagacggcaggtcgggcattaaaaaatatttaatcattcatgtgttgagactcattcttgagttatggatgacaaggcttctgttggaaaaatcagtgtctcttcagactcagtatctactcttaatagtgaagattttgtcttggtttccaggcaaggagatgagacaccatctacaaataatggaagtgatgatgagaaaacaggactcaagattgtagggaatggaagtgaacagcagctgcaaaaagagctagcagatgtactgatggatcctccaatggacgaccagccaggggaaaaggagcttgtgaaaaggtcacaactggatggtgaaggagatgggcctctttctaatcagctctccgcttcatccaccattaaccctgtgccattagtagggctccaaaaaccagagatgagcctaccagtgaaacctggacaaggagattctgaagcttcaagtcctttcacaccagtggccgatgaggacagcgtagttttcagtaaactgacttacttaggctgtgcctcggtaaatgctcccaggagtgaagtggaagccttaaggatgatgtccatcttaagaagccagtgtcagatttcactagatgttaccctttcagtgccgaatgtgtctgaaggaattgtgagactcttagatcctcagacaaacactgaaatagcaaactaccctatctacaaaatcctcttctgtgtcagagggcatgatggaactcctgagagtgactgttttgctttcactgaaagtcattacaatgcagagctcttcagaatacacgtcttccggtgtgaaatacaagaagctgtaagccggatactttacagttttgccactgccttccgccgttctgccaagcagaccccactttcagccactgctgcaccccagactcctgacagtgacatctttaccttctctgtgtctttagaaataaaagaagatgatggtaaaggttattttagtgcagttcccaaagataaggacagacagtgctttaaactacgccaaggaattgataagaagattgtcatctatgtgcagcaaacaactaataaagaacttgccattgaaaggtgttttggtcttctccttagtccaggaaaagatgtacgaaatagtgacatgcacttattagatttggaatctatgggcaaaagttcagatggaaagtcgtatgttattacggggagctggaatccaaaatccccacattttcaagttgtaaatgaagaaactcctaaagataaagtcctgtttatgaccacagctgtagatttggtaataacagaagtacaggagcctgttcgatttctcctggagacaaaagtccgcgtttgctcacctaatgaaagattattctggcccttcagcaaacgtagtactactgaaaatttctttttgaaactaaaacagataaagcaaagggagagaaagaataatactgacactttatatgaagttgtatgcttggaaagtgaatcagaaagagagaggaggaaaactacagccagtccttcagttcgcctgccacagtctggatcgcaaagttcagtgataccttctcctccagaagatgatgaagaggaagataatgatgaacctctcctgagtggatctggtgatgtatccaaagaatgtgcagaaaaaattcttgaaacatggggagaactgttgtcaaaatggcatctcaacttgaatgtgagaccgaagcagttgtcatccttagtaagaaacggtgtccctgaagctcttcgaggagaagtctggcagctgctagcaggctgtcataacaatgaccacctggtagagaaataccgcattcttatcacaaaggagtctccccaggacagtgctatcacccgggatattaaccgaacattcccagcccatgactactttaaggacacaggaggagatggacaagattccttatataaaatatgcaaggcttattctgtgtatgatgaagagattggttattgccagggccagtcatttcttgctgctgtgctccttctccatatgcctgaagaacaggcattcagtgttctggtcaagatcatgtttgactatgggctcagggaacttttcaagcaaaacttcgaagatttgcattgcaaattttaccagttggagcgcctcatgcaggaatacattcctgacctgtacaaccacttcctggatataagccttgaagcacacatgtatgcctcccagtggtttcttactcttttcactgcaaaattccctctctacatggtcttccatatcatcgacctgcttttatgtgagggaataagtgttatttttaatgtcgcccttggattattaaagacttcgaaagatgacctgctgttgacagactttgaaggtgccttgaagttctttagggttcagcttcctaagagataccgctcagaagaaaatgcaaaaaaactaatggaattagcctgcaacatgaagattagtcagaagaagttgaaaaaatacgagaaagaatatcacaccatgagggaacagcaggcccagcaagaagaccccatcgagcgatttgagcgggagaataggcgtctacaagaagctaacatgaggttggaacaggaaaacgatgacttagcccatgagctggtgaccagcaagattgcactacggaaggacctggataacgctgaggaaaaggcagatgctctgaataaggagctgctgatgaccaaacagaagttgattgatgcagaagaagagaaaagacggttggaagaagagtctgctcagttaaaagaaatgtgccgtcgggaactcgacaaggcagaatctgagattaaaaaaaacagttctatcattggtgactataagcagatttgttctcagttgagtgaaagattggagaagcagcagacagccaataaggtggaaattgagaaaattcggcaaaaagtggatgactgtgagcggtgccgggaatttttcaacaaagaagggcgtgtaaaaggcataagctcaaccaaggaggttttagatgaggacacggatgaagagaaagagacgctcaagaaccagctgagagaaatggagctagaactggcacagaccaaactccagctggtggaggccgagtgtaagatacaggacttggaacaccatttagggcttgccctcaatgaggtgcaggcagccaagaagacgtggtttaaccgaacactgagctccataaagacagcaaccggggttcaagggaaagagacttgctgagagcagctgccgcctcccgacaccttcagaaaacacgacaccttttgttgccttctttggccagatgtgtgattctgtgacttgtcccaggaccagaatgtacctaagtcagatccatagacgcatgttggtaggtcactggaccagagcttgtgaagcaggcaacctctggggtaagactactgatactaacaggcctgctagctcagccgacgctctggacactctagaaatcactcctcagtgtgacctcccaggcctcttccccgtgtacgtcaacacctcacccagcctaaaggctgagtttacatgatcagagttaggggatccttcagtctgttgattttttttctaaaccttttttttttaatatacatatatatatatatatatatatatatatatatatatatatatatatatatatatatatatatagtgggggtggggcaagggatcagaaattcaaataattcttttctgcttcaatgccagcagaaggtcccccaggtagacatggagaagcactttgttttaaataggagggtttcatagttgcatctgaagccacctggttctgttaaactgtatcgtgcaggttttgggtttggcattattcatgtttctgatcaattctatgcaactctcatagttcctgttactttttagcattagctgccaaatgacttcaaaaggctggggtgggtgacttgactgtgagactggattataacatggacaaatcttattttgcttaatgtgtttgtgtgtgtgtgtgtgtgtgtgtgtgtgtgtgtgtgtgtatgtatatatatatatataaatatctttcccaatatgccccgttgacagtgtttaaattccagactaggactgctgatctgcacaatttaattatgtggttattcgagcacttaatttcactcaaggttcattgggctctgctctcctccctgccattacgggagctgtggacagagctccctcacttcaagattcctagtgtttttgcacaacaggttgtccaagtgagaaagactgagttgcgtgtctgtaaatgtctgcgcagggtgcacatgctgcgaggtctccatcctccgggcctgtccctcccagatgggctgggcctttgggccctcctcagagtatgcctgggtacaaacctcactgttcagatgggctgtaagttctcacttcaaagctatggaatggattttagcacctttaaaaaaaaaaaaaaaaaaa

SEQ ID NO: 23895 - DNA, 3152 bp, Homo Sapiens
gctcgcgaatgtagcaggcgccccaagctcggtcctcaagaagccatggcggaatccaggggccgtctgtacctttggatgtgcttggctgctgcgctggcatctttcctgatgggatttatggtgggctggtttattaagcctctcaaagaaacaaccacttctgtgcgctatcatcaaagtatacggtggaaactggtatccgaaatgaaagctgaaaacatcaaatcatttcttcgttcttttacaaagcttcctcatctggcaggaacagaacaaaatttcttgcttgccaagaaaatccaaacccagtggaagaaatttggactagattcagccaagttggttcattatgatgtcctcttatcttaccccaatgagacaaatgccaactatatatcgattgtggatgaacatgaaactgagattttcaaaacatcataccttgaaccaccaccagatggctatgagaatgttacaaatattgtgccaccatataatgctttctcagcccaaggcatgccagagggagatcttgtatatgtgaactatgctcgcactgaagactttttcaaactagaaagagagatgggcatcaactgtactgggaagattgttattgcaagatatggaaaaatcttcagaggaaataaagttaaaaatgccatgttagcaggagccataggaatcatcttgtactcagatccagctgactactttgctcctgaggtacagccatatcccaaaggatggaatcttcctggaactgcagcccagagaggaaatgtgttaaatttgaatggtgctggtgacccactcactccaggctatccagcaaaagaatacactttcagacttgatgttgaagaaggagtgggaatcccccgaatacctgtacatcccattggatataatgatgcagaaatattattacgctacttgggaggaattgctccaccagataagagttggaagggagcccttaatgtgagttatagtatcggacctggctttacagggagtgattctttcaggaaggttagaatgcatgtttataacatcaataaaattacaaggatttacaatgtagttggaactatcagaggatctgtggaacctgacaggtatgttattctgggaggtcaccgggactcctgggtatttggagctattgacccaaccagtggggttgctgttttgcaagaaattgcccggagttttggaaaactgatgagtaaaggctggagacctagaagaactatcatttttgccagctgggatgcagaagaatttggacttctgggttccacagaatgggctgaggagaatgtcaaaatactccaggagagaagcattgcttatatcaactcggattcatctatagaaggcaattatactctcagagttgactgtactccccttctttaccaattagtgtataaactgacaaaagagatccccagccctgatgatgggtttgagagtaaatcactgtatgaaagctggttggaaaaagacccttcacctgaaaataaaaatttgcctagaatcaataagctgggatctggaagtgactttgaagcttattttcagagacttggaattgcttcaggcagagcccgttacactaagaataagaaaacagataagtacagcagctacccagtgtaccacacaatttatgagacatttgaattggtagagaaattttatgaccccacatttaaaaaacaactttctgtggctcaattacgaggagcactggtatatgagcttgtggattctaaaatcattccttttaatattcaagactatgcagaagctttgaaaaactatgcagcaagtatctataatctatctaagaaacatgatcaacaattaacagaccatggagtatcatttgactccttattttctgctgtgaaaaacttctcagaggctgcttcagattttcataaacgacttatacaagttgatcttaacaatcccattgcagtgagaatgatgaatgaccaactgatgctcctggaaagagcattcatcgatcctcttggtttaccaggaaagctgttctataggcacatcatatttgctccaagtagccacaacaaatatgctggagaatcatttcctggaatctatgatgctatctttgatattgaaaataaagccaactctcgtttggcctggaaagaagtaaagaaacatatttctattgcagcttttacaattcaagcagcagcaggaactctgaaagaagtattatagaaggtctcaagtggctagccattaaaggtgttgctaaaagtctgaggataaaattcacctttctgataacttatgaagccagggtgttctaaactcttttcatgtcatgttttgattataggctttggtcttttcatctgcaaagccttttttttttttgctctttaaaagttaataattatattagcaaagtgttaatctaatgaagtaaaaaactcctgtgtggcagaaagtaaaagaaaattccctaaattatagcaaggaacatgaattctcagacattgtgagtgtgggaatgtaaaatggtaaaatcacttttgaaaacagtttggcagtttcctataaagttaaacatacacttttactttaggactccagaattccacttctagttatttattcaagagaaggaaaaacaatgatcacagcaatacttgtatgcatgttcattgcaacttaaaagcgtaaaaaccccaaatgtccatccacagacgaatgtataaactgtggtatccattacacaatagactacttactactcagcaataaaaatgaagtaactttcaataaatgcaatattattggcagacattgttgaaggaaaaaagccagacaaacaactacataaaatatgtttctatttagatgaagtggcaaactaatctgtagtgttaaaaattagattagtgattgcctgggccaagtggcaggttggggaggatggctgcaaagaagtatgaggaaactttctccaatagatgagaattttccgtatcttgatctgagtggcaaattgtaaacttaaaatatatataaaatttattgaaagaaaattaagcctcaataaacgtgattataaaaaaaaaaaaaaaaagggcggccgc

SEQ ID NO: 23896 - DNA, 2853 bp, Homo Sapiens
tgaggcctgaggcctggggcgggtggcggccgggctggccttggcctcgcgccttcccctgcggccgccgcgggctccgcgggcggtatcggagtgtcgtgcggcgcgtggccgcgtgacacgcgcacttgtcggagtgacgggccctgcggaagaggaggtgcggcccagggcgcaggggagccctcgggagcgggcccggccctcagcgccgccccggccgtgtcccggaggagcggcctgcgccgccgcgcgagaggaagcacccaggcatgtggaatatgctcatagtggcgatgtgcttggcccttctgggctgcctgcaagcccaggagctccagggacatgtctccataatcctgctgggagcaactggggacctggctaagaagtacttatggcagggactgttccagctgtacctggatgaagcggggaggggtcacagttttagcttccatggagctgctctgacagcccccaagcagggtcaagagctcatggccaaggccctggaatccctctcctgccccaaggacatggcacccagtcactgtgcagagcacaaggatcagttcctgcagctgagccagtaccgccaactgaagacggccgaggactatcaggccctgaacaaggacatcgaggcacagctccagcacgcaggcctccgggaggctggcaggatcttctacttctcagtgccacccttcgcctatgaagacattgcccgcaacatcaacagtagctgccggccaggcccgggcgcctggctgcgggttgtccttgagaaaccctttggccatgaccacttctcagcccagcagctggccacagaactcgggacctttttccaggaggaggagatgtaccgggtggaccattacttaggcaagcaggctgtggcgcagatcctgcctttccgagaccagaaccgcaaggctttggacggcctctggaaccggcaccatgtggagcgggtggagatcatcatgaaagagaccgtggatgctgaaggccgcaccagcttctatgaggagtacggtgtcattcgcgacgtcctccagaaccatctgacggaggtcctcaccctcgtggccatggagctgccccacaatgtcagcagtgcggaggctgtgctgcggcacaagcttcaggtcttccaggcgctgcggggcctgcagaggggcagtgccgtcgtgggccagtaccagtcttacagtgagcaggtgcgcagagagctgcagaagccagacagcttccacagcctgacgccgaccttcgcaggtgtcctagtgcacattgacaaccttcgctgggagggcgtgcctttcatcctgatgtctggcaaagccttggacgagagagtgggctacgctcggatcttgttcaagaaccaggcctgctgtgtgcagagcgaaaagcactgggccgcggcgcagagccagtgcctgccccggcagctcgtcttccacatcggccatggcgacctgggcagccctgccgtgctggtcagcaggaacctgttcaggccctccctgccctccagctggaaggaaatggagggaccacctgggctccgccttttcggcagccctctgtccgattactacgcctacagccctgtgcgggagcgggacgcccactccgtcctcttatcccatatcttccatggccggaagaatttcttcatcaccacagagaacttgctggcctcctggaacttctggacccctctgctggagagcctggcccataaggccccacgcctctaccctggaggagctgagaatggccgtctgttggactttgagttcagtagcggccggttgttcttttcccagcagcagccggagcagctggtgccagggccagggccggccccaatgcccagtgacttccaggtcctcagggccaagtaccgagagagcccgctggtctccgcctggtccgaggagctgatctctaagctggctaatgacatcgaggccaccgctgtgcgagccgtgcggcgctttggccagttccacctggcactgtcggggggctcgagccccgtggccctgttccagcagctggccacggcgcactatggcttcccctgggcccacacgcacctgtggctggttgacgagcgctgcgtcccactctcagacccggagtccaacttccagggcctgcaggcccacctgctgcagcacgtccggatcccctactacaacatccaccccatgcctgtgcacctgcagcagcggctctgcgccgaggaggaccagggcgcccagatctatgccagggagatctcagccctggtggccaacagcagcttcgacctggtgctgctgggcatgggtgccgacgggcacacagcctccctcttcccacagtcacccactggcctggatggcgagcagctggtcgtgctgaccacgagcccctcccagccacaccgccgcatgagccttagcctgcctctcatcaaccgcgccaagaaggtggcagtcctggtcatgggcaggatgaagcgtgagatcaccacgctggtgagccgggtgggccatgagcccaagaagtggcccatctcgggtgtcctgccgcactccggccagctggtgtggtacatggactacgacgccttcctgggatgagggcgcctgtgccccttgcccgcttcgctcctgtgctttccttcgcccgtgtcttccctcccttctcggccccgccacctgcccagcgtgccctggctctccagaaccttctatcccacagtcaggccccagagagggcaggacaagccttgtcccgatgcctttgaccggcagctctgtgtattggtggatagatgcagaaaca

SEQ ID NO: 23897 - DNA, 8868 bp, Homo Sapiens
cccccagcccgcgccagcatgatgaacaacagcggctactcagacgccggcctcggcctgggcgatgagacagacgagatgccgtccacggagaaggacctggcggaggacgcgccgtggaagaagatccagcagaacacattcacgcgctggtgcaatgagcacctcaagtgcgtgggcaagcgcctgaccgacctgcagcgcgacctcagcgacgggctccggctcatcgcgctgctcgaggtgctcagccagaagcgcatgtaccgcaagttccatccgcgccccaacttccgccaaatgaagctggagaacgtgtccgtggccctcgagttcctcgagcgcgagcacatcaagctcgtgtccatagacagcaaggccatcgtggatgggaacctgaagctgatcctgggcctgatctggacgctgaccctgcactactccatctccatgcccatgtgggaggatgaagatgatgaggatgcccgcaaacagacgcccaagcagcggctgcttggctggatccagaacaaggtgccccagctgcccatcaccaacttcaaccgtgactggcaggacggcgaagctctgggcgcccaggtggacaactgcgcccccggtctctgccccgactgggaggcctgggaccccaaccagcccgtggagaacgcccgggaggccatgcagcaggccgacgactggcttggggtgcccctggtcattgcccctgaggagattgtggaccccaacgtggatgagcattctgttatgacctacctgtcccagttccccaaggccaagctcaaacctggtgcccctgttcgatccaagcagctgaaccccaagaaagccatcgcctatgggcctggcatcgagccacagggcaacaccgtgctgcagcctgcccacttcaccgtgcagacggtggacgcgggcgtgggcgaggtgctggtctacatcgaggaccctgaaggccacaccgaggaggctaaggtggttcccaacaatgacaaggatcgcacctatgctgtctcctatgtgcccaaggtcgctgggttacacaaggtgaccgtgctctttgctggccagaacattgaacgcagtccctttgaggtgaacgtgggcatggccctgggagatgccaacaaggtgtcagcccgtggccctggcctggaacctgtgggcaatgtggccaacaaacccacctactttgacatctacactgcgggggccggcactggcgatgttgctgtggtgatcgtggacccacagggccggcgggacacagtggaggtggccctggaggacaagggtgacagcacgttccgctgcacatacagacctgccatggaggggccacataccgtgcatgtggcctttgcgggtgcccccatcacccgcagtcccttccctgtccatgtgtcggaagcctgtaaccccaacgcctgccgcgcctctgggcgaggcccgcagcccaagggtgttcgcgtgaaagaggtggctgacttcaaggtgtttaccaagggtgccggcagcggggagctcaaggtcacggtcaaggggccaaagggcacagaggagccagtgaaggtgcgggaggctggggatggtgtgttcgagtgcgagtactacccggtggtgcctgggaagtatgtggtgaccatcacgtggggcggctacgccatccctcgcagcccctttgaggtacaggtgagcccagaggcaggagtgcaaaaggtccgggcctggggtcctggtttggagactggccaggtgggcaagtcagccgattttgtggtggaagccattggcaccgaggtggggacactgggcttctccatcgaggggccctcacaagccaagatcgaatgtgacgacaagggggatggctcctgcgatgtgcggtactggcccacggagcctggggagtacgctgtgcacgtcatctgtgacgatgaggacatccgagactcacccttcattgcccacatcctgcccgccccacctgactgcttcccagataaggtgaaggcctttgggcctggcctggagcctaccggctgcatcgtggacaagcccgctgagttcaccattgatgctcgtgcagctggcaagggagacctgaagctctatgcccaggacgccgacggctgtcccatcgacatcaaggtgatccccaacggcgacggcaccttccgctgctcctacgtgcccaccaagcccattaagcacaccatcatcatctcctggggaggcgtaaacgtgcccaagagccccttccgggtgaacgtgggcgagggcagccaccccgagcgggtaaaggtgtacggccccggagtggagaagacaggcctcaaggccaatgagcccacctacttcacggtggactgcagcgaggcggggcaaggcgacgtgagcatcggcatcaagtgcgccccaggcgtggtgggccctgcagaggctgacattgacttcgacatcatcaagaatgacaacgacaccttcaccgtcaagtacacgccaccaggggcgggccgctacaccatcatggtgctgtttgccaaccaggagatccccgccagccccttccacatcaaggtggacccatcccacgatgccagcaaagtcaaggccgagggccctgggctgaatcgcacaggtgtggaagtcgggaagcccacccacttcacggtgctgaccaagggagccggcaaggccaagctggatgtgcagtttgcagggacagccaagggcgaggttgtgcgggactttgagatcatagacaaccatgactactcctacactgtcaagtacaccgctgtccagcagggcaacatggcagtgacagtgacttatggcggggaccctgtccccaagagcccctttgtggtgaatgtggcacccccgctggacctcagcaaaatcaaagttcagggccttaatagcaaggtggctgtgggacaggaacaagcattctctgtgaacacacgaggggctggcggtcagggccaactggatgtgcggatgacttcgccctctcgccggcccatcccctgcaagctggagccaggcggtggagcggaagcccaggctgtgcgctacatgcccccggaggaggggccctacaaggtggatatcacctacgatggtcacccggtgcctggcagcccgtttgctgtggagggtgtcctgccccctgatccctccaaggtctgtgcttatggcccgggtctcaagggtggactggtaggcacccccgcgccattctccatcgacaccaagggggctgacacaggtggcctggggctgaccgtagagggcccctgcgaggccaagatcgagtgccaggacaatggtgatggctcatgtgctgtcagctacctgcccacggagcctggcgagtacaccatcaacatcctgtttgctgaggcccacatccctggctcgcccttcaaagccaccattcggcctgtgtttgacccgagcaaggtgcgggccagtggaccgggcctggagcgcggcaaggtcggtgaggcagccaccttcactgtggactgctcagaggcaggcgaggcggagctgaccattgagatcctgtcggatgccggggtcaaggccgaggtgctgatccacaacaacgcggatggcacctaccacatcacctacagccctgccttccctggcacctacaccattaccatcaagtatggcgggcatcccgtgcccaaattccccacccgtgtccatgtgcagcctgcggtcgataccagtggcgtcaaggtctcagggcctggtgttgagccacacggtgtcctgcgggaggtgaccactgagttcactgtggatgcaagatccctaacagccacaggcggcaaccacgtgacggctcgtgtgctcaacccctcgggggccaagacagacacctatgtgacagacaatggggacggcacctaccgagtgcagtacaccgcctacgaggagggcgtgcatctggtggaggtcctgtatgatgaggtcgctgtgcccaagagccccttccgagtgggcgtgaccgagggctgtgatcccacccgcgtccgagccttcgggccaggcctggagggtggcttggtcaacaaggccaaccgattcactgtggagaccaggggagcgggcaccgggggccttggcctagccatcgagggtccctcggaagccaagatgtcctgcaaggacaacaaggatggtagctgcaccgtggagtacatccccttcactcctggagactatgacgtcaacatcaccttcggggggcggcccatcccagggagcccgttccgcgtgccagtgaaggatgtggtggaccctgggaaggtgaagtgctcagggccagggctgggggctggtgtcagggcccgggttcctcagaccttcacagtggactgcagtcaagctggccgggcgcccctgcaggtggctgtgctgggccccacaggtgtggccgagcctgtggaggtgcgggacaatggagatggcacccacactgtccactacaccccagccactgacgggccctacacggtagccgtcaagtatgctgaccaggaggtgccacgcagccccttcaagatcaaggtcctcccagctcatgatgccagcaaggtgcgggccagcggcccaggcctcaacgcctctggcatccctgccagcctgcctgtggagttcaccatcgacgcacgggacgcgggcgaggggttgctcactgtccagatcttggaccccgagggtaagcccaagaaggccaacatccgggacaatggggatggcacgtacactgtgtcctacctgccggacatgagcggccggtacaccatcaccatcaagtatggcggtgatgagatcccctactcgcccttccgcatccatgctctgcccactggggatgccagcaagtgcctcgtcacagtgtccattggaggccatggcctgggtgcctgcctgggccctcgaatccagattgggcaggagacggtgatcacgatggatgccaaggcagccggtgaggggaaggtgacatgcacggtgtccacgccggatggggcagagctcgatgtggatgtggttgagaaccatgacggtacctttgacatctactacacagcgcccgagccgggcaagtacgtcatcaccatccgcttcgggggtgagcacatccccaacagccccttccacgtgctggccacagaggagccagtggtgcctgtggagccaatggagtccatgctgaggcccttcaacctggtcatccccttcgcggtgcagaaaggggagctcacaggagaggtgcggatgccctcggggaagacggcacggcccaacatcaccgacaacaaggacggcaccatcacggtgaggtatgcacccactgagaaaggcctgcaccagatggggatcaagtatgacggcaaccacatccctgggagccccttacagttctatgtggatgccatcaacagccgccatgtcagtgcctatgggccaggcctgagccatggcatggtcaacaagccagccaccttcactattgtcaccaaagatgctggagaagggggtctgtcactggccgtggagggcccatccaaggcagagatcacctgtaaggacaacaaggatggcacctgcaccgtgtcctatctgccgactgcgcctggagactacagcatcatcgtgcgcttcgatgacaagcacatcccggggagccccttcacagccaagatcacaggtgatgactccatgaggacctcacagctgaatgtgggcacctccacggacgtgtcactgaagatcaccgagagtgatctgagccagctgaccgccagcatccgtgccccctcgggcaacgaggagccctgcctgctgaagcgcctgcccaaccggcacattgggatctccttcacccccaaggaggtcggggagcacgtggtgagcgtgcgcaagagtggcaagcatgtcaccaacagccccttcaagatcctggtggggccatctgagatcggggacgccagcaaggtgcgggtctggggcaaggggctttccgagggacacacattccaggtggcagagttcatcgtggacactcgcaatgcaggttatgggggcttggggctgagtattgaaggcccaagcaaggtggacatcaactgtgaggacatggaggacgggacatgcaaagtcacctactcccccaccgagcccggcacctacatcatcaacatcaagtttgctgacaagcacgtgcctggaagccccttcactgtgaaggtgaccggcgagggccgcatgagggagagcatcacccggcggagacaggcaccttccatcgccaccatcggcagcacctgtgacctcaacctcaagatcccaggaaactggttccagatggtgtctgcccaggagcgcctgacacgcaccttcacacgcagcagccacacctacacccgcacggagcgcacggagatcagcaagacgcggggcggggagacaaagcgcgaggtgcgggtggaggagtccacccaggtcggcggggaccccttccctgctgtgtttggggacttcctgggccgggagcgcctgggatccttcggcagcatcacccggcagcaggagggtgaggccagctctcaggacatgactgcacaggtgaccagcccatcgggcaaggtggaagccgcagagatcgtcgagggcgaggacagcgcctacagcgtgcgctttgtgccccaggaaatggggccccatacggtcgctgtcaagtaccgtggccagcacgtgcccggcagcccctttcagttcactgtggggccgctgggtgaaggtggtgcccacaaggtgcgggccggaggcacagggctggagcgaggtgtggccggcgtgccagccgagttcagcatctggacccgggaggctggcgctgggggcctgtccattgctgtggagggtcctagcaaagcggagattgcatttgaggatcgcaaagatggctcctgcggcgtctcctatgtcgtccaggaaccaggtgactatgaggtctccatcaagttcaatgatgagcacatcccagacagcccctttgtggtgcctgtggcctccctctcggatgacgctcgccgtctcactgtcaccagcctccaggagacggggctcaaggtgaaccagccagcgtcctttgccgtgcagctgaacggtgcccggggcgtgattgatgcccgggtgcacacaccctcgggggctgtggaggagtgctacgtctctgagctggacagtgacaagcacaccatccgcttcatcccccacgagaatggcgtccactccatcgatgtcaagttcaacggtgcccacatccctggaagtcccttcaagatccgcgttggggagcagagccaggctggggacccaggcttggtgtcagcctacggtcctgggctcgagggaggcactaccggtgtgtcatcagagttcatcgtgaacaccctgaatgccggctcgggggccttgtctgtcaccattgatggcccctccaaggtgcagctggactgtcgggagtgtcctgagggccatgtggtcacttatactcccatggcccctggcaactacctcattgccatcaagtacggtggcccccagcacatcgtgggcagccccttcaaggccaaggtcactggtccgaggctgtccggaggccacagccttcacgaaacatccacggttctggtggagactgtgaccaagtcctcctcaagccggggctccagctacagctccatccccaagttctcctcagatgccagcaaggtggtgactcggggccctgggctgtcccaggccttcgtgggccagaagaactccttcaccgtggactgcagcaaagcaggcaccaacatgatgatggtgggcgtgcacggccccaagaccccctgtgaggaggtgtacgtgaagcacatggggaaccgggtgtacaatgtcacctacactgtcaaggagaaaggggactacatcctcattgtcaagtggggtgacgaaagtgtccctggaagccccttcaaagtcaaggtcccttgaatcccaaaagtgcctccccagcctcagcccccacctccagccacacacacattacacacacacacacacacacacaaatgtgccacacccagacacgcacagaatcagacactacaaacacctgccttgggggtgaagtgaaggcccagcctccccaccccaccgcgccccaggggttggaggaccttgtctgtgtcagacagtgtccctccctggaatgtgacatgaggccgactggggccaggctcaggggcagaggctgggacacaaggggctggcgagggctgcgaggccagggaagccctgagtttctggcggggctgagcagtgggggagcattgtgttgtgggtgtctgtgtgtgaggtcaccctcaaactgcaccgccggccagataccctcctgaccccgaggacttggtctggtctctctggtggctacaaccccagagttttaaggacttggaaaggaagcacaatcagagaagaaaacagcccccaaccagcaggagcggcctggcacatggaccggcctgagcgatgtgcactccacccaagccaggctcccagggggcctgatttctctctcactgtctctttttttaaaatggttgcacggctctgccccatggggggccttttttacacactgcgaggcccagctttctaggggacttttgcacatgtcatgcagctcagctgggagctgcttaggtggaaaactccaaataaagtgcgcctgtcgcagaaaaaaaaaaaaaaaaaaaaaaaaaa

SEQ ID NO: 23898 - DNA, 2237 bp, Homo Sapiens
cacgaggagctgttgcagcatgagcgatacgcttggttctcctaactagcaccttcccctctcccctgactcagctggtagcccctcctccccgcacctgcccaaaggtcactggacaggcatttgtctggccttcccttttactgctggctgggaaggaggagcatcagaccacagatcctggaaggcacttctctccctgactgccgctcacactgccgtgagaacctgcttatatccaggaccaaggaggcaatgccaggaagctggtgaagggtttcctctcctccaccatggttgacagcactgagtatgaagtggcctcccagcctgaggtggaaacctcccctttgggtgatggggccagcccagggccggagcaggtgaagctgaagaaggagatctcactgcttaacggcgtgtgcctgattgtggggaacatgatcggctcaggcatctttgtttcccccaagggtgtgctcatatacagtgcctcctttggtctctctctggtcatctgggctgtcgggggcctcttctccgtctttggggccctttgttatgcggaactgggcaccaccattaagaaatctggggccagctatgcctatatcctggaggcctttggaggattccttgctttcatcagactctggacctccctgctcatcattgagcccaccagccaggccatcattgccatcacctttgccaactacatggtacagcctctcttcccgagctgcttcgccccttatgctgccagccgcctgctggctgctgcctgcatctgtctcttaaccttcattaactgtgcctatgtcaaatggggaaccctggtacaagatattttcacctatgctaaagtattggcactgatcgcggtcatcgttgcaggcattgttagacttggccagggagcctctactcattttgagaattcctttgagggttcatcatttgcagtgggtgacattgccctggcactgtactcagctctgttctcctactcaggctgggacaccctcaactatgtcactgaagagatcaagaatcctgagaggaacctgcccctctccattggcatctccatgcccattgtcaccatcatctatatcttgaccaatgtggcctattatactgtgctagacatgagagacatcttggccagtgatgctgttgctgtgacttttgcagatcagatatttggaatatttaactggataattccactgtcagttgcattatcctgttttggtggcctcaatgcctccattgtggctgcttctaggcttttctttgtgggctcaagagaaggccatctccctgatgccatctgcatgatccatgttgagcggttcacaccagtgccttctctgctcttcaatggtatcatggcattgatctacttgtgcgtggaagacatcttccagctcattaactactacagcttcagctactggttctttgtggggctttctattgtgggtcagctttatctgcgctggaaggagcctgatcgacctcgtcccctcaagctcagcgttttcttcccgattgtcttctgcctctgcaccatcttcctggtggctgttccactttacagtgatactatcaactccctcatcggcattgccattgccctctcaggcctgcccttttacttcctcatcatcagagtgccagaacataagcgaccgctttacctccgaaggatcgtggggtctgccacaaggtacctccaggtcctgtgtatgtcagttgctgcagaaatggatttggaagatggaggagagatgcccaagcaacgggatcccaagtctaactaaacaccatctggaatcctgatgtggaaagcaggggtttctggtctactggctagagctaaggaagttgaaaaggaaagctcacttctttggaggcacctgtccagaagcctggcctaggcagcttcaacctttgaacttactttttgaaatgaaaagtaatttatttgttttgctacatactgttccagacttttaaaggggacaatgaaggtgactgtggggaggagcatgtcaggtttgggcttggttgttttagaagcacctgggtgtgcctacctactcctcttttcttttaaaagggcccacaatgctccaatttcctgtctcctttagagagacatgaaactatcacaggtgctggatgacaataaaagtttatgttcctaaaaaaaaaaaaaaaaaaaaaaa

SEQ ID NO: 23899 - DNA, 2068 bp, Homo Sapiens
  misc_feature (143)..(143): n is a, c, g, or t
ggcgccgggattgggagggcttcttgcaggctgctgggctggggctaagggctgctcagtttccttcagcggggcactgggaagcgccatggcactgcagggcatctcggtcgtggagctgtccggcctggccccgggccgtntctgtgctatggtcctggctgacttcggggcgcgtgtggtacgcgtggaccggcccggctcccgctacgacgtgagccgcttgggccggggcaagcgctcgctagtgctggacctgaagcagccgcgggagccgcgtgctgcggcgtctgtgcaagcggtcggatgtgctgctggagcccttccgccgcggtgtcatggagaaactccagctgggcccagagattctgcagcgggaaaatccaaggcttatttatgccaggctgagtggatttggccagttcaggaaagcttctgccggttagctggccacgatatcaactatttggctttgtcaggtgttctctcaaaaattggcagaagtggtgagaatccgtatgccccgctgaatctcgtggctgactttgctggtggtggccttatgtgtgcactgggcattataatggctctttttgaccgcacacgcactgacaagggtcaggtcattgatgcaaatatggtggaaggaacagcatatttaagttcttttctgtggaaaactcagaaatcgagtctgtgggaagcacctcgaggacagaacatgttggatggtggagcacctttctatacgacttacaggacagcagatggggaattcatggctgttggagcaatagaaccccagttctacgagctgctgatcaaaggacttggactaaagtctgatgaacttcccaatcagatgagcacggatgattggccagaaatgaagaagaagtttgcagatgtatttgcaaagaagacgaaggcagagtggtgtcaaatctttgacggcacagatgcctgtgtgactccggttctgacttttgaggaggttgttcatcatgatcacaacaaggaacggggctcgtttatcaccagtgaggagcaggacgtgagcccccgccttgcacctctgctgttaaacaccccagccatcccttcttccaaaggggatcctttcataggagaacacactgaggagatacttgaagaatttggattcagccgagaagagatttatcagcttaactcagataaaatcattgaaagtaataaggtaaaagctagtctctaacttccaggcccacggctcaagtgaatttgaatactgcatttacagtgtagagtaacacataacattgtatgcatggaaacatggaggaacagtattacagtgtcctaccactctaatcaagaaaagaattacagactctgattctacagtgatgattgaattctaaaaatggttatcattagggcttttgatttataaaactttgggtacttatactaaattatggtagttattctgccttccagtttgcttgatatatttgttgatattaagattcttgacttatattttgaatgggttctagtgaaaaaggaatgatatattcttgaagacatcgatatacatttatttacactcttgattctacaatgtagaaaatgaggaaatgccacaaattgtatggtgataaaagtcacgtgaaacagagtgattggttgcatccaggccttttgtcttggtgttcatgatctccctctaagcacattccaaactttagcaacagttatcacactttgtaatttgcaaagaaaagtttcacctgtattgaatcagaatgccttcaactgaaaaaaacatatccaaaataatgaggaaatgtgttggctcactacgtagagtccagagggacagtcagttttagggttgcctgtatccagtaactcggggcctgtttccccgtgggtctctgggctgtcagctttcctttctccatgtgtttgatttctcctcaggctggtagcaagttctggatcttatacccaacacacagcaacatccagaaataaagatctcaggaccccccaaaaaaaaaaaaaaaaaaaaaaaaaaaaa

SEQ ID NO: 23900 - DNA, 3077 bp, Homo Sapiens
tcgagcggccgcccgggcaggtgcagcactgagccgccgacggggcgggtgggctttgctgccgagcaggcggcgccgtcttggggcctagcggcgaggcgacccgcacaggtgggcggtggcggtaggtgggtggccagcgactggcaacgcggtggcttagacgcgcgagatccggccagggtcagagtactgtaagattgatgttaaaggcatggtgttcaccccacttcatcagcgtacataagttatctcttcttttggacccttattttatgccataatgcaacaagctttagaactagctttggatcgtgcagagtatgtcattgaaagtgcccgacagagacctcctaaaaggaaatacctatcaagtggaagaaaatctgtatttcaaaaactttatgacttgtatattgaagaatgtgaaaaagaacctgaagttaagcagaaattaagaagaaatgtgaacttgttagagaagcttgttatgcaagagactttgtcatgtttagtggtcaatctatacccaggaaatgagggatattctctgatgctcaggggaaaaaacggatcagattccgagaccattcgactgccctatgaagaaggagagttgcttgaatatttggatgcagaagaattacctcctattttggttgatctcctagaaaaatctcaggttaatatttttcattgcggatgtgtcatagcagaaatacgtgactacaggcagtccagtaacatgaaatctcctggttaccaaagtcggcacattctcttacgtccaacaatgcagactttaatttgtgatgtacattcaataacaagtgataaccacaaatggacccaggaagacaaacttttgcttgagagccagctcatcctagctacagctgaaccactctgtcttgatccttctatagcagtcacctgcactgcaaacagactgctctataacaagcaaaagatgaacactcgcccaatgaaacggtgtttcaagaggtattccagatcctctctgaatcggcagcaagatctatctcattgtccacctcctcctcagctgaggttacttgatttcttacaaaaaagaaaggaaagaaaagcaggtcagcattatgacctcaaaatttctaaggcaggaaattgtgtagatatgtggaaacggagtccctgtaatttggccataccttctgaagtagatgtggagaaatatgctaaagtggaaaagtctatcaaatctgatgactcacagccaacagtctggccagcccatgatgtaaaagatgattatgtatttgaatgtgaagctggtactcagtatcagaaaacaaagctgaccatcttgcagtcgcttggagatccactttactatggtaaaatacagccatgtaaagcagatgaagaaagtgacagccagatgtctccatcacactcgtccacagatgatcattcaaattggttcattattggatcaaagaccgatgctgagagggtagtcaatcagtaccaagaattagtccagaatgaagccaaatgtccggtcaagatgtcacacagctccagtggctcagccagtctgagtcaggtttctccagggaaagaaacagatcaaactgaaaccgtgtcagttcagtcttcggtattggggaagggtgtaaaacatcgacccccaccaatcaaacttccctcaagctcaggaaatagttcctcaggtaactattttacaccacaacagacaagcagctttctcaaatctccaactcctcctccttcttctaagccatcaagtattcctcggaaatcatctgtggatctcaatcaagttagcatgctttctccagctgccctatcacctgccagctcatcacaaagaaccacggccacccaggtcatggcaaactctgctggacttaacttcatcaatgtagtgggctctgtttgtggggcccaggctttgatgagtggttcaaaccccatgctgggctgtaacactggtgccataactcctgcaggaataaacctgagcggccttctaccctcaggaggtctgctaccaaatgcactgcccagtgcaatgcaggcagcttctcaagcaggtgttccatttggtttaaaaaatacttcaagtctcaggcccttaaatctactccagcttccaggtggttcacttatttttaacactctgcagcagcagcaacagcagctctcccagtttacaccacaacaacctcagcagcccacaacttgtagtcctcaacagccaggggagcagggttctgagcaaggttcaaccagtcaagaacaggccttatctgctcagcaagctgctgttattaaccttactggagtaggaagttttatgcagtcacaggcagctgcagttgcgattcttgcagcatcaaatggctatggcagcagcagcagcacaaacagctcagctacatcatcatcggcatacaggcagccagtcaaaaagtaaaatgaagagaggcacgccaaccactccaaaattttgagtcttgcattactttttgttccttttttaaaaacacaagagcactgaatcaaaagaattgagtttctactttttgttttttttaatgtgtcagtattttacattgctagatgtacaaactttatacagaagcacaaccttatcatttttaaataaaaacagggaaatggtttaacaaaaaaaaagacctccccagcccctagcccaggagagagaaagccaggcaggtagccagggggactagcccctgtggagactggggggcttgaaattgtccccgtggtctcttactttcctttccccagcccagggtggacttagaaagcaggggctacaagagggaatccccgaaggtgctggaggtgggagcaggagattgagaaggagagaaagtgggtgagatgctggagaagagaggagaggagagaggcagagagcggtctcaggctggtgggaggggcgcccacctccccacgccctcccctcccctgctgcaggggctctggagagaaacaataaagagattcacacaaaaaaaaaaaaccggaattaagcc

SEQ ID NO: 23901 - DNA, 193471 bp, Homo Sapiens
  misc_feature (52395)..(52395): n is a, c, g, or t
  misc_feature (52397)..(52398): n is a, c, g, or t
  misc_feature (93464)..(93600): n is a, c, g, or t
  misc_feature (95123)..(95123): n is a, c, g, or t
  misc_feature (95190)..(95190): n is a, c, g, or t
  misc_feature (95885)..(95885): n is a, c, g, or t
  misc_feature (100992)..(100992): n is a, c, g, or t
  misc_feature (101044)..(101045): n is a, c, g, or t
  misc_feature (101055)..(101055): n is a, c, g, or t
  misc_feature (158364)..(158364): n is a, c, g, or t
  misc_feature (158375)..(158375): n is a, c, g, or t
  misc_feature (158377)..(158377): n is a, c, g, or t
  misc_feature (158394)..(158395): n is a, c, g, or t
  misc_feature (158881)..(158881): n is a, c, g, or t
  misc_feature (158911)..(158911): n is a, c, g, or t
  misc_feature (171801)..(171801): n is a, c, g, or t
gatcatggacaagttaccttacctcattgacttcagttttctcacatacaaaatagggatatacataagttgtatggagttcttttgttttttgttttaatttttttttcagttgttcacatgtatggcaaagttgtatggagttctaaggatctgaatgagttactagataaaggtgtagaatattgctgacatatagttagtgctcagtatatgttaactattactattatttcactattattatcttagttaatggtatcacctctcatctcgtcactcaggcaaaattctcaggagtcacaaacccaggctctgctttgtagatatatactgaacttaactactctttactatctttcctgctaccaacctaattcaaaccactgatgacacccttacataccacttccatccagtactatcccctcatgtttcctatacttggaaacaccataccgtcgttgtttgtttgttttccccacaccatctttaaagcccaggtcagattgtagcactcttgcttaaaatcctccagtggatttccattgcaattagaataaaatccaaatgctttaccttggcccttaaagccctttatgacttggcttgtctttctctgcaaactcatctcttatcactgtcttctgtgttcactacacttcagctgtagtgcttttttctttaactttttgtactttaaaaatgccaaaacatgtttatactttaggttcttcagcttttggttccctttgcctgaaatattcctccttggacccttctaatggctatttccttctcatcattcaggcccttaatcacgtttttttgttctatttgtgatagaaagctccagggaaggagctcacattcatcactgttttcttagcaccttgaatagtacttgatgtgtaatcgttgcttaatacatagtttgttacttgaatgagtgaaaatggctgctggaaaggctatatctatttatttatttatttttctagatgagatgaatgatgccagattataccaatttagtatccccaaaccatttttccacatctacatgtccaacattaggcaaacttaaattattaccagtcttagaagatggtttttttttttttttttttttttttttaggcagagttttactctttcacccaggctagagtgaaatggcatgatctgggctcactgcaacctctatctgccccccggggttgaagcaattctcctgcctcagcttcccaagtagctgggattataggcacccaccaccacacctggttaatttttgtatttttagtagagacaggggtttcaccatgttggccaggctgatctcgaactcctgacctcaggtgatccacctgcctcggcctcccagagtgctaggattacaggtgtgagccaccatgcctggcctagaagttgttttaatttacattatattaacatatgtaattgattattatttataagagctcattgtatatgaaggaaattggtcctttatcattcatatatatatatatgtatatgtatatgcatatgcgtgtggtatttcttacagttagtcttaagtgttttgcattttaaccatttgttttgtacagaatattccagtttagatacagttaaataatgtagaccaggtgcggtggctcacacctgtagtcccagcactttgggagacctaggcggctggatcacctgaggtcaggagtttgagaccagcctggccaacatggtgaaatcccgtctctactaaaaatacaaaaattacctgggcgtggtagtgggcgcctgtaatcccgctacttaggaggctgaggcatgagaatcgcttgaacctcagaggcggaaattgcagtgagccaagatcacaccactgcactccagcctgggcgacagagctagactctgtctcaaaaagaaaaaaaaaaaagtatgagtcattctctttctgggttttatgtttagaaaagccttcttcctttcaagattataaaaaatttattcttggctgggcccactggctcatgcctgtaatcccagcattttgggaggccaaggtggttggatcacttgagcccaggaatatgagaccagccagggcaacatagtgagactccatctctacaaaaaataaaaaagaaataactggccatagtgttgcgcacctgtaatcccagctccttgggagactgaagcaggaggattgcttcagcctaggaagctgaggctgcagtgagccaagaccgtgccactgtactctggcctaggcgacagagtaagatcctgtcttaaaaaaaaaaaatcttatttatttatttatttattgagatggagtctcactgtgtcacccaggctggagtgcagtggcgcgatctcagctcactgcaagctctgcctcccgggttcacaccattctcctgcctcagcctcctgagtagctgggactacaggcgttggccaccaagccgggctaattttttgtatttttagtagagacggggttttaccatgttagccaggatggtcttgatctcctgaccttgtgatccgcccgcctcagcctcccaaagtgctgggattacaggagtgagccaccgcgcccagcaaaaaaaaaatctttttaaaaaattctccctctcccttcaggattatatttgttgcttcttttttatttaagtaagtttttttttttaaatcagatgactggactcacatatttatttaataaatacatatctttttacgaatgatttagagatgctttttgttgttgttgttgttgttgatgagacagagtcttgctctgtaacccaggctggagggcactggctcagctcactgcaacctctgccttccaggtgcaagtgattctcctgcctttatcacctgagtagctgggattgcagccgtgtgccaccatgcccggctaatttttgtggttttagtagagacagggttttaccatgttggctaggctggtcttgaactcctgacctcaggtgatccacctgcctcggcctcccaaagtgctgggatttcaggtgtgagccactgcacccagcaagagatgcattttttattgtataatgaaagtatcatatgtttgcatctatttctgaactatagtctgctccacatatctgcctgccccccaccactagttaccatttgatttaatcacccacagctttatatttcaatattccaactttaatggcttttttttttttaatggagaagatgcagcttgaggagaggaactttaaaaaataacactgaagtcctgccaaatgatccctaaaagttctgagaaagaggctgggtgtggtggctcacgcctgtaatcccagcactttgggaggctgaggtgggtggatcacgaggtcaagagatcgagaccatcctggctaacatagtgaaactccgtctctactaaaaaaaatacaaaaaattagcctggcgtagtcccagctactcgggaggctgaggcaggagaatggcgtggacccgggaggcggagcttgcagtgagctgagatacgccactgcactccagcctgggcgacagagcgaggctctgtctcaaagaaaaaaaagaaaagttctgagaaagaaagaatattagctgtttcaaatgttaaaatgcactatagaattctagtgattaatgttttaaaaacactgagtgatcaattttaggacctgagtgtgtgtaatgtcttttactgtacatttcctatgtgatttctctacacttcacttttctcacctataaaatgggagaaatgatcagtattatatgtagatttaaagattaaatgagtgtgtgtgtgtgtgtaaagtgcttacttagtatgggacctggctagaggaagtacgcaacaaattacaactgttttatttatctcttttaacaaccttagttttaggtgatattgaagctcatagtggttaagtaacttttccaaaaggtagcagggtaggatttaaacttatagccacatgataccaaagctgtactccaaaccactataaatacacatgccattttatactattagcgcagtttatatttctactgaccttaataattgattgatgatacttattttcctatattaataaggttaatccactaaaattatattgagcacagtagtaccatttgtagagaagcagaaaatcatagtgtttacaaagggaggctcttccactcctagttacatacccaagagaagtgaaaaaaatatgtccacacaaaaagctgtatgtaaatgtccaagtagcattattcctaatagcccaaagtgaaaacaacctaaatgtctgtcagctgatgagtggaaaagcacaatgtgatatatccatacaagggaatgttattcagcaatcagaagcaataaagtattagtaaatgctgcaacatggttgaaccttcaaaacattatgccaagtgaaagaagccagatacaaggccacagtatggtactgtttatatgaaatgtccagaataggcaaattcagagatagaaatcatgttagaccgtcaggggctccggagaagggcaatagggtgtggctgctaatgggtacagagttttgggggtttgatgaaaatgttctggaatcagatagtggtgattattgcacactttgtgagtataccaaaaaccactgaattgtacactttaaagcagctaatttcatggtacatgaattatatctcaatttaaaatggaagaggggaggcttttggtgtttgaacctcagctttcagatttgctacttgttagttatatgtcctatacaagtaacttaactttttccttgccgcaggttttcttacttgtaaaaaaaatgtttaattgtaatatagtcttcagaggattgctgtaaaaattatacataaaagcctatagtaatagggtcttgcaaacaacaggcgctcagtaactgttagccattgttattaatatatccaatttcaacatgggcaaacatgggcaattctgatttacctttataataatcttgtgtgatatgttcagtatttggtatatggagtcagagagtcagagtatacctccaatctaacttttgatttataagtgaaataggaatataatgttagtttgaagtattaaccattcacacttttttacatgagtatcaacttacgaatactaagctaaacacctttatgtattgcttttaaatgtatacttaaaggctgaggtgggcagattgcttgagcccaggagtttgagaacagcctgggcaacatggcaaaaccccatctctacaaaacatgtgaaaattaaccaggcatggtggtgcatggctgtcatcccagccaccccaggaggctgaggtgggaggatcgattgagcccaggaggttgaggctgcaataagccatgattgcaccacggctgggtgacagcctgggtgacagagcaagaccttgtctcaaaaaaaaaaaaaaatagtatacttaaagtgcttcttaataactagtgataatggctttctatattgaataagtttcatggtatggtctagttgaaatttgagaaaatagacttaaaagtcagtttcttataattagggcgctttgtaattcattattaaactgctgccagttttgttgattacttccctgtcagtttaaagtatgtttttaattgatacagattcagcgtttgttggaagcacagtctctgatgccctgttcccctaagacaactgctgttgaagacacagtgcaagctggaagacaaatggagttggtttctgtggaagcacagtcttcccctggcttgcacatgagaaaaggtgtaagcattgctgtgagcacaggtaatttcagtttttttttaatttgtaaggaaattgttaaaaatgcttttcatatctggtttttgaattttatgttcaaattggtgcatggtgcagtaggaccaaaaccaaggtgatgagagtatgacttaagtttttgtgtgattttagtctttgtgaaataaaactacacctgcaaactgcataacatgataaagtgtttgattttgctacttttctaggctggacccaattctggttttttttttgttttttgtttttttttttgaaatggagtctcgctgtgttgcccaagctagagtgcagtgtggtgcactctcagctcactgcaacctccaccatcctaggttcaagcaatcctcctgtctcagcctcccaaagtgttgggattacaggcgtgagccaccgcgtccagccagtcttgtttgtattaatttattttcataaaatcacccaagtatatcctcagagtagaaaccattttgactatgatttacttttttttttttttttttttgagacggagtctcactccgtcacacaggctggagtgcaatggcatagtctcggctcactgcaacctccgcctcctgggttcaagtgattttcctgagtagctgggactacaagcgcctgccaccacacctggctaatttttgtatttttagtagagatggggtttcactatgttggtcaggctggtctccaactcctgaccgcatgatccacccacctcagcctcccaaagggctgggattgtattacaggcatgagccactgtgcccaggctactttttggttttaaccatctgtttaaaccattatgtattagcaatattccccaaattatagaatgcctatggctcgtggtacaaaagatgatttagggtgttatacagattaatatttatattttgtaaatatatcttttccaatactcataggtataaatacaataagcatatcaaatctgtgattttagagaaataatgaggctcagtaaaaaaagagttaatttaaagaaagagtaagtaaacaatattacatgcaaatagctctgaagataggtgtaagtgcttcataaagattgagaaattggctgggcgcagtggctcatgcctataatgtttgcactttgggaggtcaaggcaggtggattgcctgatgctaggagttcgagaccagcctggtcaaaatgatgaagccccatctttaaaaaaaatacaaaaattagccacatatggtggcgcacacctgcagtcccagctactcgggaagctgaggtgggaggatcacctgagcccagggacgttgaggctgcagtgagctgtgattgtgtcactgcactccagcctgagcaacaaagtgacaccctgtcttaaaaaaaaaaaaaaaaaaaaaaaaagattgggaaacacttgattttttttaatacctgcctgatattacagatattacagatgtctgatgcatcaccaatgtagtcttttaaatattgcatttaagtgtcaaaaccagagaacctagggatttgtattttatatattatctcatattattcagagcagcagttttcaacatacacaccccatcccacggatcatattcagaatcttaatatgtaaagcaaatcatttcagagccacccttcttgaaaaagcagaacccagaatgtgcccttccacccgacccgtcccctagtgttttgtctttctgtcttccacctacctcttcctggcatttctgaggaaatataatctaaaaacttagttctaagtaattgtgtgtgtgtgtgtgtgtgtgtgtgtgtgtgtgtgtgtatatatatatatatttttttttttttttgagccagagttgcccaggctggaatgcagtagcacaatcacagctcattgcagcatcgacctcctgggctcaagtgatcttacacctctgcctcctgagtagatgggactacaggcacaccaccacacctggctaatttttttgtattttttttgtagagacaggatttctccatgttgcccaggctggtctcgaactcctgagctcaagtgatcctcccgcctctgcctctcaaagtgttgggattataggcgtgagccattgcacccagccaatatggctattcttaacaaaggtttggcagagtattatttttaaagttgaatgtttgtttcagtatcttaaattatttaacctccaggtgctagcttgttttggaatgcagcaggtgaggatcaagagcctgactctcaaatgaagcaagatgataccaaaatttccagtgaggacatgaatttttctgtcgatattaataatgaagtcacaagtcttccaggtagtgcatcttcattaaaagcagttgatattcccagttttgaagagagcaacattgctgtggaagaagaatttaaccagccactttctgtatccaagtaaggtctctttgatttagtctttcatcctactttcaaaaaaaattttttttgatagacaaataataattgtatatatttgtggggcacaatgtttagatgcatgtttacagtatggaatgattaaatcagaccaacaaatctatcacttcacatacttaactttttctgtggtaaaaacatttgaagtctactattagcaattttgaaatatacaatgtattattattcattacagttgctgttctgttcaggtttttttttgtttttaattctaatttctttaaagtcttctaactcagaaatgatatattttctaactggtattttcttttatgtctttacttgatatgatttctatgtaactgacaactctgagccttctagaaccatttccagatgtcagtctttggctatattaacagtctggatgaatcagaaatcggaagaaaacttcaaaaatacacaagctcaggcctcaccctagaggatctgataatattaggttccagatacagatggagaaatttttttttttttttttttgacggagtcccgctctgttgcccaggctggagtgcagtggtgcaatctcggctcactgcaatctccacctcccgggttcacgccattctcctgcctcccgtgtagctgggactacaggctcctgccaccatgcccggctaattccgtgtttgtatttttagtagagatggggtttcaccatgttagccaggatggcctcgatctcctgacctcgtgatctgcctgcctcggcctcccaaagtgctgggattacaggcgtgagccaccacacctggcggagaaatttcttttatttaatttatttatttatttatttatttatttatttatgagatggagtttctctcttgttgctcagtctagagtgcaatggtgcgatcttgactcactgcaatccctgcctcctgggttcaagtgattctcctgcctcagcctcctgagtagctgggattacagacacctgccaccatgctgggctaattttgtttgtattttttttagagatggggtttcgccgtgttggccaggctggtcgtgaactcctgacctcaggtgatccacccaccttgacctcctaaagtgctggaattacaggcatgagccactgtgcccagcctattttattttatgtatttattttttgagacaagagtctcgctttttcacccaggctggagtgcaatggcactgtcttggctcactgcaacctctgcctcccaggttcaaggcattcttgagcctcagcctcccaagcagctgggattacaggcgtgcgccaccacgcccagctaatttttgtatttttagtagagatggggcttcccatgttggccaggctgatctggaactcctcacctgaggtgatccgcctgcctcagccttccaaagtgctgggattataggcatgagccactgtgagatggcgagatttctaaagattctccgtattgccattatatataaaagagtctatttttgagtgatagaaccttaatatttatatatgaaatgttatctgagatttgcttcaaattaattctgtgggagaatgaaatggctaggagtataaatgaaataagattggctatttggtaatttttgaaactgattgtatatggtgatttgtaaaataattctctcatgtttgaaatttttcattatgaaattttccattaaataaggatcgtaggctaggctcagtgactcttacctgtaactgggcacggtggtgcacacatgtagtcccaggtacttgggaggctgaggcaggagaattgcctgaacctgggaggtggaggttgcagtgagccgagattgcgccactgcattccagcctgggtgacagagcaagactaagtctcaaaacaaaacaaaacaaaaaacggattctaaagtaaatttttttttttttttttttttttagatactcgctctgtcgccctggctggagtacggtggcgtgatcttggctcactgcaacctcagcctcccaagtagctgggactacaggcacgggccaccacacctggctaatttttgtgtttttagtagagacagggttttgccatgttagccagggtggtcttgaactcctgacctcaggttagccacctgcctcggcctttcaaattgttgggattactggtatgagccactgcacctggcctaaagtaatttatatcctcagcaaatttggaaacaaactcagcaaatatttgagtttctggtacgtgctaccacaaaactagacactaaatatcaaatactaggttaggcaaagctcctaactttatggaatttaaccacatgagcagcaaataacatagtttcagatagtgacaactgctctgaaaaagtaaactagagtgatcaagtggagtgtaactgggatggtaacctgggaacaaggtgttatattaagtagagtggtaaaggaaaccatctctgtgagggggtgacatttgagtagtgacctgaatgatgagaaggagccagtcatgataatatctggggatgagtattccaagtggaggaaaaagcaagtgtaatggcaagtgtgggtttaaaagttacagaaaaaagcatgaaagccagtgtggctggacatagtgattgagagggagagtataggaaatgaagtctgagatacaggcaggagccaagttatatggggctttgtaggatatagaaaagattttttaatttattgcatgctcattaaagctagtggaggattttagataatggagtgttatgatctgattttcattttttgaagaccattctaattgtttcgtggagaactgaaggatgttaagagtggaagttaagatactaactgattaataaactaaagaccaagtgagatgaagatgtcttggacttgtggaattcgtggaagggatcaggtgtaggataaattttgaaggtaaaagaaaaatgtaggtataaaacatcccaggataatagcacatgaaacagtttaaagaggttaatttgaaattcaagaccaggctaggcaaaatagtgagaccctgtctctataaaaaaatattttaacttagctgggtgtggtggtatgtgcctgtagtagttccacctactcaggaggctgaaacaggaggatcgcttgagaccagaagtttgaggttgcagtgatctatgataagtgccattgtactctggcttcaataacagagtgagactccatttctaaaaataaaaaaaggtgaactggtaaggtgacatggggcaggcagtggattactttttagaaattaataagccttgtgatatttgacattttaaatcattgtgattacaataatggttaagacaataaacatgtcccttcagaaaactacagagaaacatctccttttagtatagtatatgttttaatcatatgataaaattaagcactcattgtgtgtgccacagtatacagaaaagctcttttgtgtatgttagattgagttcctgcagggtaaggatcatagtaatttccatatttttagaatttgctgggcttggtggctcatgcctgtaatcttagcactttgggaggccaaagtgaaccgattgcttgtgctaaggtatttgagaccagcctgggtaacatggcgaaaccctgtctctaccaaaattacagaaattagcccttggtcccagctgttcgggaggctaaggtgggaggattgctggagcctgggaagttgagtctgcagtgagctgtgatcacgccactgcactccagcctgggtgacagagagagactgtttctttttttttttttttttttttttgagacagtcttgctctgtcatccaggttggagtgcagtggcgcaatctcagctcagctcactgcaccctccgcctcccgggtacaagcagttctcctgcctcagcctgccaagtagctaggattacaggcacttgccactatgcccggctaagttttgtatttttagtagagacggggtttctccatgttggccaggctggtctccaactcctgacctcagatgatctgcccgcctcagcctcccaaagtgctgggattacaggtgtgagtcaccatgcccggccaactctgtttcaaaaaaagtaattaaaaaaaactacagtttgacccagtgtctggttccccatggggtgagccccaaagtaggtctgcagtttatttagaataattatagaaactgaggacaaagaggagcaaaccatgggatctttatttattctccttaactctgtaaactgcagactactttctagaataatgggggttttcagattggaattttaaaaaatatccaatcttgtgtttttttttttttttttttttttgggagatggagtgttgctctgttgctcaggctggagtgcagtggtgtgatcttggttcactgcaacctccacctcctgggttccggagatccttctgcctcagcctctcaagtagctgggattacaagtgtacgccaccacacccagctaatttttgtatttttagtgaagacggtgtttcaccgtgttggccaggctggtctcgaactcctgacctcaagtgatctgcttgtctcggcctcccaaagtgctgggattaaagatgtgagccaccatgcccttgttttggctttttttttttttttttaactttagaaacagatctgagttaattgatagaatgaagttaattgctttttcagagcaattaattaactctgtcgatcccaacacataactagatgtaaatctaatctttgctcagcattgatttgggttgttgatttggattaaatactttctccagtgttgtctatgatggttttggtgcttctctgggatccttctcgcacttttggtctgattcgtgctctggttcccactgctgagtattcatagatgacacgcaactccagggcttccagtcccccttagatgtcttgttggaccagtgtttctgatgttgaagtagtctgtgaaagataaatttatttgccttgcagcttcattggttattgattactttttcccagcagtgagtagtggtatgtagtatttatagagactttcttttaaaatgatccatatttttctttagaagctgtgctttgggcatacctaataatacttggcatattagaagcattttaaaattttttatttaatcttaaatcttttgttgagatttgacatttttatttattcctttttcttccccctaaagagtgtagacatttatttatttattttggcttataaacaacagaaatttgtttctcattgttctgaggactggaaactccaagattgaggcgccagcagatgtaatgttttgtgaggacccatttcctggttcatagttgatgcctcttccttgtgtcctcacgtggtgaaaggagctatctagctcttggtgttattttattaaggacccttgtaatctttaatgatttgggtttgttctttttcagttttagtttttgcttcctaggttagacaccaagacagatatttttaaatccttgaggccaggtgcagtggctcacgcctgtaatcccagcacttggggaggctgaggcaggcagatcacctgaggtcaggagttcgagaccagcctggccaacatggtgaaaccccatctctactaaaaatacagaaactagctgagcatggtggtgcatgcctgtaatcccagctactcaggaggctgaggcaggagaatcgcttgaacccagaaggcagaggttacagtcagccgagatgacgccactacattccagcctgggtgacatggtgagactctgtctcaaaaaaaaaaaaaaaaaaaaaaaaaacttggaatgaacaaataacatacctaaaatatttaaatgctctaaaaatttccattgccatcaagttcaggagaaatcaacagcttgttttccaggcttcaaagaaagttgtcttaaatataagtaacacaagttaaaaggtaccatggtttagtttatatgcagcctgttaaaacgaggtgttttcgtttttgtttcttatagaaatagggtcttgctctgatgcctaggctgagtgcagtggtacaatcatagctcactgcagcctcgaattcctgggctaagtgatcctcttgctcagcctcctgagcagctaggattacaggtgcatggtgtcacacccagctaattaaaacaaattttttgtggagatggggtctcgatatattccccagtctgatcttgaacttcttacctcaaacttctcttgccttgctctcccaaaacacagattacaggcatgagccactgcacctggctaagatggggtgtttatgtagcatcatcactaagagctaaaaatacaaccaggtgctgcttgagtcttaacccttttttctaaagttactacatttcaattatatgttaaaggtacctcaatgactaacacattatatatccttcccagcagctcttctctagttgtgagaaaagaacctgatgtacctgtgttctttccaagtggccagctggcagaaagtgtaagcatgtgtttacagactggaccaacagggggtgccagtaacaattctgaaacatcagaggaaccaaaaattgagcatgtaatgcaacccttgcttcatcaaccatcagataaccagaaaatttaccaggatttattggtaagaaaatgtagagcatttcatctttttgagaaggttatttagtataggatatactagttaagcttttcctaggtttaaactgattgagaccttaagataaaaagattttttgtctaattaacaatgtaatttttcttttagcttttcataaattataacttaaattcactaatttaccataaacatacttaagtacttagaaaaacacagctttatttttaaagtataaatattgatattatgcctaattcaaaccaaaattagtattagaaaataagcaagagtttctcggaaatttgaaaattggaaagtagtgggatatttatgataacatttactgattttagttcaggtaagccaatgtttattaaatacttagcttagtctaagacagtaggctaagtgaaatcgataatataaaggtgaatatgacactctgtgcccttgagagcctaggggaaacaacagcacatgcagactagtaacaattataagacaggctgttgaggagtagtagtgtaaagcaaagagaacacagaataaaggggtaattctggttggaggaactagtattataaaacttaaaatgtgatctgggacttaaaggatagagaaaccctgactgtcactttcatccaaattgtagaacatttgatttgtccatttgcgagaaggcaacatacttcacagggccctatgtattcatcaatgaacacatatttgttatttgcttgctaggtcctaggctggtgctagcagcttgtatgctcagggaatgaaatatgcagaaatagtatcacaggtcattcttactttgagaaagtgagaagaaaaggagcctaactctgtgaacatcataaaggcctaatttataactgaaacattatcactttgcaaacgaaagcattatttaaaacttgtttataaaaaatttagcataagtcctcgaaaatacttggagaattactcaaaagatttttttttttttttttgagacagagtctctgtcacccaggctagagtgcagtgacatgatctcagctcactgtaacctctgcctcccaggttcaagcgattcttgtgcctcagccttccaagtagctgggactacaggcacctgccaccatgcctggctaatttttttttttttttttgagacagagtctcactgtgtttctgttgcccaggctggaatgcagtgacatgatctcagcttactgcagcttctgcctcccaggttcaagtgattctcctgcatcagcctttcaagtagctgggaccacaggtgcacgccaccacacccggctaatttttgtatttttagcagagatggggtttcaccatgttagccaggctggtcttgaactcctggcctcaagtgatctgcccgccttggcctcccaaagtgctgggattacaggtttgagccacacgcctgtactcaaatgatttttaaatacgttggtttttatttttatttgtttattttctattttatttatttattttttttagacagagtctcactctgtcacccaggctggagtacagtggcgccatctcagctctctgcaacctgggccttctgggttcaagtgattctcatgcctcagcctcccaaatagccgggaccacaggtacgtgccaccacacccggctaatttttgtatttttattagagacagggtttcaccatgttggctaggctggtcttgaactcctgacctaaagtgatccgcccaccttggcctcccaaagtgctgggattacaggtgtgagccaccacgcccagcttatgttggtttttaagtgaatgaagtctgaacaagcattctgttttctctagggtctgatgaaattgttcattaggatgtgcttctataaaaacttcataatacctgcaaataataccataatacctgcctacttgatactttgtggaatttgacaagatactgattttccctggccttgttgtatcattaaggtcttactgtaaaattgttttttaacttttttttaattttaatttttttagagacagagtctcactttgtcacgcaggatatagtggcacaatcacggctaactgcagcctcagcctcgtggctcaagtggtcctcctacttcagcctcctaagtagctggaactacaggcgtgtgccaccgtgcccagctaatttttagttttttgtagagacaggatctcgctgtgttgcccagggtcttaaactcctgggctcaagcgatcttcctgccttggcttcccaaagtgctgggattataggtgtgaaccaccacacccagccctaacattgttaatagtgatttttcaaaaaaattttttttctttttgtcagggtcaagtaaaccacctattaaatagttcctccaaggaaactgagcagccgtctaccaaagcagtaattatcagtcatgaatgcaccagaacccaaaacgtttaccatacaaagaaaaaaacacatcattcaagactggtggacaaagattgtgtccttaatgcaactcttaagcaactaagaagccttggagtaaaaattgattctcccactaaagtgaagaaaaatgcacataacgtggatcacgccaggtaacttttaaaattttgttttaaagagtgaataaattttattttttaaaaatttttatttatttttgcccatcattggctagatgaataaattttagatgtattgtggcaatctcatcagaaaagttacgtttgtgcctcaattgagttgattcacgatttattcagggcctaccatatgcatgatgaataagagattcttcattttagtgggagagagggttacatacataagtaatttgagagatattgtgggatgactcctggctggataggccaacaaaatactttaggagtcttgaggaaagagaaaggagttttgcttggtagcatctgaaaagtctttctggaggtgataaggtctgttccagctactggatgtacagttacacagtcgtgccatctaaaaagcaaaaatatttcttttttctgggaatgtgcccaactggtcatgtccttctgttcagattcctttctaccaaagatgacctcagcacataacttattaaaaagaaaataaagtctggagattatattattaaggctggcatattttctgttaattattttttgttttctaatttaaaaagtaataaaaattcatggttttaaaaaacaatacagaagagagtgtaagataaaatgcaaaagccacaactccccacattcctgcctgactcttccaaagttacttctcttaggccgggcgcggtggctcacgcctgtaatcccagcactttgcagggctgaggcaggtgaatcatgaggtcaggagttcgagaccagcctggccaagatggtgaaaccccgtctctactaaaaatacaaaaattagatgggtgcggtggcgggcgcctgtaatctcagctacttgggaggctgaggcaagagaattgcctgaacccggggaggcagaggtcgcagtgagccgagatagcgccactgcactctatctagcctggacgacagagcaagactcagtcaaaaaaaaaaaaaaaaaaaaggccgggcgcggtacctcacacctgtaatcccagcactttgggaagccgaggtgggcggatcacgaggtcaggagatcaagaccattctggctaacacggtgaaaccccgtctctactaaaaatacaaaaaattagctgagcgtggtggtgggcgcctgtagtcccagctactcaggaggctgaggcacgagaatggcgtgaacccaggaggcagagcttgcagtgagccgagattgcgccactgcactccagcttggatagcaaagcaagactgtctcaaaaaaaaaaaaaagcaaagttacttctcttaaccatttcttttgtattctagaaatgttccatgcatgttcaagtatatgtgtatgtgataagctttgtgatttgattttttgttgttgttgctgttgttttaattttgagacagtctcgctctgtcacccaggctggagtgcagtggcatgatcacagctcactgcagcctcaacctcctggactcaagtgagcctcccatctcagccttttgagtagctggcactacaggcttgcaccagtacttagctaattttttattttttgcagagatggtgtcttgctatgttgcccagtctggtctcagacaaactcttagactcaagcaatcttcccaccttggcctcccaaagtgctaggattacagccgtgagccactgcacctggcctgtttttttgtttttgttttaaacatgatattataatatcttggatacttttccttatagggatatacagttctttctcttgtatttaaacagctgcataatattcttttgtacccttgtactagaatatattgaaccccagtgctctattaatggacctttaggccaaatctcttatttgttatttcaagcaatcctaagtgaacatcattctacaggtacaagtatctttgtaggataaattcctagataggcaggatcaaagagtatgtgcattcaaagtcttagtagatgctaccattgctcatcaaatagttgtaccagtttatattcctaccaatagtgtaaaagagtgaggctagcatttttgagttttttatccatgttgcaagatagaggctatgtatcctaacccttcccctcttgtcagaactgagaaccaacttgtcacgttagttgtggtttcttactattttaatgttgctgtgatgatcttttgcaaatattgcttttcagttttaggattatttccttagaatagaatctcggaaatggaaagactaaggtaaaatgatacaaaaattttaaagctgttgctaagttgctttctgaaagagtaagtattattaccagctacacatatacatgtgtgccagctaccatttcaccaatacattcacttcaacaaatacttactgagtttctatgagccagcctataagagatatcgtaatacacaagataacctgataaagaaagacatctttgttctcatagagtttacagttcagtggggaagacacagatagtcaatatcttttatgcctgctatgaaatggaaggatagggaatgccatggaatcacataggaaaggtagctaacttaatttataaaggaaaggaaaaaagaaaggtagctaactttaggagtatttcatactgtgttgtaattgatctacatcaaaatggccccttttaaagatctgtactaattaagaccaaaaatatcttaaagttttgaaagttatattttattattgatgcaatatctgtatatttaaaacttttttttagtttttaaaaataggatcttgctctgtcacccaggcctgtcacccaggctggagtatgatggtacaatcataatttatgtaacctcaaactcctgggctgaagccaatcctcctgcctcagctttttgagtagctgggaccacaggcgtgtgccatcatctctatgtcattttgattaaataggaaactgtactgcaatagtttctccaacataagagttaaatttagtttccctgttatcttaggctccgtctggaatatcctcccagcctatctgaggcctacctgattaattcgcattgtttcagtttgacttaaacttagttttttagtataatgtcctaccattctctaccaagttccagcctacttgccattggcatttgcaagattccttgatgttacttttatctgaggtgctctttttttttacctttctgcttgccaaaatccttatccttcaaagctgaactcaaatgtcacctctttggtcagtttcctggacctctcagagtgtattgatgttttgtactcttattgcccaggctggagtgcagtggcatgatctgggctcaccataaccttcacctcccggcttcaagtgatttctcctgcctcagccttcctgagtagctgggattacaggcatgcgccaccatgcccggctaattttgtacttttagtagagacagggtttctccatgttagtcaggctggtctcgaactcccaacctcagatgatccacctgcctcggcctcccaaagtgctgggattacaggcgtgagccaccgtgcctggccgatgttttgtactcttaaaatacctcgttctcagtaaattgtagcatgtacttatgacacattttcagcaagatttttttttttttttttttgagatggagtctcgctctgtcgcccaggctggagtgtagtggcatgatcttggctcactgcaacctccgccccccaggttcaagcaattcttctgcctccgcctcctgagtagctgggactacaggtgcgcaccaccacgcccagctaagttttgtgtttttagtagagacggggtttcactatattggccaggctagtctcaaactcctgaccttgtgatctgccagtctcggcctcccaaagtgctgggattgcaggcatgagccactgctccagcgaagattttatatagttctaaatcctcattgcctctaccactaacttagtgggccttcaatgagtcatttgctgaatgaacgacattcctcctactcaggtcatcaccgacgcttacagtgaaggttcatttttagtgtctttgtagtatttactgtcagtatttataatcttatattgttaactttttaacatgtgtaggtataatataactggtatactaaaagtttataaggccgttgtttagaatgtaagacacatttttctatagaaacagtgttacagattataggttgaatattctaggaaactaatccttataatccatgctgttcctctagctctgtaaatcagccgtcttttatcattgtgtctatgtgaaaactcatttcatgttccagttctggactccaggagcacatcattccgccagaagagtggctaaggcaggggaaggaagacctgctttctattttcctgttaatagaatgccgcagagattaagagagtctaaaggcaggaaggcagggaaaaagggtgccagacaaacctagaaattgtgcaggaaatggagattgtgggttcgaggtctggaagcaacctctacatattcccaattggagtgactttttgaattcaaaacctgtctcaagtagtctctctagttgcttctttaccttgcttcctggctatctgcttagtagttgaaaaactgtgtaggataagtagtagataactaatctggattcaaataggatcatgaatcaaagttgacttttttttttttttttttgagagacagggtctcgctctgttgcccaggctgcagtgcagtggcacaatcatggctcaactgcagcctcaatctcctgggctcaagtgatcctcccactttagcttcctgagtagctgggactacaggtgtgcagcagcacacccagcttatttttatttgtagagatgggggtcttgattgtcatctgagttggaataattttagagcttcccataaattgttgacatgtggctaactcaaatttattcatggactttcatcattccttgtggctgcacatctaatgagattttaacataggcatatatttgtgctcaggcttttaggatttgattagtggaatgggttcctttttgcttttcgtcttaattaccctagtgtttatatgctttggtttctgagtattattgattttttttttagtgatgtggtctctattttgcctagggtggccccttgaatgcctgggcttaagcaatcctcctgcctcaggctcctgagaagctaggactacaggtgtgcataccactgtgcctgtcttgatttgttttgctattaaagtaatgatatctcattgcccctagcccaccctccaaattgaaattggctagcttgtgttaggcattgaaacttgaatagccttctaaactgatattgactactttatggatcttttaaccattctataaaagaagccctagttaaaattaagaggctgggcatggtgtctcatgcctgttatcccagcactttgggaggccaagatgggaggatcactggagctcaggagttcaagaccagcctgaacaacatagtgagaccccatctttacaaaaagaaaaatttttgattagctgggcatggtggcatgcacctgtagtcccagctacttgggaggctgaggtaggagggtcacttgagtctgggaggtcgatgccatggtgagccatgattgcgccactgcactccagccttagtggcagagtgagaccttgtctcaaaaaaaacaaaaaaaaaacccaaattagacctgctttctttaaatatttaacattttgaattagtagtttttctttgcttttatcaaattatttacattaacattatctatagactgaggaaataggcaaagtagaaaaagacttccaaaagtattgtcactatgaataaaagaataatgtctggataaattagtagtatctctttcatcttattaaaatagtcttcaaagcattaaatgccaagaagattaagggagaatttcaaggttgtaaagaccagcattagtgagcacactgttccattgtttggtgatggcatcactggtttcagagaatttttttttttttttttttttttttttttttgagacagagtctcactctgtcacctaggctggaatgcagtgacgcaatctcggctcactgcaacctccgcctcctgtgtttaaccgattctcctgtctcagcctacagagtagctgggattacaggcacccgccaccacgcccagctaatttttttgtatttttagtagagacggggttttgccatgttggccaggttggtctcaaactcctgacctcaggtgatctgctcacctcggcctcccaaagtgctgggattacaggcgggagccaccatgcctggcctggtttcagggattattagtggttggaaatagttttttgcgaatttcaggtgcttataagaatgaaaatatataatggttgtttgatttttgtgggtctgtgaatgcaagcagtggctagcacatataaaacagctgaatttcttcatgggatgatgtagaaagccatagcatatttgactagaatataatgttcaccacaacaaatagtgcacaaaggactctgatagaaaaaatccaagttactgaatatagtacagtaaaagagtggttgcagagccccagagagtaaggcagtcatggattatctcagcttgctatgtactatttagcttggaaaaaatagctcaaatctctattcctcagttttctcaactgagagtaaatataacaatagtacctactacttttattcattcaacaagtacttactgagtgcctactatgtgtgtccaggcatcgaggatactgcagtgggggccaggagaacagacaaaactctgtccttattggctttcatgagggtgctagacaataaataagaatcgagcattgattgaatatgtagatgtgtgtattcaatgtatagaccgcggtaagtgctaaaaagaaaacaaaaaagtaggggaaagggaatgtaagatgttgaaatggagaataagatagaaatattccatagagaatacctccctgacaaaggttactgtaaggaatgtatatgaataatgcatgtaaagcattaatagagtacctggcatatataacgactcagtaattagcaggctgggtacagtggctcacgcctgtaatcccaacacttttgggaattcgaggagggaggctcgctttacctcaggagtttgagagcagcctgagtctgtaattgtgccaacattagcaaatgacatgcagttgccactgtactctagactgggcaacagagcaagaccctgtctccaaaaaaaaaaattagcagctatttattatatatgtgatattaaggaaaaggtaagtcagttgacttaacactaatcaaagtaagttgaagattataactaatgaaaaaagtattcgtgtgtgtgtgtgtgtgtgtgtgtgtgtgtgtgtgtgtgtgtgtgtataagcccatatccagagactggttgatgttttttattaattgcaaatggaatctcttcaactatgaacaatttaattttctgagctacttactaaagcttgtactgttatataatcaaatgtgttttgtgtttgattttatttttatgttttactttacattaaacattagctgatctcttgtgctgtttgggctaatagtcgtaaattaaatgactcatagctatgttgatgacttttacatttggggccttgtatttgttcttaaaaccatgactgatatacagatttaggaaaattaatttgtattccactttaaacctgtaaatcatggattaccttctaggctattatttgtatccctttttttattttttctttattttttcttttttaagagacagggtcttgttctgttgcccaggctggagtgcagtggcacgatcatggctcactgtaactttgaactcttgagctcaagcaatcctcctgcctcagcctcttgagtagttgggactataaatgtgcaccaccatgcctggccaatttttaaatttttttgtagagacaagatcttgctatattgcctaggctgatcttgaactcctggcttcaagcaatcctcccacctcagtgccccaatctgctgggattggaggcttgggccactatacccagcccatatgtatcctttgtgtatctggatcatcaagacttagatgtctgagtagttagataaaaggaccatgaacttaaagctgaagatcttttgttgcttgtatagaatggaacacattgagaactatgtattacttagaatatggtaaatgatggcttactactttgtgtctttcagtgtgttggcatgcatcagcccagaagcagtgatctctggattaaactgcatgtcatttgctaatgttggcatgagcggcttaagccccaatggtgtggatttgagcatggaggcaaatgctatagctctgaaatatttaaatgaaaatcagctgtcacaactgtctgtcactcgatcgaaccaaaataattgtgacccattcagccttctccatattaatacagacagaagcacagtggggcttagtttaatttcaccaaacaacatgtcatttgcaaccaaaaaatatatgaagagatatggactcctacaaagcagtgacaatagtgaagatgaagaggaacctcccgacaatgcagatagcaagagtgaatatttattgaatcagaaccttaggtccatacctgaacagcttggtggtcagaaagagccttctaagaatgaccatgaaataattaattgttctaactgtgaatctgtggggaccaacgcagatacgccagtattgagaaatattacaaatgaagttttgcagacaaaagcaaaacagcagttgactgaaaagccagctttcttagtaaagaaccttaaaccaagtcctgcagtgaaccttcgaaccgggaaagcagagttcactcaacatcctgagaaagaaaatgaaggggacattacaatttttcctgaaagtttgcaaccttctgaaacgctaaagcagatgaatagcatgaattcagtaggcaccttcttagatgtaaaacgtctcagacagttaccaaaattattttaaccttttaactccctgcccttttaatacagggacagggtgtctcctgaagatacttagggaaaacaggagcctaccacaaggctcctgatcattctggagtcactgtttcttggtagcagccaattgggaagagtgacttctgtgagatggctggctggtgataggactaagttctcattgttcaaatagagctgttcaacatcactgaaacctttaagaaaagccctgagatcagttattcctacaagtttaagtagtagacagatactatccagctctaagtctcaactgctcttttatactgtacttttttttttgagacggagttttgctcttgtagcccaggctggagtgcaatggcaggatctcagatcactgcaacctctgcctcctgggttcaagcgattttcctgcttcatcttcccaggtagctgggattacaggcatgtgccacaacgcctggctaattttgtatttttagtagagactggtttctccatgttggtcaggctggtctcaaactcccgacctcaggtgatccgcccgcctcggcctcctaaagtgctgggattacaggcgtgagccactgcgcccagctatactgtatattttaagaagttccagcatgttgcatctctgcatttatcctatatcattaaaagaacataagttatcatggtgttgggtaaattagcgaaatcaacccttcctaagtttaagggaaaagttatttttaaaaacaacttaataaaaacttacactcttttatacaagagtgtatttccccttaattaggatgcatgttgattaaactcgagatacagctttttgcagtatggtgggttggttttggtgtaacatcttcaacatgtcacactggctatcaaagaataagaaaattattgagtatgagtgtgttttataaactttctgagtttttcagatgtcttaatattttttaatagaacttaataaaatgtctagattgactattttcctttgttgtctgttatagtttattctccactttttaaaaaactcttagactgcccccaaattacaaaaataatacagagagttcccgtatacccttcttccagtgtcctccagtgataatatcttacataagcatagtaaatgagcaaaaccaagcaattgacattggctataatgctaataactgaaccacagacctatcaggtttcacaagtgtttacatgcactcatttatttactttttggtatatagctttatgaaattttatcttttttttcttcttcgagatggagtcttgctctgttgcccaggatggagtacagtggcgtgatcttggctcacagcatcttctatctcctgggttcaagtgattcttgtgcctcagcctcccgagtagcttggattacaggcatacaccaccacgcctggctaatttttatagtttcagtagagatggggtttcaccttgttggccaggctggtctcaaactcctgatctcaagtaatctgcccactctgcctcccaaagttctgggattacaggcatgggccaccgctcccagccatgaaattttatcttttgagacggagtcttgctctgttgcccaggctggagtgcagtggtgcgaccttggctcactgcaacctctgcttcccggattctagtgattctcctgcctcagcctcccaagtagctggaactacaggtgcatgccaccacacctggctaatttttgtatttttagtagagacagagtttcaccatgttggccagtctggcctcaaactcctgacctcgtgatctgcccacctcggcctcccgaagtgctggttataggcgtgagccactgcctggctgaaattttatcttttatagaatcacataactactaccatagtcagcatacagaactattccatcaccacaaactccctagtgctacccttttaaaacacacggtctctccaaccctaacccccagcagccagtgatttgttctccaccactagaattttggccttttgagaatcttttatataaatggaatcatatagtgtgtacctttttgaaatttgctgttttcacttggcatgatgtcctaagatacatccaagtcgatgagtgtatcagttctttcctggcacatcccccacaacctttttaaaaggtcttaaattgttacatttgaatataaattaaagagtcctcattgagttgaaagataaggcttttctgatgaagttaaattgagatgttgttgcttcatatcaaagttgatatgtaaactggaaataaatggactttggatccattttcaacccagctgtggctttctgagaaaacctgatatcactttacagtagcaagcccaagtgtagtaacatggtggctccctactcttccccactggagccatggaccagttagtgcatctttccctacatcattgctctttcaagttaaaattaagacatgtaagtggcagtggtgatgtcttgccctgtgtttccatgcacattgtttgagactttagttattttaataaatagcataaaaattcacttacatgttttattggagtaagtttacgtaatggaattgtcagtgccacttcaagtgtgttctgtttagccctcagtttcactcaacgagtgtagatacgatttatattgcacactattgaagaaacagtgaattaactgacagcctcatcaagtacctttatcactgggagccctgtaatgtttataccaaacgaagctatcttaatagtaaaaatggaacctaagctttttaggcaaagtctaattaccacatccaatttaaggccacatttaattttttttttttttttttttgagacagagttactttttcgccctggctggaatgcagtggtgcgatcttggctcactgcgacctccacctcctggggttcaagtgattctcctgcttcagcctcccgagtagctgggactacaggggcgtggccccacacccagctaatttttgtatttttagtagagacgggggtttcactatgttggccaggctggtctcgaactcctgacctcaggtgatccacccaccttgacctcccaaagtgctgggattacaggcatgagccaccgcacctggccaaggccacatctaattaaaatgtctaagcagttttggagcctgaatttagactgcagattaattcaacaaaacaatgtctctttctactaaacatgtgccaagagaagaggaaccattaccgaagcctactctggaaggtgttttacaatgagaaggttgatagagtttggatgtttgttcccaccaaatctcatgttgaattgtaatccctaatgctggaggtggggcctggtgggaggtgtttgggtcacagggacaagtccctcatggtttggtgttatcttcaagatagtgagttcaggtaagatctagtcatttaaaagcttaaaaagtgtgtggtgcctaacccgcacccctgccaccaccgcaaacctcctttctttataaattacccagtctcagatgtttctttagagcaatgcaaaaatggcctagtacaagttatttggcaaattagttgctatgatagcttttaggcatctttagagaaagcattagtactgggaaaattggattttaaaattttaggtcgggcgcggtggctcacgcctgtaatcccaatactttggttagccgaggtgggcggatcacccgaggtcaggagttcgagaccagcctggccaacatggtgaaaccccacctctactaaaaatacaaaaattagttgggcgtgatgccactcccctgtagtcccagctactcgggaggctgaggcaggagaatcacttgaacctgggaggcagaggttatggtgaatcgagatcgcgccactgcacgcgcctgggcaacagagtgagactccatctcaaaaaagaaaaaaatactttggagatacttgcctatcaagtgacatatctctgaatttctttcctccagtcctgcagcatactgtttataagataacatggatgctacttcaaatggaataggaaaatgatggaacttatattacctaacttctgggaaacaaacctgttagtccgagtcctggccagttggcaaccactcttaccccacttcgccaaaagtctcctcactcaacctctaagccccttgccggttagtttaaatcaataactactccatgctccacttttgtcctctgctttatcctgccctgtgctaagccccacagaagtggatgtagacatgttaaacagtatccttgcctttgccagctgtaaagattctacagaaaacagatacacccaggaaatagtcacaagagttatgagagtatgatgaaaagccaacatgaatgatctagactctaaggagccaaaacaatgtattggtgatcatgtccatctttttaagacttactgtgtgctcacagggcactgtgcagagcacttcacatgcattagttcatttaagactcctggctgacaccagttggtgatagctatggtttgaatatctgtcccctccaaacctcatgttgaaacttaatcttcaatgtggcagtgttgagatgtggggcccttaagagctgattgggtcatgaggattctgccctcttaaatgggttaatccattcatagattcatggattaatggtttatcatgggaatgagactggtggctttataagaaaagggaggccaggcgcggtggctcatgcctgtaatcccagcactttgggaggctgaggcgggcggatcacgaggttaagagttagaaaccatcctggccaacatggtgaatgggcgtggttgtgcgtgtctgtagtcccagcaactcgggaagctgaggcaggagaatcgcttgaacctgggaggcgaaggttgcagtgagtcgagattgcgccactgcactgcagcctggcaacagagtgagaccccatctcacaaaaaaaaaaagaaaaagaaaaggtagagagacctgagctagcatgctcagacccctcaccttggatgccctgtgccacctcaggattctgcagagtccctgacagcaagaaggccctcacaaaatgcagcccctcaactttgaacttctcagcctctgtaactgtaagaatgaatttctttttataaattactcagtttcagatatttctgttataggcaataaaaacagactaagacagtgattgttatcttcatagttgagggaagagcctcaggtaagtaatttacccatgtaagttgctaccagagattcaagtttaagtataactctagagctcaaggtcttactaagccattgagaaatataacctctccggcctgaggaattcagggagagctttctgcaagaaatagatcttgagctgaataaattatttcaaatactacagccaatgctgtctttaaatactgtgctctcctccaagctgccccactttccttttcttcaggaaggaatctcttgccctttagccaagaccagaagcaatcattttttactcatatgttctgaagcaggcaaccccagctctgttaatgttaaagtgttcacttccattgattttacaatgtgataaactagtactgagtctgtactataagggctctgggaaattggaggaataaaaagttccttctgtgcccttgttttctaggcattgctcctgaaggcagaaccttccctagcctcctagattaactgaggggcccttataccagcaatataaatttcctgataatgtctgacgtttgcagactccttcacactttgcaaagtgcttttccacatatttttcacatagaattctcacaacaaaaccctactgaaatatgtatggcaggcaaaattgatccctttttaccaatgatgagacagaaccaaagtataactgggctaaaatcatacacttatagttaacaagcaggacaccagcctagtgtccctccacagcatctagcccaatgcagccactccctccacctttcctctacgcaccagtatcgtttttgcacctagtcattcaacagataaataatgttgatcctgctggacaccgagctagaagctgagcgtaagatgatgaataaaatgtgccctctaggaactcagtctaatgagggagagacacgcaaacattagcagtaccattagataagtgcttataatgaaacaacacaacgtgagaatataagagaagatgggaggttattttcagaatattctacagaggcggtgacattttcccagaatcaggagtaataggaaagaaaagaggagccggggatatttctgatggagggaaccacttctgcaaaagcaaggagctatgaataggtatagcatttggaagaggggatttggggaagggaaccaaagataggaaagaaaagacacacaagtagatagaacaccaaattaggagtcagcaaaaattggcttcctgttgttgctctgtcccaaactctgtgacattggacaagtcactggcttttagtttctcagtttttgaggtgaaggggttagccctgagtttctctgatatgctgtgattgtatgaaatgatggtgtggaaatcgtatgtgagcagttgtttgaaaatccagaggagagaaaggcttcctgcaagagagagcactggagttgggctttgaaagattttgaaggatttccacaggcagaagtgatatttccttactttttatttaatacagtgtttaacatatttcataatttaaaaggaaattctgtcattccccacaacagtgttaagtactatctgttcaaagtaccaacatatctttcttcagctctgaattacgcattccgtttctaaggagctcaaaacataaagcccatgaaaaggtgctttaaggtttggaagcctggatgatgctccctatctcttcctccccactccccaaaccggaactgtctgggtcacagagaacatcctcagaggaaatcctgttttcccacttcctggtcagaggctgaactccaggaaaaggatggatttggggagagctctgtgtcctgcctcttcatgggaggtctggggccacaaaggggtgagggaggggctgatcacaaacacaacggaaagatgacatcaggtatccaagagtgtgagagcttgagggctttaagcaatcacttagtcctcctatgcgtgaggaccctggggtccaaagaagagatgggacctgctcaagttcacacaatgttgtaagcaagagctggggctggaattcaggactctagccttccaggttttactaccatatgccgtggcatgtgagtcagaaagttaggtactgagcaatcaaacccaggcctctctgttcgcctggacataccacaaaggacagaaaaggaaggcagcccccatgcacgcagacactcttcagccttcttacctttgcttacattactccctttgcctccaaactctctacaggttcaaagtcctgtggacccccgaaaacctctgcctcccctcccatcctaaaagaatcttcctggaatcctcatgtggaagtgatattatccttcttagagacttcatagcaggccaagcacggtggctcatgcattataatcccaacattttgagagggaggatcacttgagcccaggagtttgagaccatcctgggcaccatagggaggctctgtctctacaaaaaaataaaaataaaataattagctgagtatgatgccatgtgcacctgtagtcccagctactcaggagactgaggcacttgactgcaggagatcaaggctgcagaaaagaaaagaaaagaaaaaaaaaagaaaagagaagaaaagaaaagaagttccatagcgctttctctggtccttgtcttgtcctctcagaattcattacaaccagcttgggagctcctcaagaacagggactgtgtgtgatcctcttgtccaaggaagagctacacggaaaagatctgctgaatgctcctgctatgtcatgggcgatgtgctagactctgaggagcataacgaagaaaaagaaggtgctgttagatcctagtgttgtaggtgtgcatgtgtgcatgctcggactcatatgtgcagaatcatattcatctaacactgatcagagtcctactcagtatctcatttagacctcaaaatagcccttccaggtaagtggaagcaaatatgcagcttcacatgcagacactcagaagtactcagaattaccaagaaatgggacaaatcagaagaaaagacctgcaataagtgacaaactcctggttcaggatagtggaataagaatgagattgagggaaggaaaatgaaactattcttagagatctttttaaagaccagaaactgtctgctatggaaccaatactatttgcttgccgcattggggatcagtagggtttaaaggaaagcattattacacatattccttcatctaatcatcacaatttggtgcagtaataacaatacttaacctttactgaacacacctgctatgtcttaagtctgttacatttgttaactcatttattccttacaactgtatgaagtcgatactattctaatctcccatttagtaggctggaaataggaatagagagattaagtaatgtggcccaagttcacacagccaatatactgattcaaatcttggcagtctggttccagatctcatgcccttctttttggtagagatggtgtttcaccatgttgcccagattggtcttgaactactgggttcaagtgatctgcccacctcagactcccaaagtgctaggattacaggtgtgggcccccacacccggcccagatcccatgctcttaacctgaacatcagattaggattatccctgtgaggaaatggagactcaagcgtaaagtgacatgcccaaggccacacaggtgaattaagtggtgaagtcaggatttgaactctggcctgtgtggcttcagagcctaggttctccttctttttctcctccttatcccttgggagcagcaggttgaaataagcatgtgcttcagttccctaaaaccgatgttcctaccttgataaagtgatactgggtcttagatgctggttggaaggggagcaggttcatgttttatagctgagtcactcctgtgagtgacttgctccaaacccccaaaaacacgaggggcctgtgctgtgactctccaagacctctgcttgccctcacctcccaacccagcacagagaccatctgtggagatagggagagtctacccatccccaaacccccattaaggcctgcatttcctgggctgtcccaggaaggggctgggactcacagctcatgcagtcatggaaatatttatctctcctcacaaggacatacaggatgtactttcacatttccctgtggctggtttctaggaccaggagggctagccagttccgcttccttcaagttcatggcccaggttcctgctgggtgatttccctttctctcaatttctttctccagctctgtctctgctcctcttatttttaaaacatacatatatttgctcctactctgcctccatgatatgctggggtatagacaaaccacggatgtggtcccagtttttgagagtcttggtggggtacacagacaccaagataagtgtggttggcaccatgttgtgggcatgtttaagggacacaggagaaggagctggaggaagggacacaggagtagaggaaggaccttcagctccgctgcgagtcccagggcaacctaactccttggctctctctgccttgaggaggttcacgtggtgttcacccttccccctcctcctgccacccagttcagcagggcccaattccccaagggtgtggggaaacaagacaatgtgggagccgggcgtggtggctcatgcctgtaatcccagtactttgggaggccaagtcgggcggatcacaaggtcaggagattgagaccatcctggctaacacggcgaaaccccgtctctactaaaaatacaaaaattagctgggtgtggtggcgggcgcctgtagtcccagctactcgggaggctgaggcaggagaatggcatgaacccgggaaggggagcttgcagtgagctgagatcacaccactgctcttcagcctgggcgacagagcgagaccccgcctcaaaaaaaaaaaaaaagacaatgtgggaataacccaggagaagcaagatgcccacctgtgtgccaccaaaggactgagcttatgtacaaaattttattctattcctctcaatttttgtaagcctctagcaggcacacaccttagtctcctgaggcagtgcaaatggattcttgggtcccctcacatccccagcagccagcacagggcccagcactactgctcagaaagtgtttgtttaaaataaacaaagaagcaagggccatgcccactgtacagactatgaaactgagttccagagagagtgaatgactgccctcctcacaggttgcagtgagccgagatcgcactacttcactccagcctgggtgacagagtgagactctgtctcaaaaaaaaaaaaaaattgatacttagtaactgtggaataaaatgaatgaatgaggctacaacactttgggaagccgaggcaggtagatcacttgaggttaggtgttcaagaccagcctggccaacatggtgaaaccccatctactaaaaatacaaaaattagtccggcgtggtggcaggtgcctgtaatctcagctactcagaaggctgaggcaggagaaccgcttgaacccgggaggtggggttcaagggattctcctgcctctccttctcactgcaacctccacctccagggttcaagggattctcctgcctcagcctcctgagtagctgggattacaggagcacgccatcatgcccggctaattttttttatttttagtagagacggggttacaccatgttggtcaggctggtctcaaacacctgacctcaggtaatccacctgcctcggcctcccaaagtgttgggattacaggcgtgagtcaccgtgcctggcctcatgtgttatttttacctctattttagagatgaggaaactgaggcacacagaagtgatgtaacttgcttagggttatcagctgctaagttgttgaagaggcattctagtccagggtggcgtgaaagtcaaccatgtgctcttaatcagctataggctgtgtcctgtggcatgggttctggactgggcacacgggctgggccgtgtggaggagagggccacagcttttcttgggaactcagagcttctgccagagtccagcaggccgaatcccctgcatccagtgtaccaggcgtgtgtgtctcctgaacggtgactttccaaatctctccccttccctttctacccttcttttcatttccccttctccccagtcccatatagctgatagaccagcttatgcctttctaacaggtccagcctgtcgggaatgtggcaagagaatcggcatgccttgcttctatggggtacctgtgcacagctggagctcttattgacagcctgaacagagaccaaaaaagaggaaggaggcaatgatgagaggcagattaaagacagagatggagagacagggccggggtaggaaagaggagcagacttagagacagagagaatgcacatgcgcttaaaatagagatggcatgatgagaagcagagtgaaagagatgataagagataaaagggagagagagatcctgtggttgccccaccccattcctattacagataaactgagggtcacagaaagacgtaaccctacttcctggcagatgtctctgtcactttttcaaataccattaattcagttcctcccttgtctacagatccttttttgtgccctgtgtgcctggccctgagcagcatgagttagactgtaacggagggctccagggtatgctaatcaggagagcaagtggtgagaggaggagatataaatgcagctgaggacagtattgatcagaaaaggtttcctggacaacataagattgatgtggggccacaaagaacgtttatagtcaattttttgaggcataatttacatactataagatgtactcattttagtgtacagtttgttgagttttgacaaatgcatacactcatataaccaccaccacaatcaagatatagaatatttcctttatgcagaaagttccctgtgcctctttgcagtcatatgtcctcttccatcacccctgatctgagctttgccattagaaattagctttgccggccgggcacagtggttcatgcctgtaatcccagcactttgggaggctgacgcgggcggatcatctgaggtcaacatggtgaaactccgtgtctactaaaaatacaaaaattagctgggagtggtgacaggcacctataatcccagctacttgggaggctgaggcaggagaatcgcttgaacccaggaggcggaggttgccgtgagcccagatggcgccattgcactccagcctgggtgataagagtgaaactctgtctcaaaaaaaaaaaaaaaaaaaaatttttgctttttctagagtttcatataaatggaatcatatgctaaatagtcttttgtgtctggcctctttcactgagcctgttgttgagaggtctatattctggcatttgtcagtaatttgtttcttttttattgctgagtaatgttctattacatgaatgtaccacaatttgtttaccattcacctgttgatggatagttgaattgttgttttttgctttacaaataagggttctatcactgttaatgtacaggtgttcttgtggatatatatttttcagctgtctcagtaaatgggtgtttataaactgcacattcataggaactgcgaaagagttctccaaagtggctgagtaatttttgcatttccttcaacaatgttgctggagaactccagttgctccttcacatcctcagcaatacttggtattgtcagtcttttaaattttaatcattttagtggatgtgtcatggcatctcattgtggttttaatttctgtttccttaatacaagttgaagaatcttttcatgataagtttggctatttatcttctttaaggtcaaaggatttaaaccgggggatatcacaatgctatccaaagtgttcaagattttgaaacagttctcccaaagtaacacatagttcattctagccagcaggaatggagaagacaccggggctaagctgacttggatgtataccaagtgagtgactgggtgagatgagcctgtttcctcatttttaaagtggggatcacacaagcagcccggcaggttatagtggaggatcaagagacagaacagcggcagaagcaggaagcagtgcaggcacacatggcagtgcccaggacatagagtccccttcaggggcccaggagtcttgtccacatgtattaatgtgtactcctgggccaggactctgtctcagtgagcatcaacgactatttgctagccagagaactggtggctatgcacatgttctgtccttttctaacagctctgggaataaaatcattgatggcagagctattggggttctctgctcatgaggacagttaagtttagacactatctcttctgtaagtctggaaagcaacttcggtcttctgtatgctttggtcttccgcatgggttagggaaagggaaatggctttgaaacattaaaaagcacaggccgggggcggtggctcatgcctgtaatcccagcactttgggaggctgagatcggcagatcacctgaggtcaggagtttgagaccagcctggctaacatggtgaaacttcatctctattaaaaatacaaaaaaggccgggtgtggtggctcatgcctgtaatcccagcactttggaaggccaaggcgggcggatcacctgaagtcaggagttcgagaccagcctggccaacatggtaaaaccctgtctctactaaaaatataagtaattagctgggcgtggtgatgcatgcctgtagtcccagcttcttgggaggctgaggcacaagaattgcttgaactcatgaggcagaggttgtggtgagccaaaattgtgccattgcactccagcctgggtgacagagggagactctgtctcaaaaaaaaaaaaaaaaaaaaattagctgggtgtggcggcatgcacctgtagtcccagctactcaggaggctgaggcaggagaattgcttgaacccaggaggcagaggttgcagtgagccgagatcacaccattgtattccagcctgggagacagagtgaaactctgtctcaaaaaaaaaaaaaagcacggtgttttcttaacacaattttactttggcctttgctacagatgggggttgtaaactagagaagtggttctcaaattttgtgtgtgtgtcagaaatcatcaggaaggcttgtgaaaacaaattgctgggcctcaccctcagagtagtagtagtaggcctggggtgaggcctgagaatttgcttttctaacaggttcctcggtgatgctgaccatccactttgagagccactgagagtgaagttccttccatccctgagaattctgacagcagcgttggggtttggaagcacagacgtgactcccaagctcggaattcttgaggcctgcttactgatggggtaggggttcttccagggcaagagacagaggcaaaaatggagagaatagtcctttgaaagtggaagagggaaataatgacatttcctcaaattgaaattttcctcattaaaaataatccttatataaacagtattatgtatggaaaatgagcacctctcttctgcaaataaggaaagtgaacctcagagattaagtaatttgcctggtatcatacagctggcaactaggggagcagggataggagctcaggtctgcctgaccattgtgcttgctttgctgctttcgaagcactgtggcctgaagccagactgccctaggtgtgaattttgcctccaccacttacctgctgggtgttctctgcaagttgctcaacctctctgtgctacctacaaaatggagtagtccctacttcattaggttcttgcaaggattaactgaattaatacttacaaagtgcctaggacagtacttgtcacacagtaactgcagtgtagatttgttaaaaataaactcggctgctcatcagagtgcatgcatggcatctttccggagaagaagctcgggggagaagctcagagatagtccagtactcagagagggcaggcagaaacacttgaaaaatggtaagaggcttggctttggggtttagggagaacccaacctttggtggtggggaacaacggcctcagggccagagcctagctagcctgttcttgtcccctgctcttgctgccccagttccagactccagacttaccagtctgggtctcaacctcccctccctcctcgccacccccaccccaggcgctccgggtttcctgcccgactggggcctccgtttggggcgggtggaggaggggtggcatttcctggctggccccggcctgtcactctctcgtggacgctcggacaactcgctgaccgacaggcaccagatgctatttcaggcagcgccccgcttagcgcacagcttccgtttttccactgaccatcggaaacaggggagggggcagatgtagacgtcatgagaccccagcccctggcagggctttggtggatgaggtcgggagtggctgcctgactgtcagaatctggagcttggcagagaacaaatgtgtggaattggagggttggtgaacgtcacctcctcgctccacagacagaggcctgggcacaccctctgccacagggctgagaaacgcctttccacctgtccatattccttcaccacaggaaaggacactttccttggaggtgctggctggggacatttaatgccctgtaaaataatccaacagtctgcaggtgtctcaaaggcatctaaacttaaggagttcaaaaccaaatatataagccctccccatgtcccctcagcctccaggttccccatctccaggaataaccaccactagctctgcaggacagccagaaacccaggggttttcctggattccttcctctccctcatccccccaaacccaattctttttttgtttgtttgtttgagacagagtctcgctctgtcgccaggctggagtgcagtgtcgcgatctcggctcactgcaacctctgcctcctgggttcaggtgattctcctgcctcagcctcctgagtagctgagactacaggcgtgcgctgccacacccagctaatttttgtatttttagtggagacagggtttcatcatgttggccaggatggtctcgatctcttgacctcgtgacccgcctgcctgggcctcccaaagtgctgggattagaggcatgagccaccatgcctggcccaaatccaattattataaacccagttttataccccaaatacatgtcatcttcacttgcctcttgtcatctcttctgccagcacagtggtccaagctctaatccgcttcccctaaccactgcattggctccacaactggcctcccagagtccttccccctccacacttcatccaaagaactttctagaaatgcaaatcttattctatacaaggtaccacccccaccttcaaaccaaacaaacaaaaaaatgtcaaaaaatcttttaacttgtccacaagcatgctccagccatactggacacttttctattcttttcacgaacctaccacccttctgttctagcccttggtccagctgtttcctcagcccacctggaaggttctggatactgatgcttctccccaccccccttcttcgcacccccaaatttcactcttagatctcagtccaggcctcattttctcagagaagcagtccccacctgggctctcccatatgggaatggctagcctgtttttacagtggctcagagacatgaaatcacttctctaagggtcccacagcccaggaatggcagagttgtgtttcagactcagaattatatgactctcattttctaataagtgatggagccaagcaaaggccttatggtacgggggaactagactttttcttaggatgtgggattctgtgagagttatctgtatccccatgacagcctgacttccttcagagagcacaggaggaacagaggggacaggcggcactgaattaactgtatcttctcagagggtcaacctgatgaccaaggagaagccagatcccagactggggccatgctctctgctcagtctttgactgggactcagtttgttaccagagtaggggttttcccccagttctcaggctccaaaaaaagctcaaaagcagagacactagaaggacaaatcagcctggcatggaaagtagagttgtggactgggaattggacaccaaagtttgggtcctggcttttcctttgggttactgtaagttttggctaagtcacatctctctgtgtcttaatttctttctctatgatgataaccagaactcccatgcaagtgcatatgatgttttcctgggctgtggactgagtgacgttccatacattattatcctcaccaccaccttttaaaggtcatataagttagttctcataactttgtgacgtcgacattatctccccattttacaaatgagaaaactgaggttcagagatcagtgactaaaattcgaacatgtgttctttccactccaccatgaaagaatgaacccagagaccctccgtgggctgagcgcatcatccagctggcactgaactcagatttctaccccacagtaaagaccctggtctctgcaatgagttgagcccaggtccctttccctggctaggttttggctgcccctcttcatcagctgagccgcagagaagactccgtgtcaaatttccttccaaggcagactccaccaagcactagctatgtatcattcgaaaagttactttgactttctgtgcctcagttttctcttctgtaaattaaggatccagcttctcaggactgtttgtgaagagtagattagtatttgcagaatgcctagaatagtgttacagtcgctagattaaactttttttttttttttaaataccatgtggggagcagtgttcctgggctctgggctcagcctgaaacctagcagaataggcattttatgtccctattgacaggggttctgccaggccgccgtagagcccatggatttgagttaccggctctattttagaagggggtgaagaggtagggaagggctggggagctttctgggatagggagactgcccattgaaatctgggtgtctgggacactggaggaagaataagaaagaagccctgggaggtgacgattttggtatcatggtggtcttcagaggtagggacagagtgctggggtgagagtcgctgaagaaaggtgtctgaaaggttaagggactgaggttgtgggaagctggggttcctgagaggccttgggattagagatgggggctggatctgctgggtcctagacagcgcgtccaacgctccccgcagcgcgttccggagccggtcctagcgccgctcaaccagtccccactccctccggtgaaattgccaaattaaaatgaatcatttggcccataatggccgaggcgcttatcgggggcgggcggacccgcggcagtgccttatctctgcggcgcacacggccccggcgcgcctcggcccatgctaacgaggcctggaacgtgagtgggattacagcgcgtcggtggaggggccgggcgggcgcggggcgggcgggggagcgggggccgcgggaggggccgggccgccgccgctcaggaccgggcctcaaaatggccacacgcgtacccccgtagcggaaaaacgtgagcattctggcctttttctaggggaaaagcaacccgcggcctcccaccgaattcttcatcaatttcctcctctttttccccacgtccgcaaaagaggtcttcgctccctttccctcggttcctttcgatggccggggggggcggtgggggggcattttccacggacgcccccgccccggctgccgccgcccctcccgcctcggagactctcttccttccttcccccttttccttacgcaatatacagaaatgcgcgaggctgtggttggttttcatttcttcttcgtggttgtgtgcatgcggtgggattgtgagagtgcgttcatgagaactgtgggcggcgttggctgcttctaagtgtggtcttcttggcgacaggctctgtgtccgagtgtggtgtgcctgcgcggttggggtgtgtagatgtggacccttcgaggcccttctgcgttttcttcgttgcgtacgattgtgctccgttggtgttctcagcagggatctgattctgtgtgtgggggtgtgtggcccctgcgactgtgtttgggtggtgtcgtcgttatgtcgggcgtgtgtgatcccgactgtgctggattgtgtgtccgtgagccgctgcgtttgactgatttcgttgtgtcctgttgggcagtgtgcggggctgaccaagtcggcttctggggcagtgctaggtggtgtttgtttgctgcccttctgtggggctggaccctgtgtggtcctgtccgcactgagttgtatgcctgtgtgcctgtgtcctttagaggtgcgtttgcaaatcgctgggggcgggagtggggggagggcgagcgagagatcgaggcgctggtgggggcggcggcatgggggcggggagcgggatttcacattttattccaaattatgatgtattcgggagccagttgttggcttgggtgggcggacagcgcccggtcggcggctgctctgcccggaggcccgcctgtgcctaggtgtttgaggggttcgttggtgagtgggaggctcctccaggcttgaagctgagcagcgctcgccgaggccggcgccttcgagccggtagctgcgggcttcggttcccgctgcactccggcttcatccatttctggtcagtttcgtgggtgcggccgccgggctccaagggagaggccccgaaaggacaatgggcacattcaccaggcctcgagcctcgggtggggacattcgggatcacctcctgggaagattttcccgccccctcttcgggtgagcgacgttgccgcttgggtctgatacccgtcgcatccgagaccgaggccgaatccgggctctgggagggaccgggttagtggggccctagctcgggttgaaagaattttgttttgtcaattattgtaattgctaatgccatcaccatcacaatcgtcatcattaacatctattttaattaaaataatcatcccagagcgcagcagtttgtcccttttggctcctttggcgggagaacaaagcagcgggtttttttccgctacagccgttttctaagttgctgggtttgaggtaggaagagaaaatggagagaggcacggacacagagacttggtcataaggcaaacattaacccccagcgaacacgcaacattaaccccccgcgaacacgccgggaatggatggattcccctcttctttcctcccctcccctcttttggattagaagaggagaaagaaaatcttccgcattgtattgcaatccagggaagaattattcctatatgtccaccaaagccgcggcaaatagaaggaggccttcgcagttaatccaagacttcgatgtgtgatcataagcctgacgatttaggcaaaacaaattaaacaaaatccactaggaaaaaataaaagcaagctcaatcctgctacatccttgaaagtagtgtcgggtttgtttttacctcctttccttttaccttgtttattgctgtaacaaatcattagaattctcccttactctgtctaaaccccgaaaaatcgaaaatcatttcgtaggggtggtggaggggaaggtgggggacttttcccctttgtttctttctttccccctttgttggtctttatttccttttctttttctgtctctctcttcctctctctttcttctttctcttaatcagtagggagacgagaaaggacctgaacagatcagatatctctctccaagcccccttcccaactccatttctgtaggaaagtacagcccctggaattgggttctggtttcgctttgggctggaggtgggtggatgggggtcagagagagaatgaggtgggggggacttcaaggttctgtcccaccgaccagagtctgaagactattcgcctttcccaacacggacctccgcccatccaggcccgggactatcccttcgcggtgtagcggcagccggagacctggctgaggaggcaaccgcgtagacacctccctgcttagaaaacaaacactgaaccagaccgatcccagttggagggttcgaaaatgttccagacagcctgtcgggaggggttgttgttgctgttggactaaatagctattcctgattggtcatgtatagggttttttaaggcgggtggggggaggagggggtagaggaaaggctccaaacacctgcaggttgggggcggaaagctgtttgcgattccctggactggttggtcggggacaggaggtaattcccagccattgacccccatttctctctctccctccctcttgccctgcctctttctctccacccctatctttcctggaaactcgctttgggcgcggcagatcgcccaggaccacaccgcagcgtaactgcaggcctctcagcgaaaaagggggaaagcaaagacccgggtgtgcatcctcttcctcggcttccgcccctttccggcggagtggagatcctattcagaggggccggtctctctaaatatgccccaggtgagttttcaggggaatggtgccggtggaaacggtgtctaggaaggccttgtgttccggcctggggtgaggaaggctcaggacagaggagagcccattctcagattgggggtggggggaggggaggaccagccagagcttggaatcgggatctgactgctgtagctgcctctgtggcattcagcggctttttcccttttccacccagggtaaaaccagctagttggacttagtcgtccaggcctttcccattggtcccggttctgtggacgtttcccaaggccggtaactttggggcggctgtatccgggtggtacagactgtgcctggagctcccgcaggaggaaggcggcagccttcctggctagtgcagtcccagctcgagtgggccctgatcccaggcctgaggcctagggtggggaggcaggaacacccctcttctccggtagaggcgaggatggtggtgctgttccctggtgggtttggtacttgtgcaggcttggggcttctccagggtgttgtgctggtgtgggcccagaagagagaccagaggctgggtctaagggcctgaggctgttttcatctaagaaattctctgtatgggggattgggtctgcttgagacctgtccccaggaagaatctcctggggtcttctgtcttgttctggcacaggtggaaatattctggctgtctggcaactgcagatgaggatttcctgttgggggctataagcagggtctccgtagtacaaagagagaggagctgtagtcgtcaaatactctagaacgattcagtctaaaatctccctcctccttcattctccccaaataaaaacaaacaaaatctctcgggcgttcctttctgtaatccaaatcaagtgatgcagcttagtcgccaacaaccatcagtgtttgtgagtggcttctttggggcatggacctctggctggtaatcctaaaccggcaggattttcctaaaatgtggggaggagccgggagaggtcctccacagatcctgggatccaatcatatatttcttacaaggaaccttggcgatgggatatttataggtgtctggagaggacatttgtggccagggtcaattcatctggaatatgtactcccattgcctctcaggaatccaccgctagagcaggagcctaagaattaattggagggtaaaaatgtgtcataacagagcttgagctcagtctgcaactgcagtgcacactgtcactcggttagaagctggggcttaagcatggatcactgggctcacaccggtgtgtcaggacggagagcagtgaggtagggaaccaataccttgaagcttgtatgtttcccaggggttggtatatttctggcacatttcgctgctgctgggagcaagaggacctggctgatatacttctggtgcatttccagtggccttggtgtcttggtggttgcattctatggatagagacctattgtctccaccaaaatcataaactcacttccaatgaagtgtcagggacctactgcctttacagcttgtatacaccaggacttagggaattttgtggtttctgtgccagacctggggggctggcattcccaaagaaggtgtacagcagtctgaatcttgactctctgtcatcctgggtgtctagtggcaattgagccaagctccagaggaggctgcagatgatccattctcccttctggggtgggagggatggttcctaggatgactcctgtccagagcattgcagtggcagtatgggagctcaatggctgctatgtatgatttagatggactctgcatgggggtaaattgtttttttgtatttgttttcttcttttaaatacccaattatataattcagagagcagaaagcttattttaaacaacttatgtggtgttgatcatatatgtacaactcacaactcacaaactctggcccttgagtctcctgatttttctgttttggttcttgctggtgcccagctctatctggatgaagccaggtgatggaagagccccagcacacctgtgggaagtagagtggctgtggtcatctcggagtatgcttgtggggtcacaaggtggtttcactgctctgggaatacaggagggttgagcaaagtgagattattgctctggtctggctctctcacagataggctgtgagtgacttgacattcggccaggcagttttctcactggcccattctccttgttaataatgtttacttgaacgtttgcacagcactttcaaatgcataaaggaggtattcctcccatttcccaaagaacaccaaggcaggagatggcggtgaggggggctggaagagttcaagggcctcatgacatcctgtcctgctcttggatgggagtccagaccccactggcctcagggaacccttcaaatgcccagctccattctacctcagccaggcctctctttgagactcgacctcacttcagagtccagctgagcagaacgaggtggactgtgcagggaggttgggccagcaccatcttcttcccttggcgacctctcatctctgtctgagtgggagtaaagatccgctgggcgggcagaggactcacagtggatttgctcagtgtagacagacactccctcactccccagcgggggcgaatgtgtgtgtgtgtgtgtgtggagggagctggttcctcgggattattctctgccagctctggcggagtggatcccagtccccgtagcctccactttctaattccctacttccatccgcaccgggtttctgggtgtgtgcctgtaggtgggctgggaatattgctgagaggccaagggaggttcctaaagcaacgaacccctgcctgacagattccccgctaaaaccaaagagcacgatccggaatttgttccctcctcttccctttaggcctgagaaaggggacagagtaatctctttcttgcctccttgtacatttccttcctcctgatttccccttctgtgtttctgtcgctggctgtattccttttcttccggtgtctctgtcgtcttcctccatctctgtccttttggccctcagtctctgtgtctcccaggcacccctcccttctcccaatccagagaccctctttccctcccaccctagccccaaccggcctcccgccctagccccacgtggcgctaactttgtctgcctcttctcacgtctcggtgcgtgagttcctctctctgcccttctcccctttaccccagcccacgtcggtgggtcaggggcggtcgtcagagcgggcatccgcttgtctgtctgtctgcccacaggatgaccgagcggccgccgagcgaggcggctcgcagtgacccccagctagagggacgggacgcggccgaggccagcatggcccccccgcacctggtcctgctgaacggcgtcgccaaggagacgagccgcgcggccgcagcggagcccccagtcatcgaactgggcgcgcgcggaggcccggggggcggccctgccggtgggggcggcgccgcgagagacttaaagggccgcgacgcggcgacggccgaagcgcgccatcgggtgcccaccaccgagctgtgcagacctcccgggcccgccccggcccccgcgcccgcctcggttacagcggancnncccggcgacggccgcatggtgcagctgagtcctcccgcgctggctgcccccgccgcccccggccgcgcgctgctctacagcctcagccagccgctggcctctctcggcaggtcaggggccaggggccaggggccaggggctgggcgggtgggcagggcgaccacccccaccggggtttccttctacacatcggcggcggcctgccctgggggccgagcgggtggagcgcagggagaggaggtcgttttaaacccagtggctctagagcctcaagctggagcccccgagtgagtgccagtgagggaggggccttctgtgagagagagtgtgcgtgtggctgcggggtgcatggctgtgtggaagccgagaggaggacgtggacaccttcgcgggtgcaggcatgtggctggtgtgcttggtggtggtgtcgtgggggacggagaggaaggagtcccctgagcgtgggtaccaggaaagagtgtgcctgcatgtgctttgctgtgagcagaggtagatgtttgtggtgtgaaattcattcggaaactcagcgctagctggacaggcaagagataaggatctgagggtggtggcagaggcaccctcccccgaatctctgctggagggcccgcctgaggactgacctgtccctccactcccagcccctctgctcctagccgtggtctctggccccagcctgtactccggttggtgtcagggcatccgtttccctgctggcgctactgtgatgatgagggagagaagccatagggttggaatagaaaccggcagatggggcagggatagagtgtggggcagtcaatgaacctggcgggcacccgagacagagctatggggagcttagggtgggtgagggcagagagctaggcggagcatttcagctgaggggagtcagggtttcctgtctgttgtgtatctacagccccttatgggtggggtgaggtggggagaggggacagtgtgcccctttgtggtgaccaagatgcacaccatcaggtgtgaaggttacatttgcctgagtgggcatgtgtttgggagtggaggtgtgtgtggattatgtgcttgtttctggggcgggagaatggagagtgtttctatctgtgaagtgtgtgtgtgtgtgtgtgtgtgtgttcatttttgtgtttattccatgtgttattcacctctgcttctgcatatgtgcctgtgtttgtgtggagggatgtgtggttaggtgtcttttcctccctttgcttgttttatgacagacagagtgagggcattccgtgtgtatgtgtgtgtgtgtgtctgtgtgtgcctattcccagctcaagtgtgaagggaccagggttgcccagaggtggggggctcaagacatgtggggaggatccctaaggaagctctttctcccctcccctcaacatgggatcttgtgatctgcccgttccctcccacagcgggttctttggggagccggatgccttccctatgttcaccaccaacaatcgagtgaagaggagaccttccccctatgagatggagattactgatggtgagtctgccccaccccaccgttgtacctgcccctcacgctggttagagccctctggaggagggaacatctgggactactccgtaggtatctcacaaagatgggcgggccactttccaaacccaaactgccgaagcccttcaccctgcagctgagctagggctaagtaaagtcctggatggggctagcaggaccacactcacagtcctgcaaagaggaggcatgggagagagacacataatggcgcttagcccaaacctctggagttagttcccaaacctttggagttagttccagtccccagtccgggctccattcctacactttggcaaggatcccaagtgggcgcagaatcacacagtgtcccccgatcccccattctaggcactgaccctcagggattccctgcacttcctcccaagtcttccttagagtctggagtctgcttcctccctgcaatggagtcatcaagggttttctccgaggtccctacacagtaggctccccttgtctcccgttaacacattctgggcttagacctggagttcccttcctgacatcatggattctaccttgccccctggattccccgagaagggccttggcactgctcctttgaggtacttgaatattccctgaacttgcaggggtggtttggacaaatgggagatttggaagaccctcgccatctttccaaggttgaccttgtatagtagattggtcccagcaccaggggtaggagagcaggcacttcagagctgagggactttgagccagacccagatgcccccagaacttcagcttggctgtggcctggggctcctgtaggaaggctgcccaaggcctcagagcaaggctgggatttatgctccaaactggtgggaggaatatgagtatggagctggagcctctggagtggagccctctgtggtgttctggagaggagcggggctgggatctgcacaacagaaaagacttcaaaagacccaagcagcctggggcacaggtgtgcagggctgagaggcaggggtgccttctgctagattagagaggagttctctagtctaagagaggtgggtgtaccaaacaggaagaagacaggaccagccctgaagttccccagggatgaggcattttctacaataggcagaagaggcagagcataggggcgagggtttgtggggtgtgcaggagtgtagggcagtcattatccataagtgttggcaatatttaccgagcacctactcagtgctggccagagagaggcagaggacaccaggaggggtagacagactcaggaaagaggaaggtgaggagagggggtggttctctggaataaaaccagagaggaataggcagacatgtaggcgaagggtagggtatgagtgtgcaggatgtgtctaggggacactgaaattagagattgaacccaaaaagagtccatagaagtagaactaatgcaagatctagagttaggacttgatgtggattcctgttgctgaattgctactaccatgtattggacacctactatgtgccatggactatgtgtgcttgatttctgtttattccttaccacaagctcatgagggcaatattattgtttacatctcacagataaggaaattgaggctgagagaggttacccagcttgatcaaggtcacacagctaagtcctgggtcacacagctaagtcctggaccaccctcataacactggtcttaagctttggaataagtcctgaccacttccccaccatctccccttctggatgtagtctagctccagctgtgacagcagtcataagtaccccctccccaactaggagctccctcaagatcaccagcattagccatggtggagggactgtcctccctatgtcactgctgagggatgctctctgtctggcctggaggcctgaaagcagcaagtaatttcctcagaggccgcccagggtagaactgccctgcagttgtgctgtgtttttcccaggctgggtctggcctttggcaaacagtcagctgggctagggcctgctatggtttggaaaggcagcttcagaggtaccatgggcaggggatggtgatccttcccattaaaagtgtgtgtgtgtgaacacccacacatgcatgtgcatgcctgtgtgcgtgtaggagagagaaagagatgatcaggcagtaagtgtggcatggatgagctgattcacagactgaccactgaggtgaggtctgcttccatcccagcctcagtctccttagctataaaatgggcagtgggacttaggtgaggtcttagctcttctcctctacctcggttttcacactctgaggtctggttccaggggttactagaagagggaaaataaatatcctaggactggcagttccttcagtgctcagagcttcctggactatgtgaccctggcttgtgcctcgatgttagggagagaagcagtctcctcagcccagaagttcaagagcactagtaggacccttcactgtcttcccctggctttacaaatccccagtgagtcttgaacacagcacagtgctttgcacaccataagtgccctagacatgtgtgctggtatctgccactgctccataagtctttatacatggaatgttagtgactattgggccaagccatagtcagtggattgtagacatgaggagactgaggcagccttcagaagcctgcctagagctataggccatggctgtgcatagctgtgtcttcacttctctcctgggtatgagagcccttctgcatcgatctctgctctcccctccattccccacctgccaccatgatgggtcagttagcagacattttctaagcccctactctgtgctttccatcacccttaggataaagtccccccgccttactgcaaggccctgtggagtctggaccctgcctactctgatcttgtgcacaggactccagccagcctggcttcaggccttgtctagtgcagggcctgtgcattcccttggcttggatactcttcttcctctccccttcttgtgcctggctgtttcttcacagcctcagacaagccttcccagccactggagctaaacatggagcttcttttcattacaattcagccctggtttgtttgttttttaatattcgtttccccattaacatgtaagctccatgagggcaggcactcaatttagttcaccattattcctcagtgcctagcacagtgcctggttgttagcaaaaaactgatacatggataataatagctaacatttattgactgctaagctgaggcaggcattgtcttaagttctttacctgtgttaggtactagacccatgtaacaactcatgacttagtagtattacctccattttgcaggtgatgaagccaaggcacttcacaagtttttatgtcacttgcccagagtcattcatttaggtaggggtagtcaaataggaatggagtctgtctccttagacatagctgtaaggcctcttggcacaagtgaatggatgaatgaataacatacggtccctgtcctcaaatatatcacagcccagggagggagacaagcacagaaacataagtaatgatcaagagtgatggaactccagggattgcggtatcgtggtggttggttacatctgtctggaggggttgaggaagttcccatagatgaggaagcacaggaacttgaatttgaagggtggatgttttctaagtaaaaggaaagtaggcattctaggcttcccaagtttcccaatgtatggagatgcctttggggaaggaatctcaagcccattctcctaactcttgtcctcctaatctccaggtccccacaccaaagttgtgcggcgtatcttcaccaacagccgggagcgatggcggcagcagaatgtgaacggggcctttgccgagctccgcaagctgatccccacacatcccccggacaagaagctcagcaagaatgagatcctccgcctggccatgaagtatatcaacttcttggccaagctgctcaatgaccaggaggaggagggcacccagcgggccaagactggcaaggaccctgtggtgggggctggtgggggtggaggtgggggagggggcggcgcgcccccagatgacctcctgcaagacgtgctttcccccaactccagctgcggcagctccctggatggggcagccagcccggacagctacacggaggagcccgcgcccaaacacacggcccgcagcctccatcctgccatgctgcctgccgccgatggagccggccctcggtgatgggtctgggccaccaggatcagccaggagggcgttcttaggctgctgggatggtgggcttcagggcaggtggggtgagaattgggcggctctgaagcaaggcggtggacttgaactttcctggatgtctgaactttgggaagcctttactgaccctggggctggcttttctgtttcctgtaccagtaggagatcagaaaaatggagcaaagtggtaggtactttttgtgaagacggcacggtcttccctcttccctcagtcccaaatccttcccaagtaagaggctggagttgtcactgcttttggcctggagtttgggatccctgtctttcctaagacctggggttgtcagctctcatctgaggcatccagcagtctctgccttgcctttagcccctcccaagctggctggggtggcctgtgtggccacttctgtccatatttataggtacccaatagctgcccatttcgtgagccccatcttcacccaggcctatgttgatccatccagcttgccagatgctgcagagtcacaagcctcgaggtgccttcttcagggcctggttgaagaagatgatcagtggacagtctgctctagatgagctgggccggagggtcaggaaacccagtcgcccttacttcttgccctggggatcaaagttctgctttctccccaatgagacttgccttcctaagcctgtggctgtggagacaatgtctgcagccctgagaaagccctgtcgggctttgtgtgaaggcagagaaagggacaatgatagtagagtgatatggagcaagagatattttgggcatgtgggcttcaactcctcgacatcactgttcatgctggcgagtgaatgccagtgtgctgatgggcgtacgctggtgctgagtagatgcgcagccccatctgtgcattctcctggatgcttagagggatttctttgctgtaagatgtctgtttgctgatggtctggtctatgttccgaattgagcacaaaacctgtcctatgaatgctttgcatttggaatttttgcttgacttcagttattggtggaatctttagcgctcaataggaccaggatccagcctcacttctagggtatgggaaatccaatcagagaccaggccctggctaagacccaaacatatgcacattcacttagcagaaccttaaacacccctcagttgtgcagcttttggtcatcaagggtgcgtctgggaggttggtttaatgcaatagaagtgctcccctctgaaagttgtacatgaaatttttgtaaatcacatccttatccttcatcttttaaagaaataaccactgcaagtccttttgtaaagtgaagaatccttttgtagaatgaaccactgccccttcattgatttcctgtgtcaatccagatggtgggatgtggttttcttaaggtgaggcctgtctgtgacctgcatctaagcccatgggacaaattgcacagaagtcctgtatgtctgtcattgtacccttaagtcaccctagccctctccctctaggctctgccttcgaggtcagaggagagatagcctgtggccctgtcctgccatgcaagaactcatcactgtggctgtctggaaagcccccccttatagtttgggcttcagcctagtggcttgtcctcaccatgatggggccctaattcagccatgtacagacagagaatatgtctgctcctttccccttccttttaagtaaggtccaattctcgagcttggggcaacattgttcacctttgtagcactcaggctctccattcaatttcaggctccccagatcatgttttggtgaaaattagggttggttcctttccaacgtttggaagatcctgtgaggagccccatctgtctaaagatagagtcattgctgtaggatctaaggctgtttgcttcaccgtggattcgcttgagttaggaatgagaagtagccacagtatggatgggtggatgggttttatgagatggatcacatattttattaagaactcaaacttctggctccctcttctttcagacttgccatgtgactctggcttggcctatctcctagggctatggtgtggactgaatgggatcatgaaagtagacagttttgagaacgtaaagaactttttcttttccctcaatctcaatcctgcagtggggtttcgcagcctgagtccacgacctaggcagtaggccggtgtgcctgactgcccagcatttgggtaatttagattgtaaaccgctttggcctgagttattgagattgtcctcatttctccagattatctatttgtgtgtgtgtgtgtgtgtgtgtgagagacggtgtcttgttctgtcactcaggctggagtacagtggtgccatcattgctgtctgcagccttgaactctgggctcaagcaatcctctcacctcagcctcccgagtagggaggaccacaggtgtgagccaccacacctggctaatttttacttttttttttttttggtagagatggagtcttgctatattgcccaggctggtcttgaagtcctggcttcaggcaattctcctgcctttgcctccagaagcactgggatcacaggtgtcagccattgcacccagcccagattgtcttaatttctatcttgttccaaggccagggacagtaataagaatggaaaagagatatgggaacactggcagactgtgtaaaatgtaatgcaactacccaaaacaagcctggtaggaaagggcaagtctttaggtctttgtaagaactaaagaagatctgtaatttttattttcaccctctgtaccccatgaccttatccttcctctccttccttgttacccatgaaaaactggcaacattccaagaatagcatctgtacaaaggggaaagaacataaaggtaaaacaaaacaaaacaacattttgagaacaaagatgaccataaccactgaagggaatcacatcttttaagacaaattcatattcttttatttgttatggcagatgacaagatggtacaacctttattcttttccaaaataaaacaaagggcacagcatctgtagtcagccgacaactatttcggccttttgggggtgggtctggccgtacttgtgatttcgatggtacgtgaccctctgctgaagacttgccccctgcccgtgtacatagtgcattgtttctgtgggcgggcccagcactttccgtcaacgttgtactgtatgtgatgaattgcgttggtctctgcatttttctgcagaagaggagtaaccgctccaggtaccttgacctttgtacagcccagaggccaacactgtgggtgtgtgactctttagcaaaaaaaacccatgtggtgatgatgtgtatatatatgtgaggatgtatcgggaagatttctaaataaaagttttacaaaggggccttaggactctgtgcttgcattgcacccctaggcctgagacgggatattgaaagaaaagtcatggcaagaacctgtttctcctgacatggggagcctccaagactcagctgtagtcttaggaagtgggattccaccctcaaccctgaaggcaggcctggtggggaggagacagccttcctccccagggtttccattctttctctccacaggcctcatagagggggcctgtccccttggcttcatgcacccatgcttgtatctcaggaagcctcagcagacatcccctctttgtgttggggtgagcttccatggctgggacagttgtatgtatcctaggttcaggacagattaaggccataccataggagggccccaggttccctgatgactcaacggctgcagcggcggctgcagctcttatgcctggctcttaaggattggggactcagagatgaagtctgaaggtaatggaagtcgagagtggaggctctgtggcaggctccatatcatctgggaggacttccctggaggctcaggaatggaaatgtggtttagatgatacaacccttattcttttccaaaaataaaacaaagggcacagcacctgggtctgggggaagccactgcatgtggaccatttgatcctcagggatttcagtaggtcatgcaggcacttctaatgaagtatcatgccttcctttctttctttcatttatttatatattttttcaagatatgggatcttgcttcttctagcctttgcccaggctgatcttgaactgagctcaggagttcaagggccatcaaggtgaaaaagaaacaaaaggtgcaaaaaccagaaggtttttgtctcagtcccttgagtagttaggactacagcatgtggaactggcaccctgtttcatttaacaaatatttattgagcatctagtatgggcctggtattgttctacgtaccggggatcccacactgaataaaacaaagatccctgttcttgttctggtggagcttaacttctagcaggggagacggtaaacacacagacacacacaactgtaataaatatgttgattctgtagtaagttacaaagtgattagtattaagaaaaaagttgtgccaagaggtgagttcaaggacctcacagataactctggcttttttggggtgagccttgttcatcttgctaggctctgacttggctgctcttgtcctcagggtgcttccaaccacagataggagggcagaggcagggtagtccttggggaccatgctctgccctgtagagaagctccttggtttttggaagctcccaggtgtgcctctccctggcacaggacaaggaggtacctgggatgataggatggtgagatttagccgtggggtgagctggctgtggatctcagcagtggtggtgttggcctggtctgtgctcacaggtgagaggagcagtatgaggaagggacctgtggttaagggcttgagggagagaaatgagaaagagcaatcagagaggaaggagaaaaacagagagtgtgctgttttagagactgtggcgtttcagaggaaaagggtgagggaagtggttaggcaagtccagcgcagctgagtggtcaggcaagaaaggcctgcaagtgttgattggatttagcaatatggaggtcactgatgacttggatgacagtgacaccaggggagggatagaggcagaagcctcactgtcctggactaaagaatgggaagagaggagcaccatttccagaaggatttttcccaggagagggcaaggcattccacgctgaggtctggaagggcccgtgaactctgcggccagcaaggcagaaacgatgaggtgatagaatgtccaggttggcctgaccctggggggccatgtgggctagtgtacatgtctccagaagaggagacagggccagagaggaaaagagtctttccagggccacacatcccatagtgatcggcaggggaggaccagacttcccacctcccaggacagctcagtccctgaggcactgggggcccttctgtcctccagggaaaagagctgcaactggggccttgcctgaaatggccctgctgacccggtcagcctcaaccctcaccacttttttattctctttgctccgattgtaccatcctttctattccagatcacattattttattttttttaatgaccttccagtttttgcaccttttgtttctttttcccaggacaatctacccatcctctctttctgccctcctttcatttggttaacttgtcctcaacatccagcaaactgtcctgactactctatggggtcaactgcctccttggtgccccccacgggccttcctttccttgtctgctttcccactaaaacatgagctccttgaggcaatatcacgtgcgatctatctcttcgcctccagcaccctatgatagacctggcacaggttcctttcagcatttgccgaatgagaaggttcccctgtgtagaatctcagttttgaggccggcatggaatgaaagagtggagatgggtgggaggcagaatcattgttacagagatgcagctccagtgccttctgctgtagccatggtcctgagctagtcaggggcagatgtacagctctgcccttgcactgcttttgttgctgtgggcagagggaggacaagtgtgggctttcttgggctgggccgcagttgcctggttatcatactggagctgggtggggtgaggtggggagataggaagattgggaggctgttgatttggtctgctcatggcagcccagcctcctcatgcctgcccgctacctccttccctatgtgcaaaacaactaactgttccctagaagccagtgttccccctctggccgcactgcccttgcgaacgagtaaagtaccactgaccagcccatggggacacaggccatggtgttgggcatggtgtccagcaacagaggctctgcaactgtgagtcagagtaaggtagggagtaagtctgggtcacccaagtcatcctctccattgtggggaggaggaaatgaggcctagaggggaagcagcttgactaaggttacctaggattggagtcagatctgagtccagagccagtgctcactacctctcaggaaaggaagacaaaatagtcaacaggtagttggtgtccttagagcaaataggcctgtgctgtgcagggacacagcagctcagcctgccccagcaatctgctaggactatgagcaatcagtgtgggcgctggacagcttgcctcaagcagtgggcccgacttgaggacaagcccagtggacagtcagggcagtcaatttggtatcagttcaagaagagagaggccagggcacagaaggcagtgaatgggaagggcaactgggccaacagaaagaggctgatctttggagtcagaccactgggtttaagttccagctgtgtgactttgggtaaatcactttacctctctgaggttcagtttcttcattggttaaatgaagatattaacacccatcttgcagagctgtcatgggatttcaaaataatggatgtgaagtgcttatgttttatagaaaacagccgttattattcgtggaaatgggatttggatagggggtatgcttgggaatggcagaagacagaaagaagaggaagatgtgggaaacttaatcattcacagcaacaggaattcctgctgagcagtgcaggggagccagcaagggactgccctggccctgtctgcaggggttcacaggctgggtggaagtggggtgaagggaatggatacagagcccttccaccctggaggcaagtgctgtgtgagagaggcctggtagccacgggagatcctgctctggcagtagagaccagggtgaacattagctaaattgaaggagcctgaggaagaggcttggggaaagcctccaggagggagtgccattttctgtcctgggccccagcatctctcaatgggggatgcaggccgccccatggatgctcatcctccctcctgggtcccctactcctgcccaggccacctggctcagggcggagctggtggagctccctgctgcccactgtcctgttcctctggctcctcctttctcttcctacctctccccacttgcttggtccgagctctgcctccctccccagctcccggccttttctttccacacaataacaggatgtgatccgttcgaagagaggaagtggggaggacgggcagtgctgatagcgcgtttctgactctccactcctcccctcccctttggaccagcccctgcagctgcctcttcccctaggctctgcctgggtctccctctgggttcagaagagatgagtttgggatcatcaggcccactctggcctgttcaagcctatggagagatgcacactggccgtgctctctgcagagcctgccttcctaggagactcactgggttagctttggaccctgggttattctgagctgctggagcctgagggtgggtccctcacctctaggcagccaggtgccgcctgcccatctgcttccccaagtccacgtgtgtctgatccaaagcagtgggatgatggaatcagtggaatgtccttgtcaggtactgtctatgcttggccttgcacagcatgtgggatgggctgcacagatgaggaaagtctcagagaggcaaagtaggaaccaggaactaagctgaagctagaacctagatctgctggtgttctatcaccactcttaggtcagcactgtccaatagaactttttgtgatgatggaaatgtcctgtgtctgtcctgtccaatattatagccactaactatatgtggctcttgagcacttgcagtgcaactagtgcagctcattgcatttttattcatttaacacaatgatttatttatttatttgagacagagttttgctcttttcccccggctggagtgcagtggtgcgatgtcagctcactgcaacctctgccttccagtttcaagcagttctcctgccccagcctcccaagtagcttcaggtgcctgccaccacactcagctaatttttgtatttttattagagtgggggtttcaccatgttggccaggctggtctcgaactcctgacctcgtgatctgcctgacttagcctcccaaagtgctgggattacagatgtgagccaccgtacctggccaacaacattaattttaagttgaattattctgaatgtaaagggccatgtgtggctagtggttgccatgctggacaacgcagttttagcctctctaattcattaagtcattgtacacttactgtcatctttgctgaaccgggcagttctaggaatgcaggccaatcaggtagttgcaggcatgtggagtgctgccctagaagtcagccagggcaggagtctgactcacttgggggtcaagcaaggcttccagaagaagttggttcttgaaggatgaataggaatttgtcaggtatgcaaagagaggaatggcattcagggtagcaggaacagcaggacagaggtacagccttgggaaagagtgggctgtgctttggaagctgcagcctgggcagctggtaaggcacctgcggtggagagtgttggggctgatgaggtctcagggccttgaatgctgcaaaggcaatgggaagtcatagagggttgtgagcaggtaggaagacatcagatctgtgttttagggactctctggttagttaatgtggaaaggccagactgaaggcagggagaccaccgaggagtcagagagctgcaggccctcacagcatggcacagcgaggctgcttagagagaggcaggaaagtttgtcttcctgcttccacagagtcagacagcaggatatgtttgagaaaagcaagactgcggtgctatggtcctaggacttgaaggcccggagctcaggagagcctggaatcctcctgcagccaagcctcagtcagctctttcttttcccagcacacttccccaacctctccacccattccaccatcctacttcattcctattacgatgccagtccccagagaagagcagagctgagtctctgatgtgtcagagtaaaaagactttatgcaaatcctctgtaaagagcaagtgttggtagaaggaggccgggggcctccacatcccagacctgggaagctcagaaagaggatgtgagtcaccaaagtttagcctcacctgctctaagccttgtgctgtttatgtccaagggctgtgctttcatttctgttgtcctgctgttccctccctagaatccagggtagaggggacagttactcccattttacagatgaggaatactgaggtcacagaagtgatttgcccaaggtcaagtgggtaagagagaagcctaactgagattccattctggactgtttggagaaccagtacccgtaccctacatcaggtgagcccttgaatactgccatgatcactatagacaggcactgcacagttccaggctattaggacaggacttctctgaggggaaatcaggggagggccccatatacagggggaggggtagtttggctctgcattatttcatgagttccctgatttaggggagacacaatgtctcctgacccagtctcacttatgcagatggtggtctgatgataacatcacctgcccctgcctggctcccacacccttgccatcccatgacaagagtccccaagacccctgcctttccaagaccgagtagagctacgggaccaagttggaaaaccctttcccaccctatgcctggtgacagctcagccagctgagccgcaggagcccagagtcctcagctcttcccagctaaccctctgcggcttgggacctgtggtgttcctgtgtcccaggctctgtgggatctcagagggggctgcgccttctgccctctggcagttcccacacgggctggctgaggctcctactctctgcactccgcccctctctccagcaatcccctgggagccactgtgttcaatgggctatcaggcttccccatcactctcacgcccccctccattacccctgaataggtgggatccagacccacacaagcactcccagccccaagtccccagccaatctttcccaggatcgcctgggacctcacagttctgatgcactacctgcctagccctgctcaagactcaaagtcctgggcggctggcactccaagaggctgccattctattgtttggcaacagcatattctaaagcagcagtgtaaactcagcgccaacaccctcagattgtaagattctgctcagcgagcctagtagcaggtaaaagttgggatctctaagatctcagtttccatcaccctaagcaccgacattcagggattctatgtgtctccagcgtcctttgggtttttggccactgcagcagcttctggccacaatacaaggagaggcctacacggggtggggcaggcaggacaggcggtggttgcctggcttgtttttttgaggggaggtgggaggctgttggccatgggcccctttagggtccacatctgctgggttggggctcagccagagcccggctggctggtccagttgccgggctgcagaggcgaggaagggagcccggctggcaggctgtgtgatgctaatgaggcagggaggcacggcttttgtcctgcacttgtccttgctggagggtcctcagagagagagacaggtccctcctcagacccaagtggctgtgattagccttcaatcactccctttgatggctcccagtgctctgaggggcgtggacagggactggggagggaagggaagcaagcctggtcccgtgcccatccctgtgctttccagggagcgtccaaaaaaaccgcactgagtcaagaccagagtgacaacactgctccatcctcttctccctgaagggccctcgagctccccaagggatccagtgcatcctttctgactttccagctctgagcctttgccacacctgagatgccctttctgtagactcccacgccaggagcaggttttgggtcagactcagtctcagatgctgcaactgctgcttccctccaccccgggaactggggcctctcctatttctgaatgcacagagtccctgagctgtgtctaggtgctactcaccatcccctacattcgagtcctggcctcatcgccctgtttgttcatgagctgctcagtcctggggcaatgtgtcactggttggtcgctaatggtcccatcctgcccagtgtgtgtggggctcacccacaggaggtgcttagtgaatatttactcatcagactccagggtgggcgagcacaaatgaatcattaaagtttgtaatgattcattgtacagatggggagggatgtgacttgtacagggccacgcagggtggtgagtgacttagcacccccagcatcagctccagatctcttctagagcagggcatctccaaggtgagtccagggacacccaagaactccaaggagaaaactcaacgggacataaacctaaatgggaaaaatgttacatctttattttcatcaccctgtgactgaaacatagcttttccttccattgttaatgtaggcagcaaatcacagcactagcaaagagtgtctgcgactttcgttaccaacagaaattacatcccagatgatagattaccttgaaatattgttcccaatcattattttgaaattatggttggtattagacttgttgctagatcttttcatttaatccatgagtaaggaggcacacatataattacatcataaaaatttaaaatatcttgacaattgtatttcaatgcctttgattttcattattctatgtattttattttatgtgtttaaggcattaatttttaaggggatcatagactccaccacactgccccagaggtccatggtacacaaggccaaagcctctgcacagagtgtcctcgctgaccctccagcccagagcttgcatctttcccggctccatctctagtcggaaagggtttgcatcatgcactggcatcctgattttgcaggaaagttgcaggagaggtaggcacctgcttgtgtgattgaagggggcttcaatgctccaatgtagccccttggcatgtcacttttaaaatcaatatgtgttgagcacatcacacatgccaggtcctgttcttttttttttttttttttttttttttgagactgagtctcgctctgtcacccaggctggagtgcagtggcgcgatctcggctcactgcaagccccgcctcccgggttcacaccattctgctgcctcagcctcccgagtagctgggactacaggcgcccgccaccacgcctggctaattttttgtattcccaggtcctgttcttaaagcaatgaccagaatagagcaatgaaaaagaaacattttctttggtgaagtttatattcttagtggagagacagatgataaataagaaaaataagttaaataattagtggattggatggggataaatgccaaagagaagaatgaagctgggaaagggaatagtgagtgtgtgtgtgtgtgtgtgtgtgtgtgtgtgtgtgtgtgtgtgttttagggggttttcaatgaagggagggccttttttggaagtaagcaagagggtctcgcagaataggggtcaccggagtcaagacctgaaggagatgaggcaataagccatgcagatatttggggaaagagtgtaatggaggggaacagctagtgcaagggccctgaggctgcagtgtgcctggcatggactggttcagggcagcaaggaagcaggaatggctggaatgaggaggagaggagtgagagatgggttggagaggtaccacatggagcctctagtccacatagggactttggcttttactttgggtgggatgcaataacattggaggatttgttttattattcttttatttatatttatttatttatttttgagacagggtccctctctgttgctcaggttggagtgcactggtgtaattatagctcactgcagccttgatctcccaggctcaggcaatcctcctacctcagcccactgagtagctggaaccacaggcaggcgccaccatgcctttggtttttagtagagatgaggtctcactatgttgcccaggctggtctcgaactccagagctcaagcagtcctccagcctcggcctctcagagtgctgggattataggtgtgagccactgcgcctggccccatcagaggatattgaataggcaagggactaaattttcgaaagaatctctctggctgtcatggtgagagcagacagaatggagcatagcaaaattggggagatcagttaggacactattgtgataaggctaatgagcgataaggggcttggatgttgcagcaatggaggtggtaataagtattattatagaagtctagatatatttagaaagagccaagaggatctactgatggatccagtgtggaaagcgtcagaggggaacgtcaaaatcaactatgagatccttcctctgaatcgctggagggccagaacaccgcatactaagcaggaaggctgtgggaggagctggttttcagtggggtgagctcaggagctcagttcaggacatcttacgtttgagaccctgtcagtggagtggtctgggttggaaatgtaactttgggagagatctgcatttggatggtgtataatgcagacagggctgggtcatagtgctcagtgagcactatgccaagtgctttctagcaccttctcacctcactcccccaacaaacccaagaggagggtgctattatcacccccattatttagatggataaactaaaacccaagggggcaagggactcactaaagtcacaccacgaggaaaaagcagaaccggatcccaacttatatgtgtcccatttcaaaactcaagctctgtaacccatatatactattgtaatttcttcttttttattttatttttattgatacataatatttgtacatatttatggggtacatgtgatttttgttacatgcataggatgtataatgaccaaggcagggtatttaggacatccatcacctcgagtatttgtcatttctttgtgttgggagcatttcaaatcctcttttctagctatttttttttttttgaatcagagtttggctcttgttgcccaggctggggtgcaacggcacgatcttggctcactgcaacctccaccccccagattcaagtgattctcctcctcagcctcccaagttgctgggattacaggtgcccaccaccacgttcagctaatttttgtatttttagtagagatggagtttcaccatgttggccaggttggtctcgaactcctgacctcaggtgatccaccagccccggcctcccaaggatggtgtcaatttttctaatttgaacaaccagttatatggtggttccatttactgaggagcatagaacgacagggggtacaaggagaggagcaggcttaggggaaagagtaaattcactctgggtatgctgagcttgagatgtctgtgaaatcaagtggagatgttgacaacatagttggatatgcagacttgaaactctgcagaaataccaagcctgtaaatatagatttggaagttatcaacatagaggtggtaatttacatcatgggattcacccaccaagagggtgtggaatgagaagtggaacaagatttctgaggaatgcagcatctcaaagctgggcaaggggagagaaacagctggaggagacagaaggagcaaccagagaaggaggagaagagtggggaggtgtggagtgctggataatggggaagacaggggttcaaggtgctaggaagtgctgggattacaggcttgaacaaccatgcccggctgctattttgaaatatgcaatacaccgttgttagctgtagtcaccctattctgctattgaacagtagaacttattccttctatctcactggatgtttgtacccattaaccaacctctcttcatcccacacacctttctcagcctctggtaactatcactctactttacctgcataagatcaatttttttaagtttccaaatatgaataagaacatgaaatatctgttttcctgtatctggcttattttacttaacataatgacctccagttccatttatgttcctgcatatgacaggatttcacccttttttatggatgaatagtattccattgtgtatattcaccatattttctttatccgttctttcattgatggacacaagttgattccatgtctttgctattgtgaatagtgctgcagtaaacacgaggatgcatgtatttctttgaaatactgatttttttccctttggataaacacccaatagtgggctccctggatgatatggtagttctgtttttagttttttgagaaatctccatactgttttccataaacactgttctaatttatgttctcaccaatagtgtataagagttctcttttctctgcatccttgccagcatctgttattttctgtctttttgataatagtcattctaactggggtaagatgatatctcattgtggttttgatttgcatttccttgatgattagtgatgttgaacgttctttcatatgcctgttggccgttagtatatcttcttttgagaaatgtctattcagatcctttgcccactttttaatgatattgtttcttgttttgctcctgagtttcttgtatattctggatatagttccttgttaaatgactagtttgcaaatattttctcccattctgtaggttgtctcttcactcttttttttctgtggataagctttcaagtttaatatagtcccatttacctatttttgttttaattgcctgttcttttgggatcttagccataaagtctttgcctagatcgatcaacctgaagtgtttctcctatgttttcttccagtacttttgcagttctaggccttacatttcagtctttaatccatcgtgagttgatttttgtatatggtgagagataggagtacaatctcattcttctgaatatagatgtccaatttccccagcaccatttattgaagagggtatccttttcccaatgtaggttcctggcatccttgttgaaaatcaggtgactataaatatatgaatttatttctggtttctctgttctgttccattggtctatgtacgtatttttataccaataccacacagttttggttgctatagctttgtaatatattttaaagccaagtagtgtaatgtctccagctttgttctttttgcttaggattgctttggctgtttgggctcttttttggtcccatatgaattttagattttttttatttctgtgaaaaatatcttggtattttgatagggattgcattgaatgtataaattactttcaattactattgtcattttaacaatattaattcttccaatccatgagcataagatgtctttccatttgtttgtgtcctcttcaatttctttgatgagtattttgtagttgaccttgtagaggtcttttacttccttaaatttatttctaggtattttattttattttttgtagctattataaatgggattgccttattgatacaatttcttcttttgtgctcctccatcccacctccctcctcctttccttcccttcctcccttccccctcccttcctgttttttttttttgttttttggttttcaagatacttacctttagctttcaagtatttttgaaagaggtcaaagtatagttagagtgaacactcagcatttatttttatttttattttttgagacggagtctccctccgttgcctaggctggagtgcagtggtgtgatctcggctcacaacctttgcctcctaggttcaagccatcctcctgcctcagcctcctgagtagctgggattacagacgcatgccacctccccggttagtttttgtatttttagtagagatggggtttcattgtattggccaggctggtctcaaactcctgacctcaggtgatacacctgacttggcctctcaagtactgggattacaggcctgagccaccacgcccggccaacactaagcatcttttaaaattgtcttaaattttttattatggacattttcaaacatatattaaagtagagaataataaatggcatgaatccagtttcagcaattgtcaacatgtgagtaatcttgttttgcctatacttctatctgtctccatgctccctctccccacaatggcttattatgaagcaaatctcaaacttcatattatttcatctgtaaatgttactatctttattagttgatttaattaaaaattactgaacatctatctgctctgtcaggttatatgctatgttctgataaattcttaatcatctttcaaagctcagttcaagtgtcacctcttcctggaagctttccctggttttcccctctcccaaaagaacttaatgactcctttcctggcattcagattatatgcctccttcacagcgctcactgtttaatagcaattattttaaatgtgaggagatagtataatataatgcttaagagttttggaaacaaatagacgggttaaaatttcaatttctgctttggaatcaaataaagttgggttaaaattctgctttctgagcttaattcctttgaacctccgtgttcttatcagtaaaatggggatatagcactcaccttatattgtggggaataaatgggttatgaatccaaagtaccttgcacagtgcctggcacatagtgggcattccttcaagaagttacatgcttctctcgccacactgtgctggaggcaggaccacagctgtctcctgtgtgtgtgctggcacgtggaagcctctgcggaagaatgtgggaggggaagcctccaattacagaaagcaggcagactgggccctagcagccctgcctggctgtggacagattctctggcaaagtgggcctctggttcaacttttgggctatttaaaggcattagtaaaaatccgaaaaatgacttgattttgtcttttaatgcacacttattttgtttagttggaaactacaaatttgtccctcccctcaactaaataatctttattatagaaactctggaaagaacagaaagagaagaaaaaaatcacagaatcagcccagatcacccatttatgtattattttatttccttcttctttttaaaaaaatttgttttactttccatctatgaaattataattgcattttgtttactttttggtccatctccagctttttaaagtcatcttcattttgagggttgaagtctgacctttcaaacaaaagctccaagtgtgaaagggtccgagggtttggatgtggcttcttgactgagcaaggggtgtccaatgtgtggctggcaaaacatgcctgcaacacctctcactgcccacctccttctggaagctcaaggtttctattcacatacctctgggaatgggaagctcaccacctttcagggtcatctctgtcatcactagacagctttctctcactgaaccaaatccagcctcccagtgactcttttcatcatcctcagctccatgctcagagggcacagagcacagtttctctctctgatctggtgcagccctgcagatatctggagacagaggcctctgagactgctactcttcaggctggaaatttcagctcctccaagtatttaacagactaaaggcaaaattagtaacaagggaagaaaacagttttagttaattaaaatgttgaatgaaatcagttccatgactccacatgccctgaaatgtgaggtgtggccaatgcttgtagtcttaccctaagtggtctagaagacaatgtatattgcttctttatttactcctcagttcagatagataccccctccccatccatttaagcaggtgttgcttagggcgggtgttagcccagcttctcatccccctatcctggaccgtgtcatccctgccggaggcctcagtcaccatccataagctgttgaattccaagcctctattcccagcacagatccctcccaggaatgccagaccaaaacatggagctgcgtcctgagatgtcctccgggtgctgcaaacagcctgtccacactgggactcatcgtcatcggcgcattgctctttgctcactgcacccactaacctgtgagctccctttggcacggctgtggagctatggtactttagaacagtgcttggcacaggaagacacctacgaaaggtgtgttaaatgaataaccacatgccctctcctcaatcccagcttgctgctcttctagtttcctctagtttaaaaaatagcaccggccaggtgcggtggctcactcctgtaatcccagcactttgggaggccaagccaggtggatcacctgaggtcaggagttcgagaccagcctggccaacatggtgaaaccccatctctactaaaaatacaaaaattagccaggcgtggtggcaggtgcctgtaatcccagctactcaggaggctgaggcaggagaattgcttgaacccaggaggcggaggttgcagtgagccgagattgcaccactgcactccagcctgggggacaagcaagatatttcttctcaaaaaaaaaaaaaaaaagaaaagaaaagaaaaaaaatagcaccaagtttcaagcactgtctgaatcagaagacgaggcacctccttgattgtactcttttgaatatctcacttctgcgtctatgcagctagcttatcctgccacttgtaccccttaaattgctcttccatcctccaattctctctgtgcactgttttaacccaagccatcaccatccttctcctggatcccttccacagcctgctcactgcccacttccctgttcggaccattcttccagctgcagttggagagagcttgccaaaatgcaagactttcccacatcgcatctttgcctaaaacctgtattatctgtattatctctaaggtgatgatgaccgcatctcttaggtcctgcaaggctctcgagacctctttcctgaccaccctctgctctccagccaggcccatctcccatcagctcattgtgtggtgtgactttccctccctgctcctcccaacctggaggtgctctcttctacaccactccccaaccccagttgttgcagattttctctctctaggtcctagaggagtgcctccacggctgcacccacatgtcccaaatgtacgtctccagcctggacctcagttctgacctccagactcacattcctttctccaaaccaaactcgtgaatcctgcccctccttcagaaaaaaagcctcctcctcctgcaatcttctccatctcagtctgctccagctgagcagactaaaaacctcagaaccattcttggcttctctcttcctctcacattccagaccaggttgggtttacccgcaaaatacatctagactcagagcacggatcctcagctccacagctgctccagatcccagttgccttgagttgtcctcgcctctcacctggagcactgtggaaggctccttgccggcctccctgttctctcttctttctcccactgtctcttctccacatggcagtcaaatcatgtctcctgtgctcagatccctccagtagctctttggtctcattggagtaaaagccagagtccttacaaccactcacaacacgccagatgagggggccacacccttgctttccaacctcatctcctccgctctccctgcactcccttcagccacactgactccctccagcctccttcctcagggcctttgcacttgcctgtctccttgcctggggtcttcccccatccaccgctgaacatcttacttcctcactttcaactcttggctcaaatgtcacttcttagaggcgccttccctgagaatctgtataaaatagcacaccctcttcttgtagcccccccccaccattttcctgatcctgaacttttccatattgtcattggaactgttttatctgtctgtttcctggctgacccctctagaatgtcatttctataaaggcaggggctttgttttgttcattcctgtatccctagcatcttgaacagtgcctggtccacaggaggctctcaataattacttgttcaatgaatgaatcttagatttcatactaccttttcctgacttcctagactagatggcaaactcttttatttacttttagcaactgtaccttccctttgaaacatttactgcaactgtaattacaaaactgtataatgtaatcttgatcttattctctacaggttgggcatccctaatccaaaaatctgaaatccgaaatgcttctcaatctgaaactttttgagcatcagcatgatgccaccagtggaaaatttcacatgtgatctcatgtgatgggtcatagacaaaacacagtcaagaccgggtgcggtggctcacacctataatcccagcactttgggaggccaaggcagatggatcaccggaggttggaccagcctgaccaacatggagaaaccccgtctgtactaaaaatacaaaattagccaggcgtggtggtgcacgcctgtgcgcctgatcccagctactcaagaggctaaggcaggagaattgcttgaacccgggaggcagaggttgcgttgagccacgattgcgccattgcactccagcctgggcaaaaagagtgaaactctgactcaaaaaaacaaataaacaaacaaaaacaaacaaaagaaaccacacagtcaaaactttgtttcacatacaaaattagttaaaatattctaaaaattacctttaggctatgtgtataaggtgtataggaaacaaatgaatttcatgctcagacttgggtcccatccccaagatatttcactatgtgtgtacaaatattccaaaatcagaaaaaataaaaaatctgaaacacttctggtcccaagcatctcagataagggctactgtatttccagtcccatagtagccactaaacatgtgttgagtgaatgaatgaaagaaagctaggatgttatttgagaaactgaccaatagcaggtgcttgacagagggactgaaccctgggctggacatagggactcctggagtttagccccatctctcccattgacttgctctgtgacttttagttgatgactgtccatttctgggtcacagtttccccagctgaaaaataaggagcaagattacatcatttagaatgagctttcaggcttgaagagattgtgattctagaacccagtactcccagcttgcttccactgctggcctggagccctgggtagggaaaggatgtgcttggaaccagtagggtaagatttggctttgggacctctgctggcaggccgggcttctggcatggggccagcccttgaatttcttggctggatgagtgggcagcaggatgggttgattgatcttcccccactgtggggtcctggccataaatctcctcagcccaatggggtcgcctaggacccaggagtcacagccagtgcattccttggcttgactggctctgggctggtgctttctgccccttccagctcccagacactggagaccctgtgggcgttagcacccattcaatctgatcatagagcctagctctgtgctccagaaagcctctgtccagagagctgccaatctttctccaggtctgaccttaagatcacatggcattgttttgagcagatatgccctaggctcccggtgagccaggacttaactctctttgtgccatggaacccttgggcagtctgatgaagcctaaggaccccttctcacagtaatatttttatttattgataaattaaattaattaattaatatatttctgagaccgagtctcactctgtcacccaggccggagtgcaatggcacgatctcagctcactgtaacctctgccttccaggttcaagcaattcttctgcctcagcctcctgagtagctgggactataggcacatgccaccactcctggctaatttttgttatttttagtagagatggggtttcgccacgttgcccaggctggtctcagactcctgacctcagatgatctgcccgcctccgcctccaaaagtactgtgattacagatgtgagccaccgtgcccggcctctcacaataatgtttttaagtgcataaaataaaatgcatagcattgcaaaggaagtcagttatattgaaatgtacttatcaaaatactaaaaatataagtttgtaatatagtgatttatgtgtccatttataatgtattcaacaacaagatcttgtggaaggtccaatgactattgtacttctacagtggtgagtataagatatatctagatatctgcaataattatatggtgatatgaaaatatcacagacagtctgtggtttgttgccttcatcctacggaagaaaatggtaaattttatttatttttatttatttttttttgagatggagtttcgctcttgtgcccaggctggagtgcaatagtgtgatcttggctcactgcaacttctgcctcctgggttcaggtgattctcctgtctcagcctccccagtagctgggactacaggcgcccaccaccatgcctggctaatttttgtatttttagtagacacatggtttcaccacgttggccaggttggtctcgaactcctgatctcaggtgatccacccgcctcggcctctcaaagtgctgggattacaggtgtgagccaccacatctggccgaaagtggtaaatttaagttagaggttagtgaaatacagatataatgtttccctgtccatgttcatgagctagagttctgtccacagccctctgggaagggagtgttacatgaaggggagccaggtgaatgaattcttaagtctgagaggagaggggctcaccacagtcctaaccagcctgcttccttgggaccttatcaaaatatgaaaagctatcatattctgttaacggaatcacaggatcataggctccagacctggaagggctacaaccctgctacagtttcagtatatgtccctctaaaattcatatgttaaaacttaaaccccaattagctgggcatggtggcgggggcctgtaatcccagctactcaggaggctgaggtaggagaatcacttgaacccaggagggggaggttgcagtgagctgagattgtgccactgcacttcagcctggacaatgagagcaaaaactccgtctcgaagaaaacaaaaaaaaacaaaaaaatccttaaaccccaaggtggtgatattgagggctgggacctcttggaaaggggttaagtcaggagggcttcacccccgtgaatggattagtgttctcaaaaacggggttgaagggagtgtccttgcccctttcacctttccatccctcccaccgtgtaagggcacagcaagatgtgtcatcttggaagcagagggcagctctcaccagatgccaagcctgctagtgccctgatctgggacttcccagcctccagaactgtcagaaagtaaatttctgttctttataaattacccagtctagggtatttttattaaagtggtacaaagagactaagacaaaccccttttgcagacacctcattgggtgacctggtccatggcctctgctcttacatgtctagggaaggagagctcaccctccaggacaccctcatatcaggctgaacagctctaactgtcagaggaatggttgccttgtcttctccttcacatacagagatgaatcagacacagtccttgccccacagatagagagtggagagagacaaggactcaactacagctaaaatgttttattcattgaacaacctttctctgagcttctgctctttgttaggccagtggtaggcactgcatatactgacatttaatttcataaaatgtgtgtcgagtgtgtactcaggcactgtgctcagtactggctgctgagggagagatagacatgataccttccctccatggagacagttattaaatgagtaaacatacaaatcagtgtgtaattgcaacttgtgatcatggctgtgaggagatgagcaaaggagactcatagaagggagtgacttcagatgggagagaagggaagtaaagaagtattcttgaagaaagggatgtaaaggaagatcagtttgctgggcaaataggagtggaagagtgttccaggcagagaaaagagcaagtggagagaagtctctgatgtgggaaagagcttggcttttgttaggaagtgacaggaggctccggggccagaccaagctggagtggtgggtaaggaagattgcctgtgccctcaaacccatgcaaagaagtttgcatattattttaagggctgatgaatgccataaaagggtttaagcaagatacgtttgaaagaataaaacaaggtctccaggagctctctggcttacagcaatgatattaacaagatgaagtattataagaattagtaaagagctgggcgcggtggctcacgcctgttatcccagcactttgggaggccgaggcgggctgatcacttcaggtcaggagtttgaggccaccctggccaacatagtgaaacctcgtctctactgaaaatacaaaaattagcttggtgtggtggtgggcgcctgtgatcccagctactcaggaggctgaggcaagagaatcgcttgaacccaggaggcggaggttgcagtgagccaagattgaaccactgcactccagcctgggtgacagagagagacactgagagggaaaaaaagaaagcttttatatttgtgttctaaacacccttcttgaatgttctctgtactttttctcaggctaagctctttgcctggattcctctccccagactgtctgccgagtacaacactctggctaactttgcctgcattacctcctccaggatgccttccttagcaatgtagtccaccacgctgccctatgtcagagccctgagcactccctgtatgctgttcccagactatttacatgtcaatgtccaccgtccctttcttcagaccacccctggaggagggcaaaagtgggggctggagggaggggaagttgcagaatcttcagcagcaaactggctccctgcacgcccagtctggtattggagctagacactgccacctgctggcagtgagtggaatggctgacaagatggggttgggaggaaggagactgctggaaacagtccaggcccactttggcttttctgaagggcaatcgcataaggtctggctggatggagggcttgtctaaggggcctgatggttttgcgtgacagctgggctggaacaggaaggaggaactgaacgtcgatggaacagctgctcaggacacacggtgcagccctgtggggctgctgagaccttagtccagaccctgggccccagccagaccagtaggggggcccaccttgttaccatggggatcagggctgtgtccatacagctggggagatgaccctccacccgtgtgaagacctccagggaggagggaccagcctcaaagccaagtgtccacccatgctccctcttttctggaacaacttgttttgctctaaagcttgggactttgacccaggaggtatgttttcctcctgttgatcacctggtgtccttcctgttcatccccttcccccaccactcccaaagcatagcccaggggatcctttcctttccctgggtttttcagggaagtggaggatactggggtggggaaggcagaacctgggacttgagtgctgagggcactggttggagggggtggcacagctgtgacccccccaccctccttaagtctgtccttgcttggctcctgggataccccactttcctggggttgcttcctcctgtttcctcctgccccttcttcctttgaaagacctttgtgtgttgggggcgtgtctccttctttctgtgctctcccctcaacacccctacccccgctacacacactggggagaccatgagctcccaggcctcagttaccatccctgtgctgcagacggctcccagatgttccactccagatgcagggattttgcagccttccagatgtctccctctggaaagtccacaggcactgcaagcataatacctcaaaatctatagctcattaatcctccaaccccccaaacttgctctggcccctactgaggcactagcatctacccagctgcctacgccagaaacctgggagtcacctgaagccctgcctcctgcctgtacccattctcccagcttggcactgtgttccagcagccacaccccggcttctctacctcctcaacagggctcagatctgttcccatgggcacttcctgcccaggtccaggcactggtgttgtggccactgtagcagatccctggatttctcttctccagcctttgcatgcccctttcactctccacactgcatggagaggtgttttcccaaacgcaaaactaaccatgtgactctcctccctaaaattcttggagaaggcaccagtagatgtttgttaaattcagccccattccttacattccaatcagtgattctctggctgttcattaacatgcacagtgcttactccagtctgtgttagaagattctgaggacaccaagttgggtgtgggagggaggccaggatatacatgtttgggaggcatcactcaactccaagcaaagttctcccagatcaccttgagacactccatctttggatggcaatgggcccgactgcacacgcatgtgaacacacacacacacacccacacacaccacacacacacacacacacacacacacacacacacacacacacacacacaggaagcaggcctgaggcatgatgtctgagtgctcccgctggagcaggaaggcagaatcaacctgccataggaagggttgcccaggaggcctgatgaataggagtttggtggcttcagggaagagaggctgtggaggtgccttcagctcaggtgctggctcctggggaccttccatctctgatgagactttgttccagttggcccgctcctttctagggagtcagcatctcagcttcccatacttctggggtggggggtggggcaaggagaccagcatgacccttggtcaggggcttgcacaggaactctggccattctcattccctgagctggagggccaggtggacaccacgtgatcctggggaggcttttgcctcttccgagggctctggctccagggcctccctgttccaggggctaggtgtgccttcctcaatgctgcttttggctatgagggtgacgggcccagggcttcagggccccagatcgcaccttgccatctggggtgtccgtcctttgtcccccacagcaggctgtgtttgcccattttctcctctgccatgggtggagatggatctgaagttgggtgttgaagcctctgaccaaggctgtatcttgttttgaggccctgcccggtttccagggaccacatctggggccaagaggaagaaccgaactgggactaggttagctgtgctgggtcagggcctgggcatgggctgtgaaagctggggactgggaccttcaggccctctattgagatctttgcagaagggggtggatttaggaagctactgggctgggccagggcgtggaaggcactgaagccgtagtgtgtcccagcattagagtcccagagtttagcttggcggggcaggggcaggtggtggggagaacaggaaataggccaggctctcggcggagtctggcagctttgagccttctctgggcttctggggttttccccaggctcctgagccagccaggacatttcttaatcccactgtcagccttccaagaagccccgcccactgggctcagtcaaggcaggagcgactgtgtgtcacccctttccctagaatccagccccactgccaggaaaagggagctcagggcatggaggtgaggctgggactctcccacatctgcttgttcctcatacccacctccttagctggcccctggaagatgacctcgaatgccagcccaagtgagctgggcaccagccaggggaggccaggtctggcagctcattaccatgggagggagggcacgttctctccgacgcccgtcttcgtgtctcctccctccctcgccttcctccttcctagctcctctcctccagggccagactgagcccaggttgatttcaggcggacaccaatagactccacagcagctccaggagcccagacaccggcggccagaagcaaggctaggagctgctgcagccatgtcggccctcagcctcctcattctgggcctgctcacggcagtgccacctgccagctgtcagcaaggtagctcaggaggagagggctgggcacgggagacccaggggtggacaggtggtgttctggctcccctccccagggccttgatacttacagtttggagggggagcagggactgcgctagctgaaagaatgtcccaaggcagagacctctgaaccaagtctctgcctgtcacttgttttcaacgagtgaaaactggcagcagttggttctaggatctcagggaggaacaggatttgaggcccaagccccaagagcaggcattgcccaagggatggctgggtcctgagtacaggggacccgggggtacaagtagggtgagagtggggcccaagccacccctcaaagacttgggctttgtctcggcctcttgggcttggatagagaacagtgcccagtgtgactcccccaaatatctgacctcttcgtcctgctctgcctgaatggatgtgtgaccttgagcaaatcactgccccttcctgagactcagttttctcacctataaaatgagaacaataaaccccaccctgcccacctcccagggctgctgccaggtcagaggtgaagaagggctttgcacctggtgaagtaactaacccaaggtctggctttcattctacactgtcaggctgcatctgcagccaaagtctggggactctgcaggtgggacttggtccagaggggactggcaaagatgctttcagagctcccctcccacccccaccccgagctcttatgtgtgtctgcttcaactctgtctcccaggtcttggaaggcctctggggaactgcagaccagagaggttgagtcacagagcacggcaagaaaggacagggttcagaccacctttctcctgccccagacactgccccttgctgtatgtgcatgggaggaggagcagggactgtggtccctggggtgactggagagaattggctgcagggtctaggaggaaacagggaggggcctccaagggttgagccctaactccccatgcttgagcaaccactgacctgagggagcagtctgaacccctaggaaacaatgactcccaaatactgctttttggcaggtgtggaactgagggtaatcacactgtgtgtcttctgcttcccctggagataagtgaggtctgacctcactacaggccagagagttcctagcctccttcctccttcccaatatttgccaggctcggagaagaggtcaggcctccactgcagcaggagagcttttggtagactcaaaggaggacatttgagcaggagtgagccagaggaaggttttctcatgtccagcttgggtccctcaaaatatagggatgcaggtatattctggcctggaggcaggacccctctgaagccccctgctgacctgtgttttgtcctgggacttctccccgctgagggtcttttctctacaaggctgagctcctgcaggctcatggagtgcagtgatgctggggaagaggaaagtcctttggggaagcagaggcctgaaggcagggacttcaggaaaatcttgagggactgtgttggtgtcaagggtcaaaaagcagagaagggacctggtgcagtagctcatgcctgtaatcccagcactttgggaggccaaggccagaggctcgcctgagcccaggagtttgagaccagcctgggcaacgtagtaagaccctgtctctattaaaaaataaaaaaagtagagaagggtgcaggttggggcctcaacctaatctctggccctagtccctgggcacccagctgggggaatcaaaaggagctcaggttttgaggcttctttcctggtccccaagacccagagtagagttcacccctccattctgcccttctaaagatgtcctggtccactcctctctctgggtaccccaggcaccccagatctccccagctgagcagccctgagagtctcccactctcatacccttcctaccatcagagaaacgtcttgctacagaacaggatcttctagatcccagaccagtcttgtcagctgtgggtcctcctcagccttctgggagccactcccagctgcaaggcctaggccggctgtccagggggctgccctttggtccctggggctgcatgtgacccacctgcgggagggaaagaggctctgggctgcctagatacagcactgaggctcttccctccttggcttctcactccttccaactcccttctctctgagcctctgttgttcctccagctccctccttttcctaagctcggtggagcttaagatgcataagtgggtcagatgggctgtatcccacccctgcctccccacaatgtctccttgctcctggcagctggctgagggccttcagcataggtggggtccttgaagagtgaggcccctcgctctcctgcacatgcagccccactgtggccccgtctgctacagcccctctccctttgttaggcctggggaaccttcagccctggatgcagggccttatcgcggtggccgtgttcctggtcctcgttgcaatcgcctttgcagtcaaccacttctggtgccaggaggagccgtgagtgctgcccaagggtccctgagcaggcagggtgggcccaggaccactgctcttgctctagtagcagtgagaagggcctcagaaaccctgtgtccaatcctccccctgaggctcaagggaagggaaactgaggctcaaggtcatggggtgggttggtgacagtcgggatgagggaatgagagcctaggcttgctggctcccagacctgggcactgtgggccccacagctctggtgcccactccctgtgagttttggggaaacggcttcgcttcttggagtcttggtgtttccgcagagccaggatagcggcccagcctgtgatgggggctgtaaggacctctagaaggtgcggtccctcctttgggtgggtcagctgtggtacagagagggcatgggacagacacacctcctgccctcacaggctcagactggagtgagctgtcagaagttcaagagttgctgctgagggagagcgcagaggacactgcagggcctgacctggtccggggtggccagagaaggcttccccattgcacatttatcccgaaacctgactaacgaggaggagtcactaccaggatagagtggcgtgggaagagcgctgcagttgagggaagggtacacccaggtcctgagttaggggcacggcaccagggctgctggggacagacacacacaggtgaagggcaggtgggctgaaatccagctcactctgcactcaccaggtcaggaccctcaggcaaggctgcctctgttcccaggggcatttcttcccagatctcacaaaggtggcctggtggcttgagtgctagccccatgcagggttgctgaggaaaccccagtggctcagtgggtggagacagggatggagacacctgagatgaggctggtgaggtgggcaggcccaggccaaccaggctcttgcacaccaatgacctgagctttggactttacctaagtgagcaggaatccagtgacaagttttttttttttttctttttttttggagatggagttttgctcttgttgcccaggctggagtgcaatggctctatctcggctcactgcaacttctgcctcccgggttcaagcggttctcctgccccagcctcccgagtagctgggattacaggtgcctgacaccacgcctggctaatttttgtatttttagtagagacaggtttcactctgttggccaggctggtctccaactcccaacctcgtgatccgcctgcctcagcctctcaaagtgctgggattacaggtgtgagccaccatgccctgcctccagtggcaagtttttaagccagtttcgggatgagacacggccttagcagaatgactctggctgcctcgtggcagatgcacggcagcggtggaagagtctccagtctgcaggcctggagagtggtgagggggtgggcatgaggtcaggagggggtctggactgtagcggtggcagagaggatgaagtgaagagacgagtctgagcgctgtctaggaggtgggcaccctgggagttggtcgtcacagacagcagcggactcgaggggaggaaggcaggaatggcatctaagtttctcatggcggatcactcaccgaggcccagaacacaggaggatgagcagacataggggcaactgctaagtttaattggagacatattaagtctggggtgcctgtgggatgtctaaggaaatgagcaggtgttcgggtccctgtaaccctcatgagagcagcttctgggaggcttcagggagagcccacactgcagggggtttaaacttgagtaagagacgagaaggttgttgttgaatgcccttcagatagactttctccacctgccccagctctgcctgaagggccaccaaccacatctgtgcccactgcccaaggcacgagctggggaaatttggggcagacactgcatcctgcagggcctgctgtggaggctgaactgagggcgtctgggacagagagaggctttggactcaggataaatcttttgcaaatatttggccccccactatggagtggggagaaagtgagagaccccatgggtggggccagtagccgcggctgacatgccctgttgcacacagctctgggaagggcagttgctagccttcgggcttgtgagaaccaggacccagaatagggtctgcttggacgaggggggccccactgaggagccccactgatgaatcccatccccagggagcctgcacacatgatcctgaccgtcggaaacaaggcagatggagtcctggtgggaacagatggaaggtactcttcgatggcggccagtttcaggtgaggtgcagggcagggctgcccggtctgtgctcccagggcctaaggagaatctcaagacaggtgctgctggggggaggtggctggggaggacggagactcatgtgggcaaaagctagtgaggcaatgggggctttgtgaggattgcagggctctgtggggaaaatgcagcccctgtgtggggcgagggctgcagaaggggacggagacttggtagggtagggttcagcgtaggggaggggactcatagggcagtgggtacaatggggacaaagggttcaatggaggaaggaacaaatgagtgagggactcagtgaggggaaggctcagtagaggatgcagctcagtgggggatgggttcactggggtatggactcattgggggatgggttcactggggtgtggactcagtggggtatggactcagtggggtatggactcagtgggggatggagctcagtgggggatggagctcactggggatggattcagtgggggatgggttcagtgggggannnnnnnnnnnnnnnnnnnnnnnnnnnnnnnnnnnnnnnnnnnnnnnnnnnnnnnnnnnnnnnnnnnnnnnnnnnnnnnnnnnnnnnnnnnnnnnnnnnnnnnnnnnnnnnnnnnnnnnnnnnnnnnnnnnnnnnnngagcctcagtggggcatgggctcagtggggaatggactcagcggggtatggactcagtggggaatgggtttaatggaggattggttcagtggggatggactcagttggggatggagctcagtgggggatgggtttagtggagcatggtgtcagtggggaatgggctcggtgggggatgggctcagtaggacccagtggtgcagcagtccacaggaggagggagataggtgtcagggaggggatgctgagaggcctccagtctcggatgcataagcccagatgtggtcaggacaatccccttctgggagtcaagtgtttattctggaagctattactgtcacaagtgcaggaaggggcagggagaaggggatagaatgggaggagcgatgacccatcaggcccatgccttcttctttcaggtccagtgagcatgagaatgcctatgagaatgtgcccgaggaggaaggcaaggtccgcagcaccccgatgtaaccttctctgtggctccaaccccaagactcccaggcacatgggatggatgtccagtgctaccacccaagccccctccttctttgtgtggaatctgcaatagtgggctgactccctccagccccatgccggccctacccgcccttgaagtatagccagccaaggttggagctcagaccgtgtctaggttggggctcggctgtggccctggggtctcctgctcagctcagaagagccttctggagaggacagtcagctgagcacctcccatcctgctcacacgtccttccccataactatggaaatggccctaatttctgtgaaataaagactttttgtatttctggggctgaggctcagcaacagcccctcaggcttccagtgagtccccatcttgctttctgaatcatgacagtcaccttccgactctgttgtagtggctttgggggattatgcaggaagcccctgtgcccacagggcagctgggaccgagggggcccaggctggggaggggctgagagtgtgtggccagggtgagggtaagagagggttggtgcctttctggtgtttgagagtgaagcaccctcaaatgggagtgtctgatgacacctgggagaactgggaggcagggagaccaggacaggtgagcccatttctgccaatgggctggtttttgtcccctcaggccaaaccctttcttcaaccagagcagccaggcaaggcttcccagggcagggcagagcagaccctaatatgagctaggttcccctagtgctgatcagtttcctgtatgtagggaaggaagaggatgtcagaggcccatgggccagagagctcacccactctacccttgctccaggtagcgcccctcttggaaatccccgcccccaaacatccttcatccctgagactctgggcttttccttgctcagcgccgctcaccctctgcctctgtgctggaggtgtcacagtgggttcacacagatctagctctgtctccctccagtagcccctccgtgctgggctttggcatnggaagtgtcaggaagcagtcttgggttgagactcaggaagcccagatctgagtcctgggtcctctgncaacttgtgtgtgaacttgggaaagctgttgtcctctctgagctgagctttctctccgtggaagatttggccagtctcacggcagagctggaggagagcccagtccttgcctatgcctgccctcccaatgcccagtcctggggtgggagtcagggttgggaagggaggatctggaaactgggtcctagtaggagcaggggagaggggaggcatgccttgcctggctggctgaacctggaggcccctcacctctgtgactgttggccttatgcgaacagcttctgtctctgtccagggtgataacctgagagactcatccaggataattcccagatccagagaagtggggccagaaggtaggaggccatccaccttgtcccaaaggtctccctctgccacttgtctcaacctgtcacagcccccttgctttatgttatggccattgttttgctattccaaggcttcaccaagtaccactggggaagactcatcttaaatgggaatcatctcttctcacctcattgggtttaggatgcagcctgcagcagagggaagaggcctgtgggtcggggagcagcggctttgctccaggcctatccttgcttttctgcgtgtcttgagacaagtcacctcccctctctgggcttcggcttaatgaactgtggcttgtgatttctactctaggcttttgcttncgtggctgcctgtgactcatgccttttcaccccacctctgccagtttaaactctgcgcattgttttttcttgacccaaccaaggttcctcctcttctgggaagtcttccttgattagaccagagggcaaagccaggccagcagccagcccagcttctccactcactgaaggagagacagaggttcctagagggtcaggcctctgctaaggcacaaacagtcccctcttcctttcctgtctcctggtgggaagcttctgactgccggatccgattctccttgcacgaggccacatttcctcccagctctgccctcagttgtccctggggggtgggagtgggttcgagtcaggtcactccaccagcctgccagggccagaaggcagagccaccatccctgtctccctgcagcaagtgaatcccagcccctcacacctgtgaggttttgccaggagaagcctgcttctgcctgggctcaccttgctccccagcagctgtctgaggcctctccaagagcctccttggcccccttctcattctgtcttgctcaatatgggcagatctaggagagtgggaaccctaggggctcctgcaggggctgggccggcactgaccttacagcccttcaccctcaccccatgttcctgccctgatccagaggggagtgctgggagcagggagctgctggccccagaactgctgagacccccaatccttatcgctcattcccacctgccagcctggccagatcggggagggaaaggaggctgggcccgggccagggtggcgcttaatgaccctccgggggcctaatctcagactggcagccacggagtggctcaggcgcgctcctggagaaggctgataacgcaccagctgggcccccaccatctatcgctgcacagccagtcccaggggcagcctcccagggcctggggagggggagcctctggactagggcggggctggaggcgagctctccacccccagccctgagggaggggatcctgagcttcgtgattggcagacaagggagagacccagcctgcaggaggggtgggctgggcctggtgggaacctccagacacctgtgctccttctctctttcctgctctcttcccaaccttttctccccacgtaggacctctcctgcccaggcctgtctcctctttgtctctcccagcctccatccatctctgtctccctgtttctcagtctctccacctctgtttttgtctcatcctctgcctctctctctcctgtttgcctttctcctcctccacctgagctcagtgcccacctcctctttctctcttgcatcccttttcagtttccagctggttctcttggttgtccccttcccagctgtcccctgcctcctaagcttccttgatgtcaacccttggccgggcagttcccacgatctcattggtctcacttctgtgtgtggtatcatctctctgtggtcccttccaccagctatctgccaggattgcaggctgcctcaagccctggctctcagcccagaatgtcctcttactgttgaggacatttttgctcttcctggaacagggcttgcaccttgttttcccctctcccacctaaaacatgtaagtttcatagggttacattataggttatacccaaactcaggcagaaaagaaaagcctccacccagcaactgcacagttgagggaagactgcagcactgcttacttcatttagacttgaagaggaacttccagccaggagttggctttgaaaacaggctgtggagttccgtctccagagtgccaggtggtcaaggggagtttcaagattactgccgtcatactcagagtgacacatgcagaaatactatctgtttattgtgcttcaaggatccattagatcaggactattgctgggcaaagcctcttcccgcagcctaggggtagtaaaggtgggggtagaggtgctggggctggggccagaatcacacacagtctgctctggcctctacccaccttcacagggaagtcaggtggctgaagccagcagaacttgctctgggaccagggtggaggcacctgcctcccatccagacctggctggagggtcttgactccctagcttggctctcctcccagggtttttttttttttttttttttgtccctggcagtgcaggggtggccaaaagcttgagcttgggaatcatgccgattggttcaaattccagcctgctcctcgatgcttgtgggatcgcctagcctttcagatcttccattcctttgccggtaaaattggctctatagtacattccttgcagggctgctgggaggaaacagagatgacatccgtgttattattgctcctgagacttgccagaaagccctccatgatcagcgtagatgccatttcttcccagatgctcctttccccactcctgggttcagcacttcctccgggcaacttcagcccctgctcctccctctctttgcacccgccccacctgccccactcactccacccaccccagggtgctgtctacttgtctgcatcctgctcctgccctgggtctgggagctcctcaagggcaggaatggagtgacttccctctctgtgcacccaggacagggctggacaggagaagggaagcccaaggagtggtgaagagccccgaaggaagggactaaactccagccatctgtcccgcggtgtctgttcatactcctcctccgtgcacgggctcagacatacatatgcgcatatgctctgtctctttctggttgaaggtcctgggagccctccggaactctgctgcctggcagtccttcagtttcgggagcttttctgtctgcccgtggcctcggctgccacctggtggctgcacgctccaaaggaagcgtagattgatgagagcctcggaagttgagcttcaggcgcggctcttccccgtcacactgggaccggacgcatttccatggcgtggtcccaggaacctctcaggtcatgccagcaactgggacttcctgtggaatgcaagggcagtggggcctccgcgagagagagagagagagagagagagagaagagagagatattaaggatgaatcccagtgtctgctctgagcaaattggaagacgatggcatcaggggcactgctctgggctatatagactgtgcctccactaaagggtccctgagaccaggtgtgggcccgtatccctggagggagaggtaacttcctctgattcgaaggcatcatataggctagtgaatggcactgagaatggcagatgccagggacaagcaggagcatgtgtgggatgaggatgcggcgtggatgtgtgacgtttcagagcctgcaacacatccgtagggaagtcctggaggagcagttgggtgcatggtggagttctgaaacagctgggcagtcggcacttgagccagagattctgctttcgacctggatgcccattgagaggttaagagctcaggtctgggtcaggcagcttggaagcagcacagcttggacacttggtagcctgggactgtggttaaatcaacgtgactctcggagctccagttcactgtaaattagggcagtaaatgatgtctacatgataagtggtgttatgaatgttaaacattcacatgaaatacatagaatagtgcttagcatacagtacacaataactgttagctatttggaaaattactattgttattatgattatttattacagagtgaactgaattggatgcaagatcacggtgcgtcagagctagcaagatccttaggatcatttagcctggtttactaatattacactatggaatttaagcccaaggaatggagagtacccgacgagcgttatgtaaggagtcgagtgagaagtaagctggatgctctgcttggctggcaggtacagaatgtgccagacccatctgtaccagcctggatctcttgaggcatcagcacaatggacctggccacaccagtttattccacaccgctgaggctggtacagttctggacatggactttgtaaataaataactgggcctttggtcagttctagctgtgagcttggaggtatggggtgggatggtgaggacaggtgggggcaaagtgaggaaaggggcagggaggagaggggagagagaaaaaggggaatgagacaggctgagctagtgagctggaattggaggttgggaacaggctttccttgatggtggtggtgctgttttctttttaattttaatttaattttattttaagttccaggctacatgtgcaggatgtacaggtttgttacataggtaaaaacatggtggtttgctgcaactgtcaacccatcacctagatattaagcccagcatgcattagctatttatcctgatgctctccccacccctgccccaacaggccccactgtatgttgttcccctcttttttgttcacttaaaagatcccacttttaagtgagagtatgcagtgtttggttttctgttcctgtgttactttgctgaggataatggcctccagctccatccatgtccctgcaaagtacatgatctcattcctttttatgtctgcatagtattccatggtatatatgtaccatattttccttatctagtctatcatttatgggcatttgggttgattccatgtctttgctactgtgaatagtgctgcaatgaacatatgcttgcatgtatcattatttttttattttttttgagatggagtcttactccctcacccaggctggagtgcaatggtgcaatctctgctcactgcaacctcctcctcccgggttcaagcaattctcgtgcctcagcctcccgagtagctgggactacaggtgcctgccaccacacccggctaatttttttgtttttttgtatttttagtagagacggggttttaccatgttgttcaggctggtctcgaactcctatcctcagatgatccaccctcctgagcttcccaaagtgctgggattacaggcatgagcaaccacacccagccacatgtatctttataatataatgatttattcctttgggtacacacccagcaatgggattgctaggtcaaatgctatttctggttctnggtctttgaggaatcaccacactgtcttccacaatggttgtactaatttacnnttgctggtgntgttttctacattgaatctgagggctactgtatgatgtgtaagacactttctgattggagcctcacaatgatcctaccaggtgattacaactgagcccaagttttagaggaaaaaaatgcagactcagagagagaaaagtgatttgcccaaggtcacatagccagctagtggcattgaaccctggccttttgactttaaatctattgcaaattctaccccagcatagggttctctttggggtgtgtgtgtgtgtgtgtgtgtgtgtgtgtgtgtgtgtgtgtgtgaaatggggagataaagaagccaacagtgtttgcctttgcagagcatgcagtccatttggaaacatgcatgtgggaaagtggggagggaccctgtcaagcatctaagaggagtggtggcatttgctgtgtccacctccatccttcccactcactactcagcacctatagccttgtcgctctccccaacactctgctgagactgttgtcaccaaaaacactattgtccggctccctgttgaaaggtaagatggtctatctgattcttccgctctcagtataataggatgatcaccattttatctgggaagctgttcctgaccacctgccctcagctcatcaagcttctgtgagcctgcaggctcaccctggtcatgccgcccatctctctgaacaagattgtgaactctgaactttgtgaggcaaagaccacatacacctctttattgcaatgtgcaagtgtcctggaatataggaggtctccgagagctatgtgttgacatggagaccttatcccttgcactcagttacactgcttccagtaaagtatcaacttctagatcagcgccttcagctccactccctcctgcacagctccacaggtacctcaggtccaaaatggaattcttgatctttcaccaacctgagtcctctgttcctgtaagtggcatccattcacccagaccagagataggggagtcacccagaatccccctctccctcagtccctgagtttcactttccaacatatctccctccaggttctttccaacacatctccctccaggttcaagcctcgatcttgcctgatgtttgcagctgcctgctcccttgtttttatttttacccccaagttttcctctacactgcagctagggagacctttcctgctggaatacagccattcacatctgcgagaggaatctaaactcaaggcaggtgtagcctagtggctatgtgcatgagcttgaagccaaatttccctgagcaaatcccatcctgccaattttatattagtgggatgtaccccaacgagggtatatcagggactgaatatgcaaattagggataaaatgaggcccatcttatgaggttgtggtgaagagtaaatggatgtaaagaaagcatgcagtatgctcagtgaatgacagccatcgtgattttcctttccttgcctgcaatatctcgagcagccactagatgactccacctccttctccctttccagtgctgccaacactactgctggaacttctgcctcccctcccctccctcaccacacatctccatgcccgtgttgttcatgtttttccttctgctagcctcaccgtcttcggggcgtctccctgacatcttttactacatctcaccctcagctcttggaggacgggatgtccccacgaaaactggcatagtgcctgcattgaacaagtactcagtgtttgctgaatgaatgaatgtgggttagtcaatactagctcagctgcttacatcacttagcctccccgggtctcaggatctccttttatctgtggtgaccatccaatgtaaagccctagcataagacctagcatgctttagacccatggttgccgtgcacagccagctgcctgtcaatcattgcccattcccattgcccactagccattgtccactctatgttcacccctgttacctcacccagctgagggtcttaaacatagttttacctcttctcaaaggtcattctttacttggtagggtagggtctagaaagagtctgcaatttggttagagtctagatttagtttgcaacccagctgggctgggtgagcccaggcttggctgatggttcagctgagcccagatggctcccatctgcctggaaagcataggctcagcctcccccttccctgaacccctaccaagcatcctggctggctgtgctcctggtcctcttttactctagtccagttcctgtcctggcttgggctgggggtaagggcacttgtttctggccactcctcatggatctctagtctctgcctctgtctttgcctgcttgaccctggtccttgtgccacttacatcaatgtcctgaagcaatgactattttttataggaccgactctcaggagatgaagatccaatcactctatcaaagaatatgagcatttccgaggctcttgtaaggtacatgctttctattgttttccttaagggttgaatccatctacacttaatcaattccaccacagtgtaaacagtgtgtgtggaggggcgtgggggtgatggtggactaacagaggctgaacactttccaaaaacttgttcccaaagtttattgctttctccatatgtaataccagttcctgttctctgtattggttgcaatatcttttttttttttttttttttgagatgaagtctttctctgtcacccaggctggagtgcagtggtgcgatctctgctcaccgcaacctccgcctcccgggttcaagcaattctcctgcctcagcttcccgagtagctgggattacaggcgcacggcactatgcccggctaatttttgtatttttagtagagatggggtttcactgtgttggccaggctggtctggaactcctgaccttgtgatccgcccccccttggcctcccaaaatgctgggattacagatgtgaaccaccgcgcccggcctgcttgcaatatcttgaacagccacaagatggcagaacttatatagttactggttcagcattgatcgtcccatgaatgtgaagtttactttttgtcctttacctgttcagttgggcactgccctggtgttatggactgaatgtgaaaactgatgagaagatcaatactggaccaggaactcccccattaccagtgcatagaggggagtctgcccaggctgggggtctgagtggagtggccattgatggatccttggggagatgtgagggcagatagaaccctggctagaagtcaggtgttcgggatgctagaactggccttgccctgcctcaagttcagctaccattcatttcttgaggactatctctatgccgtattttgtccaaccaccacagtgaaagcacccatcaccagggtttgtgtcttaggcagttggttgttttatagaggtctcaggcaatgcaaagcccaagacaaaactgtgtggtcatggcgacctggcaatctttattaaaatggaagctctgatggctgaatttgtaaaccaggtcgttgtgatgcaggaaagtattctggcaagggtggatgagtttggtaatgttagacaccacttctgggcaggagtctaagggttccggaagagaagaggtggagcagcatactaacggatgaaatgactggtggcgaatgagtttacttcttgtcctttactcataacctgttcacttgggcactgccctggtgttatagactgaatgtatgtgtccccctcaaattcatgtgtttaaatcttagcccccagtgtgatgttattagaaggtggggccttttggaaaaaattaggtcatgaggatggagccctcatgaatgagattagtgcccttataaaagggaccccagcaagctctcttgctctctttctgccgtgtgaggacacagcgagaggacagcagtctgcagccccgaagagagccctcaccagcacctgaccacgctgcaccctaatttcagacatccagcctccagaactgtgagtactatgctgaagagagccctcatcagcacctgaccaacctgaccatgctgcaccctcatcttagacgttcagcctccagaactgtgaatactatgctgaagagagccctcaccagcacctgaccatgctgcaccctcatctcagatgtccagcctccagaactgtgagtactacatttctgttgcttataagtgatccattctgtggtattttgtgagagcagcctgaatgactaccttgtgactgaaggtatacttcataatagtgttcggggtcactgggaaatgtgttcagaagatttcagatgtgcatcagcaatggtcttcttccatttgtcctggaaagagatgaaaatcacatcacaaaaatgctcatcagtgtctactggcccttttccttacatatgcctgaaactccaacctctatgggtgccttttagtgcttgtttgggctgtgacatagagagaaattgaacaaaataaatgtacagtataattacaactactgtaaagcaaagcaatttgcaaacatcaaaaggaaatcctgtgtccaaactgcctacgtcctatggaccacactgtggggctctgacagtattctgtgtgactgccagaagataacttgaccctctttagctaaaggtaacaccaaccagagtctctatgatctctcacacacaatgctcagcatttaataagaaatcagtaggcatgatgacccattcaccaaaagccaaagaaaaaccaaagcagacaacagaaataatcccataggagaaacagatattgagtattcagacagaaatattaaaatagccatgattaatatgttttagaaaatagagagaaagatggagcatctcatcaaagagttccatctataaaaagagtgaaatgggaattctgtaatttttattttatttttaatttatttatatatatatacatatattttttattatagtttaagttttagggtacatgtgcacaacgtgcaggttagttacatacgtatacatgtgccatgttcgtgtgctgcacccattaactcgtcatttaacattaggtatatctcctaatgctatccctcccccctccccccaccccacaacaggccccggtgtgtgatgttccccttcctgtgtccatgtgttctcactgttcaattcccacctatgagtgagaacatgcggtgtttggttttttgtccttgtgatagtttgctgagaatgatggtttccagcttcatccgtgttcctacaaaggacatgaactcatccttttttatggctgcatagtattccctggtgtatatgtgccacattttcttaatccagtctatcattgttggacatttgggttggttccaagtctttgctattgtgaatagtgctgcaataaacatacgtgtgcatgtgtctttatagcagcatgatttataatcctttgggtatatacccagtaatgggatggctgggtcaaatggtatttctacttctagatccttgaggaatcaccacactgtcttccacaatggatgaactagtttacagtcccaccaacagtgtaaaagtgttcctatttctccacatcctctccagcacctgttgtttcctgactttttaatgattgccattctaactggtgtgagatggtatctcattgtgcttttgaattgcatttctctgatggccagggatgatgagcattttttcatgtgtctgttggctgcctaaatgtcttcttttgagaagtgtctgttcatatcctttgcccactttttgatggggttgtttgttttttttcttgtaaatttgtttgagttcattgtagattctggatatagcactttgtcagatgagtagattgcaaaaattttctcccattttgtaggttgccttttcactctgatggtagtttcttttgctgtgcagaagctctttcatttaataagatcccatttgtcaattttggcttttgttgccattgcttttggtgttttagacattgaagtccttgcccatgcctatgtcctgaatggtattgcctaggttttcttttagggtttttatggttttaggtctaacgtttaagtctttaatccatcttgaattaatttttgtataaggtgtaaggaagggatccagtttcagctttctacatatggctagccagttttcccagcaccatttattaaatagggaatcctttccccatttcttgtttttgtcaggtttgtcaaagatcagatggttgtagatatgtggcattatttctgagggctctgttctgttccattggtctatatctctgttttggtaccagtaccatgctgttttggttattacagccttgtagtatagtttgaagtcaggtagcatgatgcctccagctttattcttttggcttaggattgacttggcaatgtgggctgttttttggttccatatgaactttaaagtagttttttccaattctgtgaagaaagtcattggtagcttgatggggatggtattgaatctataaattaccttgggcagtatggccattttcacgatattgattcttcctacccatgagcatggaatattcttccatttgtttgtatcctcttttatttcattgagcagtggtttgtagttccccttgaagaggtccttcacatcccttgtaatttggattcctaggtattttattctctttgaagcaattgtgaatgggagttcactcatgatttggctctctgtttgtctgttattggtgtacaagaatgcttgtgattttcgcacattgattttgtatcctgagactttgctgaagttgcctattagcttaaggagattttgggctgagacgatggggttttctcaatatacagtcatgtcatctgcaaacagggacaatttgacatcctcttttcctaattgaataccctttatttccttctcctgcctgattgccctggccagaacttccaacactatgttaaataggagtgctgagagagggcatccctgtcttgtgccagttttcaaagggaatgcttccaggttttgcccattcagtatgatattggctgtgggtttgtcataaacagcttttaatattttgagatacgtcccatcaatacctaatttattgagaggttttagcatgaagcgttgttgaattttgtcaaaggccttttctgcatctattgagataatcatatggttttgtcgttggttctgtttatatgctggattatgtttattgatttgcgtatgttgaaccatccttgcatcccagggatgaagcccacttgatcatggtggataagctttttgatgtgctgctagattctgtttgccagtattttattgaggatttttgcatcgatgttcatcagggatattggtctaaaattctcttttttttgttgtgtctctgccaggctttagtatcaggatgatgctggcctcataaaatgagttagggaggattccctctttttctatcgattggaatagtttcagaaggaatggtaccagctcctccttgtacctctggtagaatttggctgtgaatccatctggtcttggactttttttggttggtaagctattaattattgcctcaatttcagagcctgttattggtctattcagagattcagcttcttcatggtttagtcttgggtgggtgtatgtgtccaggaatttacccatttcttctagattttctagtttattttcataggggtgtttatagtattctctgatggtagtttgtatttctgtgggatcggtggtgatatcccctttatcattttttattgcgtctatttgatttttctctcttttcttctttattagtcttgctagcggtctatcaattttgttgatcttttcaagaaaccagctcctggattcattgattttttgaagggtttttttgtatctctatttccttcagttctgctctgatcttagttatttcttgccttctgctagcttttgaatgtgtttgctcttgcttctctagttcttttaattgtgatgttagggtgtcaattttagatctttcctgctttctcttgtgggcatttattgctataaatttccctctacacactgctttgaatgtgtcccagagattccgatatgttgtgtctttgttctcgttggtttcaaagaacatctttatttctgccttcatttcgttatgtacccagtagtcattcaggagcaggttgttcagtttccatgtagctgagcggttttgaatgagtttcttaattctgagttctagtttgattgcactgtggtctgagagacagtttgttataatttctgttcttttacatttgctgaggagtgctttacttccaactatgtggtcaattttggaataagtgtggtgtggtgctgtgaagaatgtatattctgttgatttggggtggagagttctgtagatgtctattagaaccacttggtgcagagctgagttcaatcctggatatcctcattaactttctgtctcgttgatgtgtctaatgttgacagtggggtgttaaagtctcccattattattgtgtgggaatctaagtctctttgtaggtctctaaggacttgctttatgaatctgggtgctcctgtattgggtgcatatatatttaggatagttagttcttcttgttgaattgatccctttaccattatgtaatggccttctttgtctcttttgatctttgttggtttaaagtctgttttatcagagactaggattgcgacccctgcatttttttgctttccatttgcttggtagatcttcctccatccctttattttgaacctatgtgtgtctctgcacgtgagatgggtttcctgaatacagcacactgatgggtcttgactctttatccaatttgacagtctgtgtcttttaattgggacatttagcccattacatttaaggttaatattgttatgtgtgaatttgatcctgtcattatgatgttagctggttattttgcttgttagttgatgcagtttcttcctagcctcgatggtctttacaaattggcatgtttttgcagtggctggtaccggttgttcctttccatgtttagtgcttccttcaggagctcttttaggtgaggcctggtggtgacaaaatctctcagcatttgcttgtctgtaaagtattttatttctccttcacttatgaagcttagtttggctggatatgaaattctgggttgaaaattcttttctttaagaatgttgaatattggcccccactctcttctggcttgtagagttactgccaagagatcagctgttagtctgatgggcttccctttgtgggtaacctgacctttctctctggctgccattaacattttttccttcatttcaactttagtgaatctgacaattatgtgtcttggagttgctcttctcgaggagtatctttgtggcattctctgtatttcctgaatttgaatgttggcctgctttgctagattggggaagttctcctggataatatcctgcagaatgttttccaacttggttccattctccccgtcactttcaggtacaccaatcagacgtagatttggtcttttcacagagtcccatatttcttggaggctttttttgtttctttttattcttttttctctaaacttctctcgtcatttcatttcattaatttgatcttccatcactgataccctttcttccagttgattgaattggctactgaggcttgtgcattcgtcatgtagttcttgtgccttggttttcagctccatcaggtcctttaaggacttctctcattggttattctagttagccattcatctaatttttttcaaggtttttaacttctttgccatgggttcgaacttcttcctttagctcggagtagtttcatcatctgtagccttcttctctcaactcatcaaagtcattctccatccagctttgttccattgctagtgaggagctgcgttcctttggaggaggagaggtgctctgatttttagagtttccagttttgctgctctggtttttccgcatcttttggttttatctacctttggtctttgatgatggtgacgtacagatggggttttggtgtggatgtcctttctgtttgttagttttccttctaacagtcaggaccctcagctgcaagtctgttggagtttgctggaggtccactccagagcctgtttgcctggatatcagcagtggaggctgcagaacagcagatattggtgagcagcaaatgttgctgcatgatcattcctctggaagttttgtctcagaggattacctggccatgtgaggtgtcagtttgcccctacttgggggtgcctaccagttaggctacttgggggtcagggacccacttgaagagggtccattctcagatctccagctgcgtgctgggagaaccactactctcttcaaagctgtcagacagggacatttaagtctgcagaggattctgctgccttttgtttggctatgtcctccccctagaggtggagtctacagaggcaggcagacctccttgagctgcagtgggctccacctagttggagcttcccggctgctttgtttacctactcaagcctcggcaacggtgggcgcccctcccccagcctcactgctgccttgcagcttgatctcagactgctgtgctagcaatgagcaaggctctgtgggtgtaggaccctccgagccaggcgcaggatataatctcctgttgtgccgtttgctaagaccattggaaaagcgcagtattaggatgggagtgacccggttttccaggtgccatctggtcacccctttctttgactaggaaagggaattccctgatcccttgcgcttcccgggtgaggcgatgcctcgccctgcttcggctcacacttggtgcgctgcacccactgtcctgcacccactttcagacactccccagtgagatgaacgtgatacctcagttggaaatgcagaaatcacccgtcttctgcatcactcacgctgggagctgtagactggagctgttcctatttggccatcttggctccacctctatattaatatttatctttgcatgaattcaatctcttaccttaacattaaaaatatgaattcccttatctatgccatatccattaattattataaacttggggacattatttattttatcagtttcaagcctagctttatactccatgctaagttcaggatgaacttcaagttcaaaacatgccttcttaagtatacacatgaggagcagcagcacaatttcattcgaaggaagtttagtaattacgttacaatcagttatatgaataagtggatcatttacactctctactcttataattaactaagggtatttatgattaattttcccatcatggccacttaccatcacagaacttaaactttaaatttaaaaagattaacatttacaagaaacaactggactgggcgctatggctcacgcctgtaatctcagcactttttgaggccgagatgggcagaacacgaggtcaggagatcgagaccatcctggctaacatggtgaaacccatctctactaaaaatgcaaaaagttagctgggcatggtggcgcatgcttgtaatcccagctactcaggaggctgaggcaggagaatcacttgaacccaggaagtggaggttgcagtgagctgagatcgcgccactgcactccagcctgggagacagagtgaggctccatctcaaacaaaaacaaacaaacaaaacaacaacaacaaaaaactggggctgggcacagtggctcacacctgtaatcccagcactttgggtggctgaggcgggtggatcacttgagtttgggagttcaagaccagcctggccaacatggtgagaccctatctctacaaaaaatacaaaaattagccaggtgtggtggcaggtgcctgtaattacagctactcaggaggctgagggaggagaatcacttgaacccgggagttggaggttgcagtgagctgagatcatgccattgcactccagcctgggcaacaaaagtgaaactccaaaaaaaaaaaaaaagagaaaacaaagggagagagagagaaagaaaggaaaggagaaaggaaggaaggaaagaactggagtgcttcattcatcctaactgaaggagaatgataacttgtgtcaggctttaatgttaaatatgcagcaggaccatttgcctattctttgctgagtatgctaaatatcatcatgataaatactcctacattaattttatttttaggaaccatattccagaaatttagacaataacttttattattaagactttactgcttactattttatttctatgagtatgaacttcatacccagtattttattatggccaatgccttcatttcctatcaaagactttactaccacttaacttagccctacgtatgtcacatttcaatcttcattgtatcatgaactattccactacaaacatgaaaatgagttttaagctagttttaagctaatggtagttggacaagattttacacttgagctgatgctgtaatgggttgaggcttttggaatgttgggataaggcaaacacattttggtgggggagggccatcttcaaggatcagtaggaagactataatatgctggataatgaccttgaaagatatcaagttctaatctatagaacctgtaaatgatatctttttttggaagagtcttagcagaggtgatgatgttaagaatcaacatggggagattatgctggattatcaaggtgagcactaaatgtagaaggagatacgacacacacagggaaggccatgcaaagatggagcagggagagatttgaagatgctgaccttgaagattggagggatgcagccataacccacggaatgctggcagccagcagtggctggaggaggcagggaatggattctcccctagagctctgcagggaacacagccccactgacactgtgatttaagccaaactagtgattttggacttcaggtctccagaacagtgacagaataaatttctgctgttttttttcttctttcattttgtctctctctttctttttttttctctctctctctctctttctctctctctctctccttcttcttcttttttttttttttttttttttaagacagggtcttctttaagttgctgaggctagtctcaaacttctgggctcaaacaatccttccatttccactgttagagtagctgggactacaggctcatgccattgcaactggctctgtcattttaaatcaccacatttgtgttaatttgtgacagaagccctaggattttggtagtagaggtgaggtgtgctgtaataaatactcacaaatgtagaattggctttggaattgaagaatacatagagattggaagatttttgaaatgcatgataggaaaagcatagactgccttaaacacagtattagtagatatatggacattaaaatgcttctcatgagggctcagagggaagtgagaagcatggatgaaaaagcttatattgatttatagaataattagatattctataaatggatattattatatattatatcttattagataattagatattagatataattagatttcacagctccagatttttagagagattttatccaaggatgccttatacccagagcctcacatatacctacactagatgacttagaaaataaaattgatacttttgagctcatgatatttagatgagattttggtcatgagttgatgctataaagaagtgaggcttttgggttgttgggaagggatgagtatatttgcatgtggtctggatgtgagtctttgggaaacagaaggcagactgtggaagcctgagtagtgatccccaaagatgtcaggttctaactcctgaaacttttctatgttatctttttaaaaaaaatgatcgtggaggatgtgattatattgaggattttgagattgggagattaatctggattatcaaggtgagccctgaatgaaatcatttgcatccccttataagagggaggcagaggaagacttgacatacatgtgggtgaaggccatatggagacagagcagagagacatttgaagatgttgactttgaagaaagagtgatgtggccacaaagcaaggaatgccagcagccaccaggagccataagtggaaggaaatgaatttgccttggagattccagagagagcgtggccctgcttttacctgcttttggttagtaattctgatttcagattctggccgccagaactatgagataataaatttctattgtttttagccaccaggtttctggtaattcattacaatagcctaaggaaactaaaataggtaggataacaatcactgctgttaatatctcataattcttcacttatctattcatttatttattcaaaatgaaatattttcaatgtcacagttcagttgctcaaggcagaaaaataaatttttacgctaaaaccttataaactatgcactgaaggaataaatggtgggcttgggccacccagcaaagaagaaaatgaacaaacaatggggtctttaaggatgaagagaagtttaacagttggcaaatactagtaaaaggaaatagcactggcaaatccatgaagatcatatgcgaaagagtagaaatgggacaagttcatactggaataatcactacttgtagttttttcatggttatttacccaaggtcatagccaagggcaccaattcagaaactaaaccaaaatatttatgagggagattccatggaagtcagctctccaaggggtcccatttcctactgctcccgaatccatctaaacttttactcccaacaccctcctcctttgccccacctcatgacaggtgattcattacagaacacagagggtcagcgttcttttcttcaggcctgaaatactgggctactatctaagccaaagggtagggacatgtaaccacttaacactacattccccccaaccttcaccagttctctggttacattccaccacccatctctgcctccccagtccccaaccagggacttttgaaccttgactctttcccgccttgagtcagcacctgtatttcacgcatagtatgaagaacagtagtgagaagagcttagaagtcagacagtttggttttaaattctagttgtgagttttgctttccctccctgagaccccaatttcttctttagagttgggtgtgtaatgtggtaatagccaacatttagtgagaacttactgtattctgtccaccaggcaaaaactttacatggtttctttcacaacaaccctacaaaagggattcttaaaaaatgtgcctacagtgggtgagaaaacctaaggcataaagagggtagctaactgtctaggatcccccagttggtaagagctgtggctgggattgtaacccagacagtcaggctccagagactttgctgttaatcattcatgtaaaggaggtaatgattaggttgagcctccagtccagatggcagcccctaaactttcgagggggcatttcgtgtttgctgtgttttattccgtgtttccaaacaacaggagatgtgtcagattatgaactgcacatattggcatacatggaagtctcactatccagggcagctcttgtgagaaagtgaatggcaaactgtgggactaggagtagcacagtcattgaagataatgaacattatggagaatgtttaatgatatgaataaagtgtataagaaagtataaaggagaatataaaactatgtaaaagtataactcttagaaaagtgtacttgtgattgtcaagatttattaaaacatatttttcccattcatttgctacttagacatctccagcaaagactcctggaaggtggtatctcagctgctatgtcctttgcttcccatggcatgaagcagaggactgtgccagttgatgatgcccaataaatacccactgattggatcaatgagtgagagtgggaatgagtcagactttggagtggttacatcatcattttgaagagactcagttcagttttgggtgccacattgtaaaaagcaaatccatgttttgttgctggatgtttcctggttcagggtttaggccaagaaaggcagaggaggagcagtctattcccatggtggcagcttgaagcagttactcctgtgggtagatcagtccaggcacttctttcctgggctttgataaagttgagtttaatgttgatgcaattttacatatcttatttacctttactcttctactaaaactgaatagcccatatagatcacttttgttaaaaaaaaaaacaggctttcataaaatataatttgcacaccagaaaatctaacacttaaaattcagtgatcttagtgttatgttactttttaaaaattagcatagcatacggaacctacaattggacactctaacccattttaattgtacagttcaatggcattaattacattcacaatttccctccttttattttagctcatttgaattttgagaacttagtttagagaggtacatagaaaatataaacccaaggagagagggatcaattctagttgggttctaactatagaaatatctaaaaatatttgatgaatttttgtagaatctcttttctttttctttctttcttttcttttactttaagttctgggatacatgtgttgaatgtgcaagtttgctacataggtacacatgtgccatagtggtttgctgcacctatcaaccagtcgtctaggttccaagcccagcatgcattaggtatttgtcctaatgctctccctccccttttcccccacaccatgacagtccctgatgtgtgatgttcccttccctgtgtccatgtgttctcattgttcaactcccacttataagtgagaacatgcagtgtttggttttctgttcctgtgttagtttgctgaggatgatggtttccagtttcatccatgtccctgcaaaggacatgaactcatcatcttttatggctgcatagtattccatggtgtatatgtgccacattttctttatccagtctatcattgatgggcatttgggttggttccaagtctttgctattgtgaatagtgctgcaataaacatatgtgtgcttgtgtcttaatagtagaatgatttataatcctttggatatatacccagtaatgggattgctgggtccaatggtatttctggttctagatcattgaggaatcaccacactgtttttcacaatggttgaactaatttacactcccaccaacagtgtaagagcattcctatttctccacatcctctctagcatctgttgtttcctgactttttagtgatcgccattctaattgccttgagatggtatctcattgtggttttgatttgcatttctctaatgaccagtgagagtgagcttttttccctatgtttgttggctgcataaatgtcttcttttgagaagtgtctgttcatatccttcgccaactttttgatggggttgtttttttcttgtgaatttaagttcctcatagattctggatattagacctttgtcagatggatagattgcaaaaattttctcccattctgtaggttgcctgttcattctgacgatagtttcttttgctgagcagaagctctttagtttaattagatcccatttatcaattttggcttttgttgaaattgctttttgtgttttagtcatgaagtctttgcccatgcctatgtctggaatgatattgcctgtgttttcttctagagtttttatagttttaggttttatatttaagtctttaatccatcttgagttaatttttgtatacagtgtaaggaaggggtccagtttcagttttctgcatatgtctagccagttttcctaacaccatttattaaatagggaatcctcgctccattgcttgtttttgtcaagtttgtcgaaaatcagatggttgtagatgtgtggtgttatttttgaggtctctgttctgttccattggtctatatctctgttttggtaccagtaccatggtgttttggttactgtacccttgtagtatagcttgcagtaagatagggtgatgtctccagctttgttctttttgcttaggattgtcttggctatactgggccttttttgttccacatgaaatttaaagtagctttttctaattctgtgaagaaagtcaatggtagcttgatgggaagaacattgaatttatcaattactttgggcagtatggccatttttactatattgattcttcttatccatgagcatggaattttgagcagggaatttttttccatttgtttgtgtcctcttttattttgtggagcagtggtttgtagttctccttgaagaggtccttcatgtccctcgtaaattatattcctaggtattttattttctttgtagcaataatgaatgggagttcatttatgttttgtctctgcttgtttattattggtgtatgggaatacttgtgatttttgcacattgattttgtatcctgagactttgctgaagttgtttatcagcttaaggagtttttgggctgggacgatggggttttctaaatgtacaaggatgtcatctgcaaacagagacaatttgacttcctctcttcctaattgaatacgctttatttctttctcttgcctgattgccctggccagaatttccaatactatgtggaataggagtggtgagagagggcatctttgtcttgtgccagttttctttttttaaaaaatatttcattaattaatttaattttatttaattattattttgttattattattattattattattattattatactttaagttttagggtacatgtgcacaatgtgccggttacatatgtatacatgtgccatgctggtgtgctgtacccattaactcgtcatttagcattagctatatcttctaatgctatccctcccccctcccccaaccccacaacagtccccagagtgtgatgttccccttcctgtgtccatgtgttctcattgttcaattcacatctatgagtgagaacatgcagtgtttggttttttgtccttgagatagtttactgagaatgatgatttccaatttcatccatgtccctacaaaggacatgaactcatcattttttatggctgcatagtattccatgatgtatatgtgccacattttcttaatccagtctatcattgttggacatttgggttggttccaagtctttgctattgtgaatagtgctgcaataaacatacttgtgcatgtgtctttatagcagcatgatttatagtcctttgtgtatatacccagtaatgggatggctgggtcaaatggtatttctagttctagatccctgaggaatcaccacactgacttccacaatggttgaactagtttacagacccaccaacagtgtaaaagtgttcctatttctccacatcttctccaacacctgttgtttcctgactttttaatgattgccattctaactggtgtgagatggtatctcattgtggttttgatttgcatttctctgatggccagtgatgatgagcattttttcatgtgtctgttggctgcataaatgtcttcttttgagaagtgtctgttcatatccttcgcccactttttgatggggttgtttgtttttttcttttaaatttgtttgggttcattgtagattctggatattagccctttgtcagatgagtagcttgcgaaaattttctaccattttgtaggttgcctgttcactctgatggtagtcttgtgccagttttcaaagggaatgcttccagcttttgcccattcagtatgatattggctatgggtttgtcataaatagctcatattaaattgagatatgttccatcaatgcctagtttattgagatgttttagcatgaaggggtgttgaattttatcaaaggccttttctgcatctattgagataatcatatagtttttgtcattggttctgtttatgtgatggattacatttattgatttgcatatgttgaacccacctttcatcccaggaatgaagccaacttgattgtggtggataagctttttgatgtactgctggattcagtttgtcagtattttattgaggatttttacataaatgttcatcaggaataattgttctgaaatttttttgttattgttgtatctctgccaggttttggaatcaggatgatgctggcctcataaaatgagttaagggtgagtccctgtttttctgttgtttggaatgctttcataaggagtggtagcagctctgctttgtacctctggtagaatttggctgtgaatccatctggtcctgggctatttttaatctggctagtggtctatttagttaatcttttcaaaaaccagctcctggattcattgattttttgaagggttttttaatgtctctatccccttcaggtctgctctgatcttagttatttgttgtcttctgctagcttttgaatttgtttgctcttgcttctgtagctcttttaattgtgatgttaaggtgtcgattttagatctttcttgctttatttagtgggcatttagtgctatacacttccctctagacattgctttagctgtgtcccagagattctggtacattgtctctttgttcttattggttttaaagaacttagttacttctgccttaattttgttatttacccagtagtcattcaggagcaggttgttcactttccatatagttgtgtggttttgagtgagtttcttaatcctgagttctaatttgattgtactctggtctgagaggctgttttttattatttccactcttctgcatttgctgaggtgtgttttatttccaattatgtggtcagttttaaaataagtgttatgtggtgctgagcagaatgtatattctgttgatttggggtggagagttctgtagatatctattaggtccacttggtacagagctgagttcaagtcttgaatatccttgttaattttctgtctcattgatatgtctaatattgacagtggggtgttaaaatctctcactattattgtgcgggagtctaagtctctttgtgggtctctaagaacttgttttatgaatctcggtgctcctgtattgggtgcatgtatatttaggatagttagctcttttcgttgcattgatccctttgccattatgtaatgtccttctttgtctttttttttttgtaatctttgttggcttaaagcctgttttatcagagactaggattgcaaccctgctttttttttctttttgctttccatttgcttggtaaatattcctccatccctttattttgagcctttatatgtctttgaacgtaagatgggtctatttaatacagcacactgatgggtcttgactcgttatccaatttgccagtctgtgtcttttaattggggcatttagcccattttcatttaaggttaatattattacatgtgaatttgatcctgtcatcatgatactagctggttattttgcactttaattgatgcgttatcttcatagtgtcattggtctttatattttggtgtgtttttgcagtggctggtacttgtttttttccttccataattttgcttccttcaggagctcttgtaagccaggcctggtggtgacaaaatccctcagcatttgcttgtctggaaaggattttatttctccttcaattatgaagcttagtttggctggatataaaattctgggttgaaaattctcttctttaagaatgttgagtattggtccccactctcttctggcttgtaggatttctgtagagagatccattgttagtctgatgggcttccctttgtaggtaacctggcttttatctctggctgcccttaacattttttccttcgtttcaaccttggaaatctgattattatgtgttttggggtggctcttcactaggagtatctttgtggtgttctccgtatttcctgaatttgaatgttggcctgtcttgctaggttggggaagttctcctggataatatcctgaagtgtgtgtttcagcttggctctatgctccccatcagtttcagagaccctaatcaacctagatttggtcttttcacatagtctcatatttcttggaggctttgttccttttccatattttttctctaatcttgtcttcatgctttatttcattaagttgatctccaatctctgatttcttttgcttgattcatttggctactgatacttgaatatgcttcacaaagtgcttgtggtgtgtttttcagctccatcggtcatttatgttcttctcttaactggttattctacttagcagttcctgtaaccctttttcaaggttcttggcttccttgcattgggttagaacatgctctgttagttcagaggagtttgttattacccaccttctgaaggctccttctgtcaatctatcagttttgtgttcttgctggagaggagttgtgatcatttggaggagaagaggcattctggttctatgaattttcggcatttttgcactggtttttcctcatcttcatggatttatctgcctttgatctttgagtctgatgatctttggatggggtttctctgtgaaggttgtttttgttgatgttgatgttattgctttctgtttgttcatttttcttctaacagtcaggccccttttctgtaggtctgctgcagtttgttggcagtccactctggaccctatttgcctgagtatcatcagtggagggtgcagaacagcaaagattgctgcctgctccttcctctggaagcttcatcccagaggatgaagctggcatccgccagatgccagtcggagctctcctgtatgaggtgtcagtcaacccctgttgggaggtctctggcagtcaggaggcatggggatcagggacccacttgaggaggcagtcccttagcagagctcaagcactgtgttggtagaaccctgcttgtcaggatccactgctgtcttcagagctggcaggcaggaacgtttaagtctgctgaagctatgcccacagtgagatgggaattttatctataagctcctggctggagttgctgcctttctttcagagatgtcctgcccagtgaagaggactctacagaggcagactggccacagccgctttgtctcactgtgttgagttttgcccagtccgaactctcaggccattttagcactgtcaggggaaaactgcctactcaagcctcagtaatggcagacgcccctcccccaaccaagctcaatcgtcccaggttgacttcagactgctgcgctatcagtgaaaatttcaagccagtggttcttagcttgctgggccttgtgggaatggaacccactgagcgagaccactttgttccctggcttcagccccctttccaggggagtgaacaattctgtctcattggggttccaggtaccactagggtatgaagaaaaacctcctgcagctagcatagtgtctgcctgaacagctacacagttttgtgcttgaaacccagaggcctggtggtgtaggcacatgagggaatctcctggtctgcagattgcaaaaccgtgggaaaaatgtagtatttgggctggatagcgcagtccctcatggcttcccttggttgggaaagggaggcccccagtccttgcatttccccggtgaggctgtgccccaccctgcttctgctcaccctctgtggcctgcactgactgcctaaccagtcccaaactgatgaacaggttacctcaattggaaatgcagaaatcacccaccttctgcgttggtctttctgggagctgcagactggagctgctcctatttggccatcttggcagcagatcctacagcgttttacaaccatcatcactacctatttccaaaaggttttcatcactctaaagaaactctgtaatcatttaatgataactctgccttctccaagtccttgttattctctactactttgtctaatctatgaatttgccacttatgagtagaatcatatgatatttttccttttatgtctgtcaaattttacttagcatactgttatcactgtcattcctgctgtagtgtgtatcagaacttcattctttttatgactgaataatactccattatctgtataccacattttgtgaacccattcatctgttgatggacacttgggctcttcaacctgatgactactgtgaatagtgttgctgtgaactttggtttacaaggatctgttcaaatccttgctttcaaatccattgggtatacatccaaaagtggaattactgggtcccatggaaattgtgattttatttttctgaggaaccacaaattggttttgcaaataggctatgccaatttacattcaccagcaattcataagagtttcaatttctccatattctgtccaacatttcatattttccattaaaaaataattatagcctttctaaaggatatgaagtggtatctcactgtggttttgatttgcatttccccaatgactaatgaagttgagcatctttccaggtgcgcttatggatcacttgcatatcttctttgcagtagtttctgttgaagtcctttgaatttttgaatgggattgtagtattttgttgttttgtgttggagtcctttacatgttctcatttgatttgtgaatatattctgccattctgtgggctatctttcaacccttctatccattttttttttactttgtatatcgtgtatgtaaaagttcaacatcattcttttacatagagatattcagattccccctccttgtgcatcttccctatctcattgatcactctgaggtctccacctctccaattgcaatgagactttcacttacttgattcgcttcctcttcctcttttcaaccaggtattaggggtagtaatgggagtgagtgcccactgtcctgtggtctttgagcatggccaacatgagcccttgtaaatcccctgatgccaggggactggctggccatcctgtccatgatgttcccaggtcactctcctctccgagtttttccatctccctccactcctggctgaccaccgactgtccagccctcccctttcctgcccattctcagagcaggactgaattaatccaatgaccggggaactcaggggacttggagggaggtcctagttgcaggcaaaaactagaagagaagccctttcagagtaacagaatgagctttcagacctcaggcagaggaaattctctctatggcatccaaggtcctgggctaggagtgggcaattggtgggaggaacatttgggttcagatttaggaagagaagcaaggtctgcattaagagaggctgggacaatcagtgacactatcccaggggtagtacatggggcccgggtgctggaacagggcccagggtcagcagtaccagcacccaggcagtcaccaagtgtggacagggttgaggatgcccctgccccatcagggtggccagccagagaggcagaggacaaccaagaagttggttcccaagaagtgctgttgggaaggagctgcttggggtctaacagcctcttccaccagccagacccatttgcctacctgggctcctcccacccctgactggacagctgcccactccatgagcttcctgagaagcctgcaggttccatatatgaaggaagttgacaggtacctggtgacgttgctaggctggggtctctttctgcacctcactgggactgtggagagctgagtttacaaggtcctcatgacagaccaggcctttgaggctttcctgctcagctcagtgcagcctcactatagctgggatgtgggatgttcccaaccaaactcctgaagccttgatccccaacacagtagtgttgggaggtgggtcctagtgggagatatttagatcgtggagacagatcctttatgaagagattagtgaccccttccacctcacaggcttgagttttagctgtatctggaatggacaggtttccaagacatcgggatcaaaacagagtcttgcttccttagtctctctcctgcttcctctgtcaccatgcaatctcagcatatgccactccctttttgctttctgccatgagtggaagctgcatgaggccttcatcggattgagctgccaaaacttaaacttttcagccaccagatcatgagacaaataaacctcttttctagatcaattacccagccttgggtattcggttacagtaacacaaaacacagcaagacaggctcttagctcagccttgctgtgattcatcttgaatctaaatcttgaatggaatggaggcctggagtcttttccctacaggtgtgagcttctccctctgatctcctagataaatatcgtttgtctaaactcagctaccatgggagccccaggagctggagagggtgtgggcaccaggggagacatggtatgaggctgtgtgcagggggatggatcaaatcaggccctgctagggttctggcaccaatgggcacacctcatctccgttttccctcttcagtagggatttatctccctgccttagtgtctcctcttctaaccctatcaccttccatgtgaagctagacaaagcatgcaagcttgtgaaccttattctagagaggagggaagatagagggattgtctggctgacaatcatgtacataggtaggtagcatacaggagagatttagatggacacatcagatgacaatcaggtaggggctgtgccaggatgaacaatggggtctccatgttgtccacatcctaattcatgaaacctgtgattgtgggactgcatatgtcacaatggacttttgagtaagtaacggatcttgaggtggtgacattatctttgattatcttaataagcttgatgtaactaaccacaagggtccttataagagggaaagagatgtgaagacagtcacagagagagagatttgaagatgccattggctttaaagaggaaggaggggacagtaccaggaatgcaaaaaaaggcagctctggagctgaaaagccaagggctctccctgaaatcttctaggggtgggggtttggccctgtccagaacttgttttcatccagtgaaacccatatctgactttgacctccagaactgtaagagaataaaaagctgttatttaaaatcactgagattgtgatagtttattacagcagcaataggaaactaatataggaacagacaagcaggcaggaagaaggagacaggtgtatgggcagacagtctggagggcaggcaggagtttgggaggtgggtggagattcagggatgttggggttatcggacccaacaccaggttgtgggggtgacaaagtccggcagagtcaaaggaatgagaaaagacagtttgagagagaaagtgggtccagggcgccaaagctaagtatggaggctgtgaaggccccgagctctggaagtgcagattatttattggtgatcaaacaaagaaacaggtggtgagaatggggggtgggtcgaaagggcatgttgcattaagcacatgatttacagctgtgacggtttagcatctgctctgttacttgagataatggagagcaggttcttttaactcaagatacaattgatcctgggagagcaaggagcgaggagccagcaagtccagacacattccagagccacgagccctggattctatccaagccacgaggggttttatgccccgggcttagattatggtgcgtcagggtagccttccacccttcagcacagagcttggtgttccaaaggccacaaggggttttagaccctggatcctggacatgattcaagactcttttacattatgtcagacatgcaagctcggcctcagcttctcccaacactcagcttttctcccaacaagatatacaggtgggtaggagacaggtagacaagcaggtagggagcttggagaaaggtgagagagagaagggcaggcagactgggggacagcaggcaggtgggaagaagggaaggtgggcagacagaaagcaggacagaggcagacaggcaggagataggagtgggggtcaggaagacaggatggcaggtggaggccctcaaagctggtccttgtcttcacaagggttagggagcctcctgagacgcaggtggattccatttttggatttcaacacaagtcgtgccatggggatggggatcctggtgggatcaggcagcagctcaaagcggagcagggtcagggccctggccaccttcagctggttcatggcaaattgtttcccgatgcagttcctgggccaggcggagacaatgaattgagacgtgtcctcaggccccattctgatctgagcaggttttggcccctgaccccagccctgagctggacattcagtgcccaacctcatgtgtccagcccctgcacacttacagcccacggacacttctaccccatcctggcttcacactgtcccaaaccttggacagagccgtcttcctgggctaactcctaactcctaccttctacctctgctctcagcagcctgaaaccctctatcaagacagggccagggctctaaggcacagagtctaatcacatgaataaataaagagttaatcaatggtttgttcactcctccacaaacatttcttgttctccagtgcggaggtcagttcaggtcctgtagggtgagggtgggccacactctcaggtgcttcccacgtagtgggacacacagggacctgaatcctcatagggggtccccgatgggtgtattaagggagtcagaagggcagtgggaggcttcctggaggagaactgggtgggtgatcctcagtgttgccccacctgcctcccaccccagggtccgggctcctgtctaacctcactcctccatccaccagcccctgtagccttctaactctactccagaaacgtccatccttgtccttcctcagtcttgtcacttggactttctggatttctgcttcccctccctgcacactgaagccacagcccagctcagaccctcccacgctcttcatcacaggtgggacagcatcccaatgcctcagccggcagacaagccctccgtgggctcttgcctcacccacattttacctgtccagcccacatcctagccctgttcatgtggagatggctgagaatgtcctccctccacctctgcctgccacatcctcaaggctaaagtcacagcccagctgcctctcactccctgccagctgggcctcttcctcccaggcccccaggtagcattcgtgatttgtccatgaacactcacagtccagtgccacggacagcaccagggacagggacactcaacaagccactcagtgagtgaatgagtgaaagaatggttgatggaacgatgtgtgtctggagcacaggatatatttctgtacaacacatttttgtaccttttatctctgttttctcatcatgctgcataggacttgacccagagaggtagcttaagaaatactttaatatttgaatgatgttatttaagttttaaaatgaataaaatagaatgaaatacactgagagtaaaatattagttctgagctagaaatggagcttaggaatgctctccggttctctagtggcagcgacatgatttgcaggcaatgtttacaaggacttcctcatgctgggatagacagaccagtgctggagaaggagtttcaggaggaagctttcctgttccatgtaagtggactcaccatttgaagaagtcacataattatttctttgaacaaactttgtttctactaagaatttttatcatttttgcctgtgtgtatgtcacaggacgattcctgatgccacgatgatttccaccgcagccattctggagttttcctctccagctcaatagctatttcaagtgtgttttatatttcacataccaggaggcttcaaatgttgtgcgttatatgataattattgggcttttctctccaagacagtgtactgttcacatttttatgtttttggccaatattgtgctaagtggattacaggactatggtataaagatctcaaggcatgtacagaatttgccaaatggggaaatagatgtaaatatgtgaacactatataatgaagtaaaaatgtcattgggcaagacagaaaaatgtatgatatgacacacactgttgtaaaactttcttcaaagggctaccttaacctctcccttatatggcttgaaaggtaggacttgcaggtcatctgtattataaacagatgcaaagatttcaatgattcatctctacgacagactagtgaattaaatagggaaggtagtgtgctgcattgaggatgtgtggggagagagaaatctacagtttactattcctgacaactgagaaaagcaaacagctgaagttgaatttactggagaatatctaattttgagaattcatatccttaaagtgaggaaaatacatgaatatactgaagtttggaacatgcactgacagtgaattcaggctgcccatttgaagaagcagagggagcaaagtctccatggggtgctctgaatgccaccttccttttgtacacagagacgcccacaccaggtgcctgactttcccacaaataccaatatttaagagcacacctgaagatgccacatatgaacatcgggctcacaaagatcagagggttgaccagagacttccctcatttctctattccaattaccacacaggacgtctcaccttgatcctcctgagaagggcaggaaagcgtggctgtgttgagcagaacccggtgcaaaacgggaagggtcaaacacctgcagagagagcaccagagccaggatagttaaggatccagcacctacttgccacccatgagggtacagtactcccagaggtggaagcaggagaaggtattggtcttgagagatcaccccatttcctcctctcaaggaccacatacctctaggttgggccacacttttgggttgtggtgaaggccataaatggagaggaggaccatgatacctgtggtgcaggttggaaagagagagaagaccgatcatttgcatggggtggcctggtacttcagcctgcaggggcaaaagaaggcccaaaacacctactttctataaattgtcactttgactaggatgattctgccattatgcaggtgggttaggcttgacaaagcatgtgagttcagatgatgaatagacaaccatttatgcaggaatgagaagcaaaaaagaatcagagcattactctttagagtaagtccagtgacatttcacattcatcaaatattctccaagggtcattggagaatatacatgaactcactcaatacaacaatgctccaaggaagacattcttttgctctcagttttcaggggagatacctgagtatcagagagaccaattgtcttgtctgtgttcacacaactaggttatagcaggactgggaccagaactgggggagttgaggcttggtggccccagatctggtcattggctgctctctgccatcaacctgagggttcctcagagactggacaacagctgacccaggaaatgagattcctgataagcctcttttgcactgaccccatgaggaaagaaacacatccctctctgcccttgtctgattctctttccagccctgcacatctcaaggaataggattttacagttactgacccaaggccacattcagagattaacatttatttcttgaactttcggtgggttcaagctctcggccagacttttcaaattcatcctaaatacaaagtatgtttttgatgtttttagaacaaaagggagacccagagatgtgcagaactctgaagcacacatggatttctcaccctccacacgtccccgtggagactttgggtgagagggtggggaaacttcatacctttgggcaaggagcgcccatcagggaaggtgacgggagtgctgagctctcttccaatgcctggcaccggtgggtagagcctcagtgcctccttaatgcacatggtggtgtagggcatctggtccaggtggttcctgaaacaattccatcctgaacaccagcaaggcctgggcagaccaggggcccctgtggagaaggcagggaaccccatcttttgagccctcactcaccaggtgatggaggctccatcacccaggaggccatggatctcctcccggcacctctcctgatgcttggggtgtgtggccagagcatagaggatccaggagatcccactggctgtggtgtcgtggccctcaaacatgaacgtgtccacctcagcacggaggtccttgtctgacaagatgctcccattctccatctgggaagaccgtggtgaaagtgcagggcttgtctcttgctatgtacttctgggcaaagactcaggcctctcctacacatactcactttggccaagaggaggatgtccagaaaatccaagtgcctcttcctcttgatcttctccagctccccctccttctgtagttgagccttcctcagttggatcacttggtctgtaccagaacaatggttaccaggcagagctgagaccgtcagcagcccccaggaggcctagctgcccaactgccccagtgtgggtgcctggtagatctcagcatgaatgtgagtgtgggtgcagggtcaggggtggaagctctagtactgtgtgaggcagggcacccctcccaccagtggcacagttcatggaggctcctcttgaatgctgtttggacagggtctcattcagttatctccatgtggggacattgataaaccaaggcacagaatccggcccctcacatcttggctcccagcccctgagcaagggaattccccaggctgagtgtgttctggcttctgcaggattactagggaccttctctgcctgaggagtcagggcaggtactttcactgtgcctgggaaaggctgggagacaagaggaagagacagaacctgtgtgctgatgggccagctggcaggcgcggtgtgtccagcggccagcagaggtcaggctgtagatggtgtcattctcatgaaaggcattcctcatacagcaaaaaaccaggctgttcaggtcactaatggcctggatgtaggactgagaattcctgagggagagtatgaagaagagaccgcagtaggggtgggcccattacccggaagtagaatggggtctgagaggaggcagcctcggataatggggacaagcagccttgaggcaatgtttcttctatcttacagccctattatcctttggcctttatcagatggtatgaacatccagggtccacctgtgctaggaattaggcatctgttcctgagactttgtttggtctggacaggaattagagtttggtcagggactgactcttcctttgtgtggcggtgagccttcacgctgccccacctgcccctcaggtatgtgcactccacttgataagaacaagggccctgcagctggagggttgtcactgacctgtccacctggatgctgccctgatggctgaaggcactcttcatgatggtgtccagggtcatcaaggagacgtgctgaaagacctccagaggggaatcctggccaaggagctcttcccatttgtcctgtggtgggagggggcatggaccttcttaatctccaagaagtgctttgctaataaggcctggctttttcatgtacctgcagatatcttgttttttcctgtagcttgcagatatcttggttgggattcttcactttacagagcagatgcattgtagaaactgggactgtaaagccagtgttggtaaactgacacctaattctcacacacttttaatacaacattcaacagatcctctcacaatagcatggattaagtattgaattttgagattcagttaggacatatgcttgtgaaaattttgttgttattgttgttctgggataaataatgggggactcttcagtgttctgagagctgagctagttctgagggactagtaggacaccaactttagggcagaaagtttcagtgccaaagatagcttaaggggctagtatgggcactgtgttgtagagaaaacagggacttcaattcttttccattcatcaaaatgtgctgggcacagttgggtgagaaatcagagtcctgactggagatgatgctatctatggaaggtattgctctgagaacatagacctggtgttcatttccttcccagggtggcttaaatccatgcagaaacctggggccccaggccagagcctgggtgggtgacatcttggcctgtccatgctgccactgaagctgccattgcccaggccagccagcataggaagtcctactgtccaacaagattgcatatgcctccagtcccttgtgctgaggttccaaagtgggaggagaagggccttgtgttcaccatgaatctctattcctatggtggggaacaaagtgtggatatgacctgatgcctgggtgttctcctaccttatacaactctggggaaccctctactctcacagcaatgacctgagagtgttgttccatgtgtctatgtctatggctgcctgtgggacacagggttgagagtggagttggtgagagtgtgtgctgtgagtgggtgtggggagaggagagagacatggactcaccagcatcactcgtacagagtctgccatgagccccacgtatggcttcaggatgtcattgtggaaggctggggtcagcatccgtcgatgctggaaccatgtctgcccattcaacaggagcaagccgtaccctaaggtagacacgaatatgtgtatgtgtgtgtatcagaggctgcacggacctagggatgactggtgacaatttgggagggagaaaggtggcttcctgggggaagaactatccagaagaagccacatcatgggcaaatgcaggaaaaggaggtatatttcaggcatgtgaattttctaattgagctgctacatccatgtgattatgacagctgtgagataaaggttgaaaagggttgtgggcagatgtaaaataaatgtgaagccaaggatgtctggagagaactgagacatgaaatggaagaagctgagcctcaggaaggtttgcaccagcattaggaaggggtgagggtcttgttagaagagggaaatgaggcttgatttggggatgaggtcatgatagtggtggcctctaatctgttgttctctgtgagccaaataaataactcaaacctaactagggagtgggctgcagtcctagtttgcacacataccaatccgtggagccaggaatttgtaggatccatgggatttcgggtctgaaaagtaagaaagggctttataggaaactaggagttactaagaaggcagtctcagaggcagcatcagttcttggtgtctgtcagttggcagtttgacccatgtcacctcccacttgactcccatccacttctatttctgtcctgaaggtcaatgtgggctcaggaagacagactcagtgttccagcaggaaaacacccagagggctaggaaggtgaattggtgagatacataggctaggtcttcaatgacaatgaataatacagagccatgggtttttctacattgatgttttcctagtcacctcctgaccaggacaggcaacaattagagcttcgaaacccaagtcaatgtgggtatgaaatttgttttacagatctggggcaatttacgtttcagaaaacctcaattttcttaatagagaaatagaaaaaagaatagaaaattcagccccacatattgttttaaacattcagtattcagtaaatatttttgactacagcctgggcatggtgggcttggtggatgcgtgggagaggtttcagatattgatgtttgaacagccactctcttctggaattttacagacccaggggcatgtgtcaagagggaagagaaattgcagttgggatgggggttcgatctcacctgatctccccagaatcaccttcatatagtcagggtcatagagctggacacgaactttgcctccccatatccaataaggacaggcacttgggaatgtcttcacccgttcctgaatccgttgtagctcctggtcgtgttggaactgtcaacgagggtagacagatgaacactttcatttacttctagtctttgcagcaggagtgaagggcaggacaactacaggagccatgtagcacgggttagggatttagatctgtttctgatgacctgagctgtgatccagattctttgtatctccccaggacttgaccttaggccaagcgctatgagccctcactcaatgctgccagcagaaatttaagtcagccattgtcttcatgttgtgtaacatctctggaagtcataaatacaacaatttccttgggcaatgtgcataactcgtattacttgatgagcagatttgtaaaatcatttggtatatctagagaataaaatgaattaatgtgaacattttaaattacacaataattttatataatcatacttgttatattttcaatattgtcccagaatatatggtaaatatttgttgagataaaatagcatttgggatgtgtatggctaagcaaaaaaagattaactataaaattgtgtgcataatagtattctacatgttgaatatgtacagatttatgggatggagtctgagtatatgcatatggtgctggtgttggactataattttgagatttgggtttcttattctcattttcacttatcaatgaattatgagctccctgctgcctgcagtcatctttctaaactcttcgatgtggatcacaaagcccttggctttctggcttcaacttctcttttcttgcctccagccctgctggcaattccaccatcacccgtttgtttcagctccaacgccgatgccaccactgctgctgattcacacaccagctacacctgctcactcttctgggccctggcacttgctcttttctctaccttgaatgcccttccatctgccacagagcagccacctctcctcagctttcaagactcagctttgctttaatctcatctggaaccctcaaagacattgggtcctagtgatgttccatgtagccaactcttctttatttcaactgcttctagtaactcaaagcaactgtctaccacataagtatctaatgtctgcccacctccttctgataatcatattgtccagctctgaggcagcttgccctactgtggggtaggctccttcattcagcccatgcttactgcacacatactatgtgcccagtgtggctcaggcactgcgttaggacacagctgtggtccttatctgtgtggaattttcagtctagttggggggtaaggaagattagaggctgtgcagtaggggataatggacatgagatggaatgaaggacaagcatctggggaagctttgaagagggacctaactcagaactgaacattagaaagctcttcctcactcactgagtcatcatttactgagggactattaggttacaaacataaatcagagatggtctctcccagaagaatcccacacttatgacactgcagaacagtaactaagtcaagttaacactgctctggcctcttgaggatagcccatagaaaaaagagtcggcccttcacttctgggagacccaggaggccttcttgaagaaggtagcttggtgctgggccttgaccgatagatatgagtgagaaaataattccaggtagcaagcacattgtgatcagaggcctagaggttgaaatgcagaggcaggtagtgaggtagtgagtaacatatggtaaaagaggagaatgggaaagaaggtggagtggtattgggaccagtccatatagggctagaactttgtcaggtccccacattggttctgctctgctgagaactatgttgcctcctttgctgagaaacaataggcctcagctccctgcaacccctatctctacttaagtgtgttcaattcatagcaccttggtgagtccctctccatgcagccgtttaccttgctctgttcctacccgcccctctccccatgcagggatagcagtgcacaggggatgggctgtgtccctcctcagccctcttgctgctcctttctcttcttcctctgttcctctacacctggtgtgtccaatcttttggctttcctaggccacattggaagaaaaataattatcttgggccgtgcataaaatacacgaacactaatgatagctgatgagctcaaaaaaattgcaaaataatctcataatgttttaagaaagtttacgaatttgtgtcgggccacattcaaagccatcctgagctacatgcagccccatggggcatgggttggacaagcttgctctattcacctgagctgaccatcaagctgtgccaggattttgctgattgccggggcacaggaaggggatgacatgctcacctccagggagctcacagtctgggtgcgtgggaggagagccaggaggtcaatacaccctgttcaatgtgcaactcaaacaccagtctcctcacttggaggacattgtgcaggctgcccccttcatgtgtacccacaattgtcaggttttcaggtcctaaatcacctgttgtggaaattccgtgagccttggggaaacttacttagccagttggtcccctacaccagcagatctctgcctcagatatccaccccagcagagtgagctcttttcctgcagtctgacaccttctcaaattcctgcctgtattcttcacagaccatgaactcctcatggcacagagtcctcagatgggtgtctgtgctcccaggcaaatgcagggccaggcagagacaatggcattgagtgactggacagggagcatctagaagccttgttctttgagaaaagccaaggcttatggggtaatcagtctggagacaatcaggcattgccctccatgtgcaggactgccaagacacacttgatatctgcagaaggagggcatgtgtgatagagctgaggaccagcaggatgggcttcatgggaggagtgagctcctcatgactgggacaagctgaaaccagagaggtaggctgggtgttcctatgaggcctcacgtttgttacaaaacaaggctttgctctatggattttgtgaccagggtctcagagccgcatccctccttgccctcccactcccccactgagttcctccctacctcctggatgtgcccgaagagccagtgggagggagggcacgggaactgctggagggctttgagcagccactgcctatgcaggtagagctgagctgccttgatcagcagcagaagcagaatgagcagggaggtcacttggaggatcccggagacaccacccaggcgtctgctggggctcaggacagagacactcatggtgcagcacctgctggatctctgagtgccccttcctctctctgaccacccctgtccacctgtgcttaagtcatgggaggattgtcccgcccacttgtggggagagtgaagggggagggcagaacttggacctcagagttcagaatcgattgactttggatgatccacctaggggaacagtgggagaacagcttcatcagctgtctaccacattcccctgtccatgtacctcacaaatatttaatgagcatttactgtgtgccaggcagtatgctaggggtgtgggcaccgctgcgaggaaaacagacttgaatgctgacctcaaggaatttgcattctgctttactacattgcaataatgttcattcagtagcactttttttttgttatgtgttcaaagaaaattctcaacatgatatgtatatttaaacttaacattaaccaagccctgaatcattacttttgtcttattgcaatctaattttatttaccataaaaaccacttccatctatatattgagtgaggagtgggaattatgtctttctattaactggatgatgatatggacaaacagatgctaacatggcagctgttcaagtactttattttattccattggggagactggtctcataatatccatagcatgatttttttctcaattcatatacatgacaatttaaaaaaattctacatcatgttagttatgactttttcccccattgataggtctaccttctctaccagagaaagtcctagagcaattttagtcctacttcagtctagtactatagccacagcaggagcctgtttaccaattctctttcatcctacaatagtatgtaattatacaatcagaactttgcagtctgtttaggagccctgactaaggacaatctgtactaaacagaaattaatatttaaaaaatgatttctttgtcaacctcaagtaaagtaggttaaatagtaactattgctatgaattaaccctccctggcatttttacatgcatatctgtgcatgagcattgtttttgttcctctttttataatttcaacttttattttagattcaggtacgtatgcaggttttttacactggtatattgtgtgatgctgaaggtttggatacaaatgattctgccactcaggtagtgagtatggtatatattagtcaaatttccaatggttactcatatctgtacctacccctctagtagtccccagtgtctatcattcccatatttatgtccataagtatccaacatgtagttcccacttataagtgagaacatgtggtatttggttttctgttgctgtgttaatttgcttaggattattgcctcccaattcatccatttgctgcaaagaacatgatttcattattttttttttacagctgcctagtattccactgtgtatatgtatcacattttctttatccagtccaccattgatgggcaccaaggttgatgccatgtctttgctattgcgaatagtgctgtgatgaatgtatgagtagaggtgtctttttggtagagcaacttattttcttttggatagatagctaacattgggattgctgggtcaaatagtacttctattttaagttctttgagaaatctccaaactgctttccacagtggcggaactaatttacatttccacaaacaatgtatacacatgatttttttttttctgcagcttagccagcatacgttgctttgaaactttttaataatagccattctgacttgtgtgagatgtggttttcattcacatttctgttgattagtgatgtcgagcatttttttcaatatttgttggctgctcatatgtcttctttagagaagtgtctgtgtctttaatggggttgtttgttttttgcttgtattggaagttctggacaggtaagagaaagaaataaagggtattcaaataggaaaacagaagtcaaattgtccctgtttgcagatgacatgattgtatatttagaaaaccccatcgtctcagtccaaaatctccttaagctgataagcaacttcagcaaagtctcatgatacaaaatcaacatgcaaaaattacaagcattcctacacaccaataagagacaaacagaagccaaatcatgagtgaactcccactcacaattgctacaaagaaaataaaatacctaggaataccacttacaagggatgcgaaggacctctacaaggagaactacaaaacactgctcaacaaaataaaagaggacacaaacaaatggaaaaaaattccatgctcatggataggaagaatcaatatagtaaaaatggccatactgcccaaaataatttatagattcagtgctattcccatcaaggtaccattgactttcttcacagaattagaaaaacttctttaaatttcatatggaacaaaaaagagcccgcattgccaagacaatcctaagccaaaagaacaaagctggaggcatcatgctacgtgacttcaaactatactacaagtctacagtaaccaaaacagcatggtactggtaccaaaacagatatacagaccaaagaaacagaacagaggcctcggaaataacaccacatatctacaattatctgatctttgacaaacctgacaaaaacaagcaatggggaaaggatttcctatttaatatatggtgctgggaaaactggctagccatatgcagaaaactgaaactggaaccccttccttacaccttatacaaaaattaactcaagatggattaaaaacttaagatgtaaaaccataaaaagcctggaagaaaacctcagcaataccattcagaacataagcatgggcaaggacttcatgtccaaaacatcaaaagcaatggcaacaaaagccaaaattgacaaatggaatctaattaaactaaagaacttctgcagagcaaaagaaactgtcatcagagtgagcaggcaacctacagaatgggagaaaatttttgcgatctatccatctgacaaagggctaatatcgcgaatctacaaagaaccgaaacaaaattcacaagaaaaaaacaaccccatcaaaaagtgtgcaaaggatatgaaacgacacttctcaaaagaagacatttatgtagccaaaaaacagagcaaaaaaagctcatcatcactggtcattagagaaatgcaaatcaaaaccgcaatgagataccatctcatgccagttaaaatggcaatcattaaaaagtctggaaaccacagatgctggagaggatgtggagaaataggaatgcttttatgaaggggtggcctgcccctccacacctgtgggtatttctagtcgggtgggacaagagactgagaaaagaaataagacacagaggcaaagtatagagaaacaacagtgggcccaggagaccggcactcagcacaccaaggacctgcacaagcaccagtctctgagttccctcagtttttattgattattattttcaatatttcagcaaaaaggaatgtagtaggagagcagggtgataataaggagaaggtcagcaaaaaacatgtgagcaaaacaatctatatcataattaagttcaagggaaggtactatgcttggatgtgcacgtaggccagatttatgtttctctccacccaaacatctcagcggaataaagaataataaggcagcattactgcaaacatgtctcgcctcccaccatagggcggtttttctcctatctcagaattgaacaaatgtacaatcgggttttataccaagacattcagttcccggggcaggcaggagacagtggctttcctctatctcaactgcaagaggctttcctcttttactaatccacctcagcacagactctttacgggtgttgggctgggggacagtcaggtctttctcatcccacgaggccatatttcagactgtcacatagggagaaaccttgggcaatacccagctttcaagggcagaggtccctgtggctttccgcagtgcattgtgcccctggtttgttgagactagagactggtgatgacttttaccaagtatactgcttgtaaacatttttttaacaaggcacgtcctacacagccttagatcccttaaaccttaatttcatacagcacatgtttttatgagctccaggttgggtcaaagtggctggggcaaagtggttggggcaaagctacaaattaacaacatctcagcaaagcaattgtttaaagtacaggtctttttcaaaatggagtctcttatgtctttcctttctacatagccacagtaacagtctgatctctctttcttttccctatacttttacactgttggagggagtgcaaattaattcaaccattgtggaaggcagtgtggcaattcctcaaggatctagaaccagaaataccatttgacccagcaatcccattactgggtatatacccaagggattataaatcattctactataaagacacatgcacacgtatgttcattgtggcactgttcacaatagaagagatttggagccaacccaaatgcccatcaatgatagattggaaaaagaaaatgtggcacatatacaccatggaacactatacagccataaaaaaggatgacgtcacgtcctttgcagggacatggatgaagctggaaaccatcattctcagcaaactaacacaagaacagaaaaccaaacaccacatgttctcactcataagtgggagtggaacaatgagaacacatggacacagggaggggaacatcacacatggggacctgtctgggatggtgggttaggggaaggatagcattaggagaaatacctaatgtagatgacaggttgatgggtgcagcaaaccaccatggcacatctataccaatgtaacaaacctgcacgttctgcacatgtatctcagaacttaaagtataataaaaaaatgaattgtttaatttctttagggattctggatattagacctttgtcagatgcatagtttgcgaatattttctcccattctgtaggttgtctgtttactttgtttatagtttcttttgctgtgcagaagcactttaattaagtcccacttgtgaatttttacttttttgcaattgcttttgagaacttagttataaattctttctcaaggctgatgtaaatcatcatgtttcctaggttttcatctaggattcttatagtttcaggtcttacatttaaacctttaatccatcatttttttttttttcgatcttggctcactgcaagctcagcctcctgggttcatgccattctcctgcctcaccctcctgagtagctgggactacaggcgcccaccaccatgcccagctaattttttgtatttttagtagagacggggtttcaccatattagccaggatggtctcgatctcctgacctcgctatctgtcctcctcggcttcccaaagtgctgggattgcaagcatgagccatcgtgcccagcccctttaatccatcttaagttaatttttatatggtgaaaagtcagggtccagttgcattcttttgcatatggtcacccagttttcccagtacaatttattgtatagggagtccttttcccattgcttatttttgttgactttgttgaggatcagatggctgtaggtgcatggctttatttctttttttttctctttttttaaaattttatgtgttaaaatgttgattcagagggtacatgtgcaggtttgttacatgagtatatcacatgatgctaaagtttgaccaaggtagtgaacacagtacctaataggtagcttttccatcctttccccctccctccatcccatccctttttggagtcctcagtgtctaccattcccatctttgtgtctgtgtgtatccaatgtttaggtcccagttataagtgataacatgcggtatttagttttctgttactgtgttaatcggcttagggtaatggcttccagctgtatccacgttgctgcagaggacatgatttcattcctttttttatattatatgttaagttctaggatacatgtgcacaacgtgcaggtttgttacatatgtatacatgtgccatgttggagtgctctacccattaactcctcatttacattaggtatatctcctaatgctatcccaccaccctccccccaccccacaacaggccaatgtgtgtgaccctacctttccttctgactcatacctcctgggtcctgaccatgactttcttgaaagtgtagccccaaaattctcctaacttctgaatcgacttcctctgatccctacctcctagacactaatgcttcaggctttcacttcctctcccaagtattagagcaggttgtatctccaaagggatctaaggaagctctatgctgcatcctcaggcccctaggctataaacccagggagtcttgtccctggtgtccctcccaatttaggcatacagctctccacatgggcagttatgtgggacccgttccccacaacccttaccagggtcttagaactgataacctagtattttaacaactgaaacagggtctacaacaacataatagatcaggatgaaaacaaattgagtaaataaaagggaggcgcatattcatatagtggcaaatgagggcaatgagcgaacatccttccactgtgtttccaaaatgcatctacaaagacagaaaggagaaagaaagagagaaagagaaagatagaagtagtaaagaaaaaacagtatatcctatttctttaaaagccagggtaaatttaaaacctataattgataattggaagttttctctgtgaccctataacactccaataccactttgttgtccgtgtaaacaagggcatagcccaaaagcactgaggccactgacaaccagtagccttcttatcaaaaatccttaacccaggaacctgcagatggccgaaatgcattcatcagttgcagcgactgctttgctaacagaaggaagtagaaaattagcctctagaggaaacctcattgtgagcccacctcaccagttcagaactatcctaagttaaaaaagcaaaaagggtaggttgctaactcaaaaatctcaaagtatggggctattctgttagaaaaagataatttaacattaaccattgaaaattcccttaccccagcagatttcctaacaggggatttaaatcttaattaccatacaaaggcccaaccagatctaggaggaactcccttcaggacaagacaatagatggttcctcccaggtgattgagaaaaaaacacaatgggtattcaataattgagggaaagtcctgtagaagcagagttaagaaaattgcctaataactggtctgctcaaacatgcaagctgtttgcactcagccaagccttaaagtacttacagaatcaaaaaactctgtctcaattctgactcaataggttacccacaccctctctgaaatgaatttgcataagagagaactgttgcttgtaggaatgcatcttgatggggcacctgggttaataggaagtactcgggaacccagcccagctctgggactcacctctgagcacaaacgcaatgtcgggcacactggtaaaggtccactagaatccagcagcctggacccctttctttgtggtcaagaaaggtgggaaaacaggtgcaggactgctacatccaccaactttctggtattattttttttcacaatagccatagaaaactaaaatgggggggattacaatcatttctttgaatatcttgatctcctgacctcgtgatccacccacctcggcctcccgaagtgctgcgattacaggcacttctctgaatatctcatagaattattcacttattcactcatttatttattcaaaaacaaaggtttttttaacctcaccgtttagtagctaaaggaaggaaaataaattattgtgttaaaacattatagagggtgtactgaaggaataaattgtgggcttgggccattcagagacagagaagataaataagtaaagaggtctttaaggacgaagaggagtttaccagttggtaaatactagaaaaaggaaaaagcactggcagattcatggagatcatacatgaaagagcagaaatgggaccagctcctcttcaaattaccactcctctcacttttttcataattatctccacaaggtcataccaaaggtcatcaattcagaacataaatcaatagatttccaaaagaattccatggaagtcagctctcccaggggccccatttcctcctgctccctaatccatctaaactcttatgcccaacaccttcctcctttgccccactcatggcaggtgacacattcgagaacccagagagtcagagttcttttctttctgcctcaaatcctgggctcctatccaaaccaaagagtagggacatgtaactatttacacttcattccacccaacctcccccagttctgtggctactttccaccagccatcactgcctccctaaccccgactggggactcttggaccctgactctttccctacttggatcagcacctgtttttctcccatagcatgggcaacagtagctctgaagtcagagattttggctttgaattctcactgtgctttttttttcccctccctagattctcaatttctttagagttgggctcaaaatgtggtaatggccaacatttagtgagcacttgttatgttctggccatgaagccaaaactttacatgctttctccagaaaaactctacaaaagagatttttaaaaaaatcttcatattataggtgggaaagctaaggcgcaaacagggtagttccctgtccagaatcccccagttggtaagaggtacagccaggattgtagtccaggcagtcaggctccagagactttgctgttaaccattcatttaaacaaggtcatgattaagttgagcctccagtctagatggcagcccctaaaccttccagaggtcatttcatgtttgctatgtttgattcattattttcaaattgcaggaagatgtgtcagattatgaactccccatattggcataaatgcaagtctcactatccagggcagctcctgtgagaaactgaatggcaatcatggggctaggtgtagcatagtcattgaaagcgatgtttatggagaatgtttaatgatatgagtaaagcatgtgggaaagtgataaaagtagaacatagagccatatgtagagtatgaatgtaactcttagaaaagtgtgcttgtgattttgaagacttattaaaaagtatacatctatcccacttatttatttattcatttatttattgagacagagccttgctctctcgacctggctggagtgcagtgacataatctcagctcactgaaacctcagcctcctaggttagagtgattctcctgcctcagcctcctgagtagctgggattacaggcacccaccaccatgcctggctaattcttgtatttttagtagtgacagggtttcaccattttggccaggctgttctcaaagtcctgtcctccggcaatccacccaccttggcctcccaaagtgctgggattacgggtgcgagatactgagcttggcctatcccatttatttactactcagatacctccataaaaactcctgaaaggtggtaactcagctgctatgtcctttgcttccatcgcatgatgcagatgactgtgtctgttgatgatgcccaagaaatacctactgattgaatccatgagtgacagctggataaagcaaaactttgaactggttatatcaccatcctgaagagactcagttcagttttgaatgccacattgtaaaaatgaaactgctatattggttgctggatatttcctgattcggtgtttaggcaagccaaggcagaggaaggaacaccaagatgccccttggtggcatcttgaagcagttactcctgtgggtagatcagctcagggatttgatttgtgggtttttttaaattatactttaagttttagggtacatggtcacaacgtgcaggttagttacatatgtttacatgtgccatgttggtgtgctgcccccattaactcgtcttttaacattaggtacatctcctaatgctatccctccctgctcccgccaccccacaacaggcgctggtgtgtgatgttccccttcctgtgtccatgtgttctcattgttcaattcccacctatgagtgataacatgctgtgtttggttttttgtccttgtgatagtttgctgagaatgatggttttcagcttcatctatgtacccacaaaggacatgaactcatccttttttatggctgcatagtattccatggtgtatatgtgccacattttcttaatccagtctatcattgttggacatttgggttggttctaagtctttgctattgtgaatagtgccacaataaacatatgtgtatatgtgtctttatagcagcatgttttataatcctttgtgtatatacccagtaatgggatggctgggtcaaatggtatttctagttctagattcctgaggaatcaccacactgacttccacaatggttgaactagtttacagtcccaccaacagtgtaaaagtgttcctatttctccacatcctctccagcacctgttgtttcctgactttttaatgattgccattctgactggtgtgagatggtatctcattgtggttttgatttgcatttctctaatggccagtgatgatgagcattttttcatgtgtcttttggctgcataaatgtcttcttgtgagaagtgtctgttcatatccttgcccactttttgatggggttgtttgttttttcttgtaaatttgtttgagttctttgtagattctggatattagcactttgtcagatgagtagattgcaaaaattttctcccattttgtaggttgcctgttcagtctgatggtaatttcttttgctgtacagaagctctttagtttaataagatcccatttgtcaattttggcttttgttgccattgcttttggtgttttagacatgaagtccttgcccatgcctatgtcctgaatggtattgcctaggttttcttctagggtttttatggttttaggtctatcatttaagtctttattccatcttgaattaatttttgtataaggtgtaaggaagggatccagattcagctttctacatgtggttagccagttttcccagcaccatttattaaatagggaatcctttccccatttgttgtttttgtcaggtttgtcaaacatcacatagttgtagatatgcagcattatttctgagggctgtgttctcttccattggtctatatctctgttttgttaccagtacaatgctgttttggttactgtagccttgtagtatagtttgaagtcaggtagcgtgatgcatccaggtttgttcttttggcttaggattgacttggcaatgtgggctgttttttggttccatatgaactttaaagtagttttttccaattctgtgaagaaagtcatgggtagattgatggggatgtcattgaacgtataaattaccttgggcagtatggccattttcacgatattgattcttcctacccatgagcatggaatgttcttccatttgtttgtatcctcttttatttcattgagcagtggtttgtagttctccttaaagaggtccttcacatcccttgtaagatggattcctaggtattttattctctttgaagcaattgtgaataggagttcactcatgatttggctctctgtttgtctgttattggtgtataagaatgcttgtgatttttgcacattgattttgtatcctgagactttgctgaagttgcctatcagcttaaggagattttgggctgagatgatggggttttcttggtatacaatcatgtcatctgcaaacagggacaattcgacttcctcttttcctaattgaataccctttatttctttctcctgcctgattgccctggccagaacttccaacagtatgttgaataggagtggtgagagaggcagcacaccaacatggcacgggtatacatatgtaacaaacctgcacgttgtgcacatgtaccctaaaacttccagtagaattaaaaaagaaaaaaaaaagcaaatgtgtaccagggtgttcaatacataaaaacgtaagtttaaaaccatttccgctggaatttatttgcttatttatctacatacaaataggtgggaaatgaaacttatttttcctcaagtgattagttagccaattatctcaatatcaattaataaatatcaattatttatccaaaaatatataaaattttcacatattttaagctcttccagatatcttgtttttactgctttttaatttgtttctgggcttctcaggtaacagttaaaaatttcaaccctttgaaatctgttttttttaaagatcagcatattttgatcaatgttccatgtgcatttgaaaagaatgtgtaggagtggtgagagagggaagttctggccagggcaattaggcaggagaaggaaataaagggtattcaattaggaaaagaggaagtcaaattgtgtctgtttgcagatgacatgattgtatatctagaaaaacccatcctctcagcccaaaatctccttaagctgataagcaacttcagcaaagtctcaggatacaaaatcaatgtgcaaaaatcacaagcattcttatacaccaataacagacaaacagagagccaaatcatgagtgaactcccattcacaattgcttcaaagagaataaaatacctaggaatccaacttacaagggatgtgaaggacctcttcaaggagaaatacaaaccactgctcaatgaaataaaagaggatacaaacaaatggaagaacattccatgctcatgggtaggaaaaatcaatatcgtgaaaatggccatactgcccaaggtaatttatagattcaatgccatcctcatcaagctaccaatgactttcttcacagaattggaaaaaactactttaaagttcttatggcaccaaaaaagagtgcacatcgccaagtcaatcctaagccagaagaacaaagctggaggcatcatggtacctgacttcaaactatactacaagactacagtaaccaaaacagcatggtactggtaccaaaacagagatacagatcaatggaacagaatggagccctcagaaataacgctgcatatctataactatctgatctttgacaaacctgagaaaaacaagcaatggggaaaggattccctatttaataaatggtgctgggaaaactgggtagtcatatgtagaaagcgaaactggatcccttccttacactttatacaaaaattaattcaagatggattaaagatttaaacattagacctaaaaccataaaaaccctagaagaaaacctaggcattaccattcaggacataggcatgggcaaagactttatgtctaaaacaccaaaagcaatggcaacaaaagccaaaattgaccaatggggtctaattaaactaaagagcttctgcacagcaaaagaaactaccatcagagtgaacaggcaacctacaaaatgggagaaaatttttgcaacctactcatctgacaaagggctaacctccagaatctacaatgaactcaaacaaatttgcaagaaaaaaacaaacaactccatcaaaaagtgggcgcaggacatgaacagacacttctcaaaagaagacatttatgcagccaaaaaacacatgaaaaaatgcttaccagcactggctatcagagaaatgtaaatcaaaaccacaatgagataccatctcacaccagttagaatggtgatcattaaaaagtcaggaaacaaaggtgctggaaaggatgtggagaaacaggaacacttttacactgttggtgggtctgtaaactagttcaaccattgtggaagtcagtgtggcgattcctcagggatctagaactagaaataccatttgacccagccatcccattactgggtatatacccaaaggactataaatcatgctgctataaagacacatgcacacgtatatttattgcggcactattcacaatagcaaagacttggaaccaacccaaatgtccaacaatgatagactggattaagaaaatgtggctcatatacaccatggaatactatgcagccataaaaaaatgatgagttcatgtcctttgtagggacatggatgaaattggaaatcatcattctcagtaaactattgcaagaacaaaaaaccaaaccctgcatgttctcactcataagtgggaattaaacaatgagaacacatggacacaggaaggggaacatcacacaccagggcctgttgtggggtgggtggaggggggagggatagctttaggagatatacctaatgctaaatgacaagttaatgggtgcagcacacccacatagcacttgtatacatatgtaactaacctgcacattgtgcacatttaccctaaaacttaaagcataataataaaataaaataaaaaaataaaaaaataaaagaatttgtattctacagttgtgtttaatgttctataaacgtcaattagactaaggtgattggtagtgttattcagatattcagtattcttactatatttttgttagttgtatatcgatttctaaagacttgctaaattctccatctgtgagtttgaatttgtgtatttatttccttatttctgaaagttttgctgcatgtaatttgaagctctgttatgaagcacataatctacctgatgcattgatcctctgttatcatgaagtgttcctccttgtctctgataatattctttatcggtagttaattttgtctgataatagtatagctactccatatttcttttgcgcactgtttgcataacatagctttctctattgtttttattttaaagctatttttgtctttctatttgaagttcatctcttcagtataacacacaggctgtcagtccctgctttttaaaaaatccagttcatcagtctctttctttgattggagtggttagtctagtaatctttaatgtaattattgatgtggttgaattcaagtctgccattttgctatttttttctgttcgtctcatctggttattatatatttccctatttatcctttcatgccattatttgtattaatcaagtattattcaatatttcattttaatgtgtcagctgatttattagttctctctctttggattactttttagtggttgctttagggattacaatatgcagtttaactggttttaaaccttctttaagtttatgttaaattatttcaggtaaaatatagcaaccttgcaaaagtatatttccatttcccctttttcatatccttactattattggtgatattttatatataatataatatattatattatatataaatatactattatattatatataaaatatcacaatataatatatcatattatatataaatatacataatatattatataaatatacataatatattatatataaatatacataatatatttatataatatataagtattacatattatattatatataaacatatataataagcccaacaatacagtttgattttttctttaaagtcatatattgtttaatgaaattaagaaaataagatttaaaagatattctatgtatatgtatatatacatacacacgtttatatgcgtgtatgtatgcatctgatggtctttatttcttcctgtgggtccacttttatttggtgtcaaattaaagagggttgtaggtgtatgcatttatttctgggctctctattttgttccattggtctacgtgtctacttttgtaccagtaccatgctgttttggctactgtagccttgtagtgtagtacatgtttgttacttgggcatattgtgtgatgctcaggtttgtggtatgatagaacctgtcacccacgtagtgaacatagtagccaataggtagtttttcagcccttgtgtcactctctctctatcccttctaatagtccccagtgtctatttctcatttttatgtccatgtgtccatatgtctaatatttagctcccacttataagtaagaacatgtcatatttggttttctgtttatgtgttacttagcttagaataatggcctccagctagatccatgttgctgcaaaggacatgattttgttcttttttatggctgcatagtattccattgggtatatgtgccacattttctttgtccaatccaccattgatgggcatctgcattgatgccatgcttttgctattgtgaatagcatgatgatgaacattgggtgcatgtgtccttttggtagaacgatttattttcctttgggtatatacccagtaatgggatagctgggtccaatggtagttcagctcttagttctttgagaaatctccaaactgctctccacagtggctgaactaatttacattcctaccaacagtgtagaagtgtccctttttctccacagcctcaccaacatctgttattttttgactttttaacaaaagccattctgactggtgtgagatggtatcttactgtggttttgatttgcatttctctgatgatcagtgtattgagctttttttttatatgcttgttggccacatgtgtgtcttctttcttctttagaaaaaaagacatgcatgtccactttttcatggagttctttgctttttgcttcttgatttgtttaaactccttatagattctggatattagacctctgtcggatgcatggtttgcaaatattttctctcattctgcaggttgtctgtttactctcttggtagtttctcttgctgtgcagaagctctttctttagtttgcttaggtcctacttatcaatttttgtttttgtcacaattgcttttggggacttagccataaattctttgccagggctgaaatggagaaggttatttcctaggttttcttctagaattgttatagtttgaggtcttacatttaagtctttaatccctcttgagttaatttttgtataaagggaccagtttcattcttcagcatatagatggggtccagtttcattcttcagcatatagatagccagttatcccagcacaatttaatggatacagagtctttttccccattgcttattttgtcaagcttgttgaagatcagaaggttgcaggtgtatggctttatttctgggctctctattctgttccattggtatatgtgtttattttgtaccagtaccatgctattttggctactgtagccttgtagtgtagtttgaagtgggtaatgtgatgcctctggctttgttctttttgcttaggattgctttgattattcaggctcttttttttcctagttctgtgaaaaaggacattgctggcttgataggaatagcattgaatctgtagattgctttgggaagtatggtcattttaacaattttgatgctaccaattcatgagcatgaaatattttcccacttgtttgtgttatctctgatttctttcagcagcattttgtagttcgccttgtagagacctttcagctaattggttagatatattcctaggtattttattctttttgtagctatggtatagggactgtgttcttgatttcgatctcagcttggatgtattggtatatagcaatgctactgatttttggccattgatttggtatcccaaaactttactgaagtcatttatcagttccaagggcnttttggcagantntttagggtttttaaggnntagaatcatatcatccatgaagagagatagtttgacctcttttcctgttttgatgccttttatttttttctgttgcctgattgttctggctaggacttccagtgctatgttgaataagagtggtgatagtgggcatcttgtcttgttccagttctcaaggggaatgcttctcacttttgcccattcagtatgatgttggctgtgggtttgtcatagatggctcttattaattcgaggtacatttcttcaatgtctagtttgttgagggtttttttatcatgaagagatgttagattttatcaaaagcgttttctgcgtctactgagatgattatatggtttttgtttttaattctgtttatatagtgaatcacacatagtgactatcactgataatgttttgtttttatttcatctattttatctaatactaatatagttactctgattccattagtatttttctggcatatatttaccacctttntactttcagtaatttcatagtcttacgttntagtaatgtctggaatttaaaaagtccaatctgacaacctctgcgtcctaacttgtgagttcttctatccattgattatcttctactcattaattattgatgtatttgcatatgtttctactattttactttgtggttccttttctatgcttcttttcccccttctttttgggagtatgttttggccttttttttttttttggctctttatatcctattttttcttattctgtattttcctctacagatttcaaatttatacattttacttctattctttagttactatgtttgagaattttatttttcatgcttgataaagtctaaagttatttggtattttaaccactcccccactgcccaccctacaacctcaaaagatgcatggactttagcacagtttaatttcagtcactcactcctggattaatgattcctcttggctctcttgtgatgcttcttggctctcttaatgattctgtgttttccactgcagatatatgggaatttctgtatctctattatagcacacaccagcatgggggattaggttgttctatctggaccccgtctctgctgaaacattccatagtcatgttactccatgttgagcaagagttccgtactgcatggtatcctctaaatattccaaatgggaattcatatatcagacttttctgtattcggaattcctctaaatattccaaatgggaattcatatatcagacttttctgtatttggaattcctcttaagtgtctaggctttctaatacattgtcatcaatttatccattccctacagggtataatgagagactatgggactcagaaggtggcagatattttttattatggggaaagataactgagaataaagctatcatgcagatatttgcagagataaaagtaatgcagatactgagtggagttttgatcaaactatgcttgaaagccactctaccactagttacacaaaccaataatttcccttcgcagtggaagtcagcttgagttttttcaggtgtttttgtgggtttcaccagatacagcaaagaaattaaaattactgttaatggatgtcaaaaccagtcagaagtatcctaagttatataatttgtcaaacaaccatatacatatattttgtattatatttatccttttgttcttcctttggtaggaaaattgtctcattaattcttatacgaaaggacttaaaattagcaaactttttttgcaaacacatggattccattcttggacttgaggacaacttgacgaacaggctggggaggccttgagtggtctggagccagcttgaagcggagcagagttaatgccactgccactttacactcaattatggcaaaatgctgcccaatgcagttcctggggataccaagaaagaaaacatggcatctaatgaatttatatattattaacaacatacgccaatctttttatatatgacgacttttgtagggaaacaagatccatttttttttctgtcatcctgctggattacaggtgctcaccatgatgcccagctaatatttttgtatttttggtagagacagggttttaccatgttggccaggctggtctcaaattcctgatctcaagtaatccgcctaccttggcctccgaaagtgctgggattacaggtaagagccaccgcacccagccaagatccatgttttaaacaaattccaatgtggcagaatccagcaaatgttttattttaagttaagtaagccccgatcagaaagtccattaatgtcaagacctgcaaactgtggctctattattttggggcccatcttacaaataagtggtagtgagttctatcaacatttgattctgcaaggtccacgtaacttgaaaaccttccttatatcatgataaggaaaagctacttcttactattatttagaggctgtgcagttgaagccttaggcataagaacaataacctggcatactcagtggattgtgttgtcatttggtaaatcgggtgtctctcataccaaaccaaagggaaacttggactttagaacaacattgctctctgtaggaacaagagctgggaggtgccaatgttgccttgttcctataacaagatggcattcccaatgcttgtccattgcaagtttaagtgtagtctttgggcctgtcatgaggatggccttcatcaattcacacccatatgccaaggaccagagttgttctttgtaacattaaccggtccctttgggggctcaaaagggtaccaactaaatgcactggtcacaagagaagacaagccaggtaaaataatggggagcaacagcagtgtcagctaactgagggcctgaagggaagaagcacttgtcaggtaagcactattacacatttccatcaagttcaccagcttgagtctttaccttaatccagctgagaatggtatgaaggcatagggatgtattttttcagaattttccctggagaatctcaaggggttaaagacctgtaatgagagtgaagatcccagtcctaatccctccagcccacccccacaaaaaacaaaaacaaaaacaaaaacgaaatccatagatattgttaacagaattccaaagctaattttaggaacttacaatgtctggagactacaagtcctgcttgatgttccccaaaagcctaccactgaaaatatatcccaagaaagcagaggctatataacctagtgatagattaaacaggccccgatagtaagaagcagcagcaaatcatccagacaatctgacttgagcaaatagtgacttcattattttcccttcacagtaaacccgtgcctctgtcatataaaaatgggcaaagcatcaaattattatcttttctatttgtcttggtttccaaatggactgagccagtgacttgggcaaagaaaaaaggggtggcaattcacaagctgaagtcacaagctgaagttgttcagcttctgcccgaaagtctctgtgagaggctgccgattagtatctcctgggctgtggggttggtctgagcgctggtttgcagcccaggagtgtgcttgttctctcccaggccccctctccctttcactctcaggttagcactgagtgtgaaggagagtgatattcctagagactaacttcaaatatgctcaaatcttaaaaaaagcaaagagtccataatcttgctactttaattatgaccagtaacaagagatttgcaatacacttcacaagtctgtgactagattgactacagacatgaatgaaagcagagagcaaggtggttaaacagtgcagtgtcagttgactaatcacacccctctacttcccaggggatgatatgcttctgttgataaggcatcatcatggaactctggtgatgattataaatgcaaatgtagttttctcttaaaagcatagggtttttgttctgttttgttcttttctaaatgacagatcgttatcctaactgctctctcaactgtgaagatgcttctcttccctcttggtgctatcttagatgccactgggtgcagttgggacaatcatacctgagggtcttcccagaaataggggttgtggtgaagagcccaaatattgataaacacagttattcctgagtaaacagaagaaaaagcaggtaagtgcatgagcgaagattctgtctttttttttttctcttttactttttttttaaaattatactttaagttttagggtacatatgcacaacatgaaggtttgttacatatgtatacatgtgccatgttggtgtgctgcacccattaactcgtcatttaacattaggtatatctcctaatgctatccatcccccctccctccaccccacaacaggctctggtgtgtgatgttccccttcctgtgtcaatgtgttctcactgctcaattcccacctatgagtgagaacatgcggcgtttggttttttgtccttgcgatagtttgctgagaatgatggtttccagcttcatccgtgtccctacaaaggacatgaactcatcattttttatggctgcatagtattccatagtgtatatgagccacattttcttaatccagtctatcattgttggacatttgggttggttccaagtctttgctattgtgaatagtgccacaataaacatacgtgtgcatgtgtctttatagcggcacgatttataatcctttgggtatatacctagtaatgggatggctgggtcaaatggtatttctagttctagatccctgagaaatcgccacactgacttccacaatggttgaactagtttacagtcccaccaacagtgtaaaagtgtccctatttctccacatcctctccagcacctgttgtttcctgactttttaatgatcgcctttctaactggtgtgagatggtatctcattgtggttttgatttgcatttctctgatggccagtgatgatgagcattttttcatgtgtctgttggctgcataaatgtcttcttttgagaagtgtctgttcatatccttcaccttcttgttgatggggttgtttgtttttttcttgtaaatttgtttgagttcattgtagattctggatgttagccctttgtcagatgaggagattgcaaaaattttctcccattctgtaggttgcctgttcactctgatggtaatttcttttgctgtgcagaagctctttagtttaataagatcccatttgtcaattttggcttttgttgccattgcttttggtgttttagacatgaagtccttgcccatgcctatgtcctgaatggtattgcctaggttttcttctagggtttttatggttttaggtctaacatttaagtctttaatccatcttgaattaatttttgtataaggtgtaaggaagggatccagtttcagctttctgcatatggctagccagctttcctagcaccatttattaaaaagggaatcgtttccccatttcttgtttttgtcaggttgtcaaagatcagatagttgtagatatgcggcattatttctgagggctctgttctgttccattgatctatatctctgttttggtaccagtaccatgctgttttggttactgtagccttgtagtatagtttgaagtcaggtagcatgatgcctccagctttgttcttttggcttaggattgacttggcgatgcggactcttttttggtgccatatgaactttaaagtagttttttccaattctgtgaagaaagtcattggtagcttgatagggatggcattgaaactataaattaccttgggcagtatggccattttcacgatattgattcttcctacccaggagcatggaatgttcttccatttgtttgtatcctcttttatttcattgagcagcggtttgtagttctccttgaagaggtccttcacatcccttgtaagttggattcctagatattttattctccttgaagcaattgtgaatgggagttcgctcatgatttggctctctgtttgcctgttattggtgtataagaatgcttgtgatcctcaataaaatacgagcaaagattctttcacatctattcatagatttcataaccaaggaaagaattctacaatcataatttcgttaaccatttaagaagcgtctgttatgatgacacttaaatgggtgctgtgaagatcagtgagatctactctagccttcaaggagctcacagtccattggaagagacaggcaattgcaacacatggtaataagtcagaaggaagcctaggatgcttggggaattgagaggggaacctcatgtatagagcctttggatgtatgcaagagaaaaggcccaggcgaggcatgctgagctgagtataatgaaatcggtaggggaaaaccaggtaaagagaagaatgttcagaaaggaatttgaggcagataaaaaagcatgaagccaagctttaatacttgagaaagcatgagaaatttgggtgactgggaggttgtataacaggattcagggagcaaagtgtccatagatcagcctgtggaggttggctgggcttgtaccttaaaatgggaaagaggtcatgctaaggattttaggttgaaaccattatggatcactgagaagtttaagcagagagtgagagtattgtcttttttttttttcctttcctagtcagctacttgggagattgtattatactttggagccatagaaccatatgggatatagtgccaatatggcactgaagtaatattttatcatgttatggaatatccattgatcagggtggagatgatatgggtttctcctgaaacctataaatgtaataaattatattaatggattcctaatattgaacaatcttttcagttttggaatatgacctacttacttggccatgatgcactgttttattttattttatctttttgtagagatggggtcttgtgttgcccagactcaagcgatcctcccaccttgacctcacaaagtgttcggattacaggcatgagccacctgcccagccaatacatttatttcaatgagctattggattatgtgtactaatattttatttaaaatttttgtacttatatacataagtgatttttatctaaatatatttttgttcaatttttagtaggtttgttatcaatgtgatacttccttaaataactttctaagtttttatttttctatgctctggacaactttaagtattactgggattatatggtctttacaggtttgaaaaaatttgtgaaaaactgcataggtctggttccttttcaggggctctacaatttttctctagtcctgtgaaaattggcatgcttagactatttatctctaccagcatcagttttagtaaattatgtattatacaattatctagtttttttcctggtttttcaagtctctgtgcatacacttgtgtaatattagttcgtggtgtgtctctttgttgaccagcccctcccccactggctattgtgttttttgactagttttgcaaccgttctgctttccataccattaccttttgctttcgcctttgttaattcacctgtttccttttagtttactcttttattctttccccaactgatttatttccagttgttttcgacgtcaatgtttaatttaattcttttattaataaaaatatttcgcatttactattatagcttctcttctgaatgaatgctgctttagtggcaaaccattaattctcatatgtagagttttcagggtcatgatttgattttgtaattttgctttagcccaagagtttttaatggattaaacaaaaaactccagatgaatgaaactttttgaaaaatttttgttgctaatttccatttttattgtcttcatttaaagaacactattttgtaatgtttctcttttagtaattaagtttttttattgtggtctagtatacagtcaactttaagcaatgttgctggtgtacttaaaaggaaagtctgtcctctattagtggggaaaaagtttaatattgtacgcataaagtctatcttattaattacattgtttagatcgtctgtatactttatttgtttggtttgcgtaggtctttgaaaggcagttaaaatctgttagtagggtgcctttgactgttttccttttcatttcctatagtttgctttaaaaaattgcagggctgggcacagtggctcacccctgtagtcccagcactttgaaaggcccaggcgggtggatcacaaggtcaggagactgagaccatcgtggctaacacggtgaaaccccgtctccactaaaaatacaaaaaattagccaggcgtggtgacatgcgcctgtagttccagctacttgggaggtggaggcaggagaattgcttgaatctgggaggcagagtttgcagggagcagagattgcaccattgcactccagcctgggcaacagagcaagactccatcaaaaaaaaaaaattgcagatgtgtaacttgatacataggtaggtatcaatagctgtcttatgttcatgatgaattgtggcttttaacattatgaagactaatttttgaacttcaccaatcctgacatggccagctagcttactgactgaggtaaagacctaatttgggttagaatggcaactggaacaccataacagtgctgcatccacacagcaaagatcactttcaaaaaacaaatggccaggtcaccgttaacgaattcttcctaagtgattaatccacatattgctagctaatcaaggacattcaagaaatttgctttcttaacatgggtcagagattttgaagtttagagcttcaaaaacccaatgttatttaactctcccaagcctcaatcatagggtctaacctctatggttggattaggtttatatcctggcagtacacattctttcatttttcaatttttggttccagaagccttgttctcttttaaatggtttctggaagtctcaccaagatcatcagaacagactgcccattgaagttcagtagtagctaatacctaagaagtatgattcacaggctcatcaattattagctcctttgggtgagtctcaaatcatggtcaatgaaaaaatttttttgagacaaggtctcactatgttgcccaggctggagggaagtggtgtgattatagtttgctgcagcctcaaactcccaggctaaagtgatcctcccacctcagcctcctgagtagctgggattacaggcacatgccagtgtcctcagatgagatatttttgatttcctaagtctgttattgtctttcttaggagtttctgcttgctctagcttacagccagtgtctagttgattgccatggatctctcccatgagtggcacaaaacccattgtgttttgttctatttagtgattgtgaattatttaggggatttcatggaacacccatttttttgggccatgtccctctccactgaggcttactggaccatcagattcatggcacatactaggccattgataggtctgttattggctattgagggaatctgttgtttttgtttttctggcatgggttttattaatccagagaatcacactgacaccttatgagcatattcattataataaaaaagcatgcacattatctaacaaaattacatatttaaaccaagaatacgtcagaaaaagacataatttgaaaatttcctactttattgaggtcttaaatctccatggagccttagggcaaaaaggaaatagaattcataacttttggtggtttgtcatctttttttttttttttggccatgtagaaaatctgaaaacacctcaatgactctaactcaatgtcagtgaagattccctggaaaaaaacttatgaaaagcagattaatgactgcctgcaactgatctgattttatcttcatcctctctctaaatctgtcttcctaactccaatttctttgttccacaaatctaggtaattctgagcaaggctcaaaatatctcttaataagattagtgaaaagggatctgcattgtccagaaaaaatgactgctctcccaggaatctgtgtatcatttgagtcacaatctgtcagcagagtggacatccccttttctctgccagaataaagagtctttaattgtaccctaggctctaaattaaaagttaacttttaaaagataaaatataatttttaggattgactatttcttttaggtgattaatatacacttttcctaaagtagctcagccttactaagcttattaagaccacaatttctaaaccttttctatgggattaaaaagtagagccaccctctactctctgcaagtctttctgcagccaccctctcattgccttttaaaactgggaatttctcttcttgtttaatttggcagcccaatcctaccttcttttttaatttcataaattcattaaaatctctctctctctttttgtttgttaaataccttccttccattcttttcacttttatgggattatttctttttgcatttcagtgtatgtgtataagtaggatcttaggagggacaagtggcaacagaatcacccaagtggctttcttgagttggaacttagaatttacctagacttatgatttatcttttataagtagattggtttgtagatacctaagtatggaaatataaaacttaggggactctggcatttgaagattgacaaaggcaataactgagaccatggaagcaaggttgttgagaaggaaatagctgatattctaggacttggatactgtctgggtaaggaagatggtggaggtgtgaggatgacttctatctttctcacttaaaattactcacagacagtggtgccattcattaatgtagcaatccaggaggaggaataggtttaggggaaggaggtagatgacatgctttcttttggacattttgcacatcatagtatgctcagaacaaagcaaagtgcctagagcaaatgtttaatatgcacttgttgggccagcaaatgaagagaagggcacacataatgtagtaggtcttttgccaagagtgaatgggaccatggcacaggcacaggtagagagtgatgacaatgtgtaagtgatactgtgaggtgtgggagagaaagcaggcatcataaacatgtttctttttagaaataaacaggatttctgggtaatacaggggaagaggtgggtctggcggatatgaggcatccatttgcacatgctttgttgtgctatagctgcattcaagggcccattagcagggcagagaaagcgtatagaggaatttaatgctggttgaattactgatgagtgacagtagagaaagggaaaatattcaaggaagttgacggcattgccaaaggggaagttggagtgatgaatccaggcatccaagcctggggtgaagaaagtgaagttgtggagtgcctgtgtgtatgagaggggcaggaaggaaagcagggtaacaggaaatgagacagatgagcacgtgaggtgcagtgaaggcctgaaagctctggagggcaagaaggtgtggcggaaaggaatgtaaagtgaggtgaaggcaactctgcgtgtgcacttcctgtcccttcattgtagcttgagggagattaaggtgcagcccttgaaggcacttggaggaaagggcagagactgcaggagaccagagatgacgtataagtagcctaaaactgagtcagccgggtggagccagctcttccaccaacatccatgcggatctcaacagcattgtctgaagcccagaaagttacccgcagcagctgcaaaagccacaagatcaggaaagtgaaaggaacatgaaacagaaaggacctgaatgggaaaaattagaaggcatgctgattctcacattttcaacatgtagcttttgtatgggtcgggggattttaagattctgtggattacagggcttaggtgatctagaatggaagtagagaaaataattttcttgtgttggaaggcagcaataaatcatcattttattgatgttgaaaaaaaccagagcttattgacaggatttaggtattattgaaatgcaagattaagggaaaaggtagtaaaagttgactctgagctgttttgttggagcaactaggtgggcggaatattatgtgtatggatgcaatattatgtaggtaataaatattacaataaataccatgtgaaaaataacactgaattaaaaagaggaaacttctttagatactagatgattgcaaagatccccatgatagcaaagatctttctctggagagatcccagagaaagcttaagttgttgctttagtgtagtagttacgagcgcagactctagagtcccactacttgggttcaagtcctagttccaccatttaccagagatgaagttttacctttttgttcctgtttgtctaaaatgtgcataacactagtatttccacagcagaactggggggcaggaggatgggtggataaaatgagttaacacatgcaaaacatatggaacaatgcttagtccctagtaagtactaaatagtttttgtttttgttattacaatagtaaagttgattttgtaggaaacaaatatttaattgctattgggcaactatggtagcacagtagcaattaaatattgctacatttaattagattgcccaatcaaatccaatatttgaaagacggttaaattggaggaagttgtagaaacacatctcgacataggtcaaagataaattctggctcattcctttatgtctctaatgttgcctttcaatccatcttgcattccaccaatgtattaatctttctaaaaaataactataatcatgccacccagcttagacgtcttaaatctgtctgctgcttgattgagaaagactgaacacaaaggttggccttcagaaaactctatgatctggctacatcatggctccaggtatagtcccacaatttccctctgtgaatcctggagtctgtggattacagcaattgctccagtgacatgccctgccggtgtgcgtgagggaagggagaaggcaggctgcctgctgctttgtgtctgctcttctctctgcccacagtactgcctctctcatctttgctgatataaatctagtcctttaagtttcagcattaaagccgtgatgcttcacgaaggccccctcacccaaccctcagtccatatggcaggattctgtacctttgcaccttgataatcctgtgcctgtttggatagtcctgagagctctatcctctttctccctctctgggaaataagaatggccctaggttccacagagtctaaggataaataactgttaaagacatgagtatgttaagacatttcaatccagcacagctgcattgttaaaaaaaaaaaaaaaagttttaagncctgcaggtaaggagcgtccatctggaaaggtgatgggtttgtcgagtaaccgggatatgtttactaccggtgcgtagaggcggaggcattccttgatgcacatcgtggtgtaaggcatctggctcaggtgttccctgggtagaagcacaggaggaaaggaaaaggaggagtagtcacttaggcattgcactgaaagcccagcttttctccatttttgtaactgagaatgattttgttctttacccaaaggaggacttcagatgtatcaagtatgtcttaggaaaagctaaatgttaacacttaccacttttcacatgtaactgtaagtgattctcccccccccgcagatatagggctcttatcctgagacatacttattccagggctcctgtgaccagtatcacacatctgtgaaaatttggtagagacatggactgtatttatatccagagtgcctcttctatgaatgaataagtatttctgcctctttagaattgtaaaaaaatataaaatagggatgtggctctaagatggctgactagcggcatctggtactcgcctcttccacagacaggaaccaacatagcaagtagataattacacttcaaatagatcatctaagggagaacgctggaattcaacagagaagtgatggaaagcaccaaaagcaaggaaggagagggaagtgaggcagcctgtttggcggggatcaactgggagtctggagaagctctttaatttgggaaaagaataagtgagagccctccagtgatccacgttcccaccacggactcctacaatactagctatggaagagcccactaacctttgcaggccctgagactaacataaggagccggctggagattgcatgaagacattactccagagagagagctcacactgggtcccacaaacccctgagtcctcagcagctgcagtgtggcatcatctggagagctcagcctccatcagactgtgtcttgccttggggttcaacagcctctacatctccacatccctgaagccccagtgacattccccaccacagctgctgtggctgctgctgctggtgccaaggtgggagccactgccagtgaccctatcacccccagcagaggggtgggcacacattttcatgcaccctgaggacaaattccactgcctgtaactgtagctgcaagggccaaggtgctagcaaatcatgagtcaccctcatcccacaaaagccttttgcttatggctgctccaaatgaaagcagcgcctcccttgtggtgagcctagatcgtgccattgcactccagcctgggcaacaagagcaaaactccgcctcaaaaaaaaaagcagccccagcccctccctctccagtagcagggccatagctcagctgctgccattctcatctgagcattcttgtagcagcctggggatcaccctgtccctgcctaccatagccagcacctgcatacactactagggggtctgagggcagatctgctcaggctggctccactcctcccagtacctgagcatgctgtctagggccctagagactgccctgcccagtctatcattggcacctgagcacttctcctggggtctgaggttgggctcactcaatctgctgctaccaccacagctggtatccacccacatgtgtcaactgcgggctggggactggcctgctcagcccatcaccgccaccaccaataccagcgtggactgcttagtatcaagcaggttgtccgacatgcctgatgcctaggtgcgcaagagctcacccacctacctgacccaccactgccatttccagaacccaggcaagccacctggaaagagttggtctgcctggagtagctaacactggtgctagtatacatcaccttggtgcccaagaacgggcatgctcagcctactgtagccactgctgggacccgaagactggcccatgtatcccattccccaacaaaacttcaccacagcttccactaacaaccacatgctaagccactgagtaaatcacagacaaaaatgatgctgtttatagttgaagaaatcatacagcgattacactactgcacatgcccagaatcaaagccaaagcatcctacccaatgaacactatgcatacattttcaggaaaagtcctcccctatgaaagcaaattcaaaaaattggaaaaagcaactgttacacaagatgcacaaataccaatgtaagaacacaggaaacatgaaaagcaaggaactatgacacctccaaaacaacacaataattttccagcaacatatcccaatcaaaaagaaatttacaaaatcctgggaaaagaattcaaaatattgacactaaagaagcaaaatattgaggctgggtgtggtgcctcatgtctgtaatcccagcactttgggaggcagaggcaggaggataacctgaggtcaagagtttgaggccagcctggccaacatggtgaaaccctatctctactaaaaataaaaaaacttagctggttgtggtggcatgtgcctgtaatcccagctactcaaatgtctgaggcaggagaattgcttgaacccgggaggtggagaatgcagtgagccaagatcgtgccattgcactccagcatgggcaacaagagcaaaactctgtctaaaaaaaaaaaaaaaaagaaaaaaaagaaaaaaaaaagaagaaggtgagatacaagagaatgcagaaaaacactaaaaagaagtcagacaagaaattcaggatatgagtgagaaatccaccaaagagatagatatcatagaaaaagatggctcacacctgtaacctcagcactttgagaggctgaggcagtaagatggcttgaggccaggagttcaagaccagcttggacaacattgtgagatcctatctctattaaaaaaaaaaattagccaggcatggtggcacatgcctgtaatcccagctacttggaaggctgaaacaggaagactgcttgagcccaggagtttgaggctgcagtgagctatgatcatgccactacactccagcctgggtaacagagtgagactctctctcttaaaaaaaaaaggaactgaacagagattctggagctgaaaaatttattgaatgaaatacaaaatacatttgaaagcttcaacaattagagtagatcaagcagaagaaagaatctcagaccttgatgacaggtcttttgaaataacccagttatacaatttttttaaaaaaagaataaaaaagaatgagcagagcctatgtgacatataagacaccatcaaatgatcaaatattcaaatttttggtgtcccagaaggtgaagaggaaacaaaagggttagaaaacccatttaataaaataatagacaacaacttcataagtctaataagagatttacacgtccacatactggaggcttaaaaatccccaaatagatacaattcaaaaggtcttctctacagcgtattacagtcaaactgtcaaaagtcaaagatgaagagaaaatgctaaaaacaacaagagaacagtgtctagtcactagtcacttataaagaaacctccattaggctaacagtagatttctcagcagaagcctttcaggccaggagagaatgggatgatacatttgaagtgctgaaagaaaacaatggttagtcaaggatactattcccagcaaagttatctttcataaatgaaggagaaacaagcagaagctgagggaattcatcaccactggccttaacctatgagaaatgctcaagggagtcctatacccagaagtaacagaatgataactgccataatgaaaatacttgaagatataaaaaccactggtagaactaacacacaaacaagacagagaaaaagctcaaatggtaccactacagaatacaacctaaccacaatgctaaatgatgggagaaagaaaagaacaaagtatatacaaaacaaccagaaatcaattaataaaatgacaggaatatgccatcacatatcagtaataaccttgaatgtaatggaattaaaatttccacttaaaaggtatacattggctgaatggattgaaaaacatgacccaactatatgctgtatacaagaagctcatctcacctgtaaagacacatatagactgaaagtaaagcaatggaaaaagatagtccatgcaaacagaaaccaaaaatgagtaggaggagctatgtttatatcagagaaaaagtaaaaagtagtaaaaaagacatagaaagttattatataatgataaagggatcagtttagcaagaggctataacagtctaaacatgtatgcatccaacattggaggacccagatatataaagcaaatattgttagatctaaagagatacactttcataccataatcgttggagacgtcagccccctactctcagctttattcgagtcatctagacaaatttctttataaatttattaatttataaagaaacattggatttaaattgcacgttggactaaatgtacctcccagacatttacagaatattttgtccaataggtgaagaatacatatttttcttatcagcacatggaatattttccagtatagactgtatgttaggacacaaaagtctcaacacatttttaaaaaattaaaatcatatgaattgtcttcttagaccacaaaggactaaaattagaaatcaataataagaggaactctagaaactgtacaaatacatggaaattcaacaacattctcctgaacaacaattgggtcaagaaagaaattaaagaggaaataaaaaaatttcttgaaacaaatgaaagttgaaacacaacataccaaaacctatgacatacagtaaaagcagtgctaagatggaaattatagtaataagtgcctacagcaaaaacctagaaagatttcaaataagcaatctaatgaggcacctctaggaagtagaaaaacaggaacaagccaaaccccaaattagtagaaggaaagaaataacaaagatcagagcagaactaaatgaaacagaggttaaaagaacaatgcaaggatcaataaaatgaaagttggtttttgaaagataagtaaaatcaataaaccactgttagactaatgaagagaaaaagagagaagatccaaataaaaccagaaatgaaaaagaagacattcaactgataccacagaagtacaaaaggtcactagagactattatgaacaactgcacactaacaaactagaaaacctagaagaaatggataaattcctggaaacgttcaacctacccagactgaactgggaagaaatagaaaacctgaacagaccagtatgagtagtgagattgaatcgctaacaaaaagtcttccaaaaaagaaaattccaggactggatggttgttcttaaaagcattatttatacagtagtccccacttatctgtgagggatacgttccaaaacccccagtggatgcctgaaaccatggatagtactgaactttgtatatactgttttttcatatacataaattcttatgataaagtttaatgtataaattaggcacagtaagagattaataacaataactaataataaaatagaacagtttataacactacaccagcatagatgctttttgtgctttgaggccgttattaagtaaaataagagttacttgaacacaagcactgtgataccatgacaactgatttgataaccaacaccaaccgtgaccaactggcaggtagcatatacagtgtggatatgctggacaaagaaatgcttcacatcctggatgggacagagggagatggcaggagatttcatcatgctactcagaatggcatcaatttaaaacttataaattgttgtttatggcatttttcatttaatatttttggactgctgttgactgtggatagtgaaatcatggaaagtgaaatcacagacaagagggcgctattgtaatagcaaaaccaaaacaaaacctgagaatagcctaaatgttcatcaacactagaatggatataggattcatgatttatacataacggaattccatagaggaatgaaaatgaccgaaaagaagctcctctaaaaaatgagtgaatcctgtgcaaaagaagccaaacaaaagaatgtatgattttattcatatgtacttcaaacagaagataaactagactctagtatttaaagttgcaagcttaggcaacaaactataaacaaaaacaaagaatgaatgttattaaagtcaggaaaacatttacatcttggagaaatagaaggggtttgtgatgggaaggcaggcacgaggtttttagcagtgctggtaatgagcaatttttcttttaaaccagggttgcaactatatggctgtttgttagacaacattttaagctatacatctgttccctgtactttttgaatgtgttctatgtttcaccattttaaagtttttaaaacatgatcagtttggttttattaacaccatgaaatacccagcagctcaaggttaatcatcattgtggggtggcagtgtttaaggttcagagatggtgataaggaagaggggtgtgaattctctttcatgtcaagtgattgaacatcttacttgggcaatctaaggtggtaaaagctggagtcctaagaagtccatttacatcttggagaaagaggggtttgttatattcctgccttccgtgacataaaaaaggtaggcagactattctttccgcagttgtactattgcctgaagtgaggaaagtaataaaatagggtgtactgaatactgtctgattgacacagtgtttttctatataaaaactagtgataatctttaaataacgtaggactctagcctacacccttacctttccaaatgcatacagactatctcaatgcacaataacttactgataccggaagagagaaataatcaaatgtataaggggaaaattcaggatgaaataggaatacaggtcttaccaggtaatagaagacccatcccctaggagttccctgatttcatctcggcatctctgctgatgctcagggtactttgccaagcagtaaaggatccaggagatagcactggatgtggtgtcatgtcctgcaaacatgaacgttttcacttcagcctggagatctgcttcagagaaatctttggtgttttcgctctaaaaaatacagtgatgatctttatccaaagctggctatggattgttatctttttcaattgtagcaatgataatacaaaaagattaatgttgtaaaattcaaaattaatacaactaatttggcatatatttttctattttacttttttcaaaccttaacagaacaccaggcaatgtagaaagaaatgactcaacagaattcaactgggcagaataaattgagagtcctatggacgttcatattttatgatttattaattttacttaagggaataaactctaagaaaatgtttattatgtacaagaatgtttaataccatagtcaaaagaaggaaagaccgcaagtggccaaaaatagggaaaggtaaaataaattatggaccatccataaaatgggacactatgtagtaactaaaattatgtctttgaataacttcttaatgataaagggaaagctcatgatttattattaggtgaaaagagcagtattagaaatgtattacatatgaatatgtgagttaatagtaattttaaaatatacaagttgaatagacaaaatattgaaggaaaatagtagtattaccaaatgggattgcaggcagttttagttttctttagtgtctatttaattttgtttaacaattaatatgtactatttttccaccaacaacaggtaatccaagagccaaatcatgaatgaactaccattcacaactgccacaaaagaataaaatatgtaggaatacatctaacaggggaagtgaaggaccttttcgagaagaactacaaaccactgctcagagaaatctgggatgacacaaacaagtgggaaagcattccatgctcatggataggaagaatcaatatcatgaaaatggccatattgcccaaagcgatttatagattcaatgctgttcccattaaactactattgagattcttcatagaattagaaaaaacttttaaaattcatatggggctgggtgcagcggctcacgcttgtaatcccagcactttggaaggccgagttgggaggatcacttgagttcaggggttcaagaccagcctggccaacatggtgaaacccccatctccactgaaaatacaaaaattagctgggcatgatggttggcatctgtaatcccagctactcgggagactgagacatgagaatcacttgaacctgggaggtggaggttgcagtgagccaggagcacaccactgcactccagcctgggtgacagagagtcagtctcaaaaaaaaaaaaaaaaatcatatggaactgaaaaagagcctgaatagccaagacaatcctaagaaaacaaacaaacaaacaaacaaacaaaccaaagctggaggcctctccaaattataccacaagactacagtaactaaaaaagcatggtactggtacaagaacagacacagagaccaatggaacagaatagggaacccagaaataaaactgcacacctacaatcatctgatcttcagccaagtcaacaataacaagcaatggaaaaaggattccctatttaataaaccatgctgggagaactggctagtcatatggaaaaaatggaaacttctttacattatgtgcaaaaatcacctcaagatggattaaagacttaaatgtaaaacccaaaactataaaaaccccagacaaaaatctaggcaataccattcaggacataggcatgggcaaagacttcatgacaaagatgtcaaaagcaatagcatttgacccaacgatgccattactgggtatatacccaaaggaatacaaatcattctattataaagatacatgcacatgtatgttcactgcagcactattcacaatagcaaagacatggaatcaacttaaatgcccgtcaataatagatgggataaagaaaatgtggtacatatacaccatggaatactatgcagacataaaaaggaatgagatcatgtcgtttgcagggacatggatggagctagaagccattatcctcagaaaactaacacaggaacagaaaaccaaataccacatgttctcacttataagtgggagctgaatgatgagaacacatggacacgtggtgcgggaacaatacacctggggcctgttggagggtgggggctgggaggagggagagcatcaagaatagctaatgaggccaggcacagtggctcacgcctgtaatcctagcattttgggaggctgaggcgggcagatcatttgaggtcaggagtttgagaccagcctggccaatatggtgaaaccccgtctctattaaaaatacaaaaatattagccaggcatggtggcaatgcccgtagtccctgcaacttgggaggctgaggcaggagaatcgtttgaacctgggaggtggagtttgcagtgagccaagatcgcgccactgcactccagcctgggcgacagagtgaggctccattaaaaaaaaaaaaaaaaaaagaagagcaaatgaatgctgggcataatatctagatgatgggatgatctgtgcagcaaaccactatggcacatgtttacctatgtaacaaacctgcacatcctccacatgtacccctgaacttaagagttggaaatcaaaaagaaaaaaggtattaactcaaaataaaaacagtgtgtactatttttctaatcagcaaatgttattttattttttactattatttttagagtcgatatcttgctctgtcacacagtctggagtgcagtggcatgattagctttgaattcctgttcaagtgatcctcccacctcagtctccagagtagctagggctacaggcagtgctgccacacctggataatttttaaattttttatagagttggggtcttgctatgttgcccaggcttgtctcagactcctggccttaagtgatcctcctgcctctgtcttctgagtcgctggattacaggtatgagccaccatgctcagcagaaaattaaatttttttttaacaagtcattagttcctgggaattctatttcacttccaaatccacctcattttgcagtgccctgttcttagtagtcctggtttaggaagagtcgtgtttcacatgatcaaggtagccaacacaatgaaagttgagttcacagagtatttatttattttggtccctcacagagtatctatttatttttggtccctcacagagtatttgtttatttttgttccctcaaataattcagcacaattaaattcagcaaatatttattgaacacttggagatgatgatggaaaattatgttcacatggtgccatttggtacaacggaaatggcatgagatttggaccaaaccagaattgtcttaaatcctggctttgttagttttaggtatgtcatcttgagcagttcacttcactttttgagccacaatttctcttccttacataaagatatttataaataccccacaggttgttataataaaggttgaagatgcttggcacataagcaaaaattatgaataaatatgtattaaaatataaaataactacaaaataaaataaaaatattgtttttctcaccacatgtcagtatctttacacatataatctaattttatccttacaggattgctagcctggtgtgcaacaatagttgtcatatattgagtgactgttgattgccaagtccttcacttttctcatgaacatcacgtggacacctcatgagacagtcaccaagcactgtgctaatcactagggaaacaggaataaaatatgatcctagtcttctaggatggggtttttcaaactttaattgcaaatgaaacaccgagggatatgttgaaatgaagattctaacccactaggtctgaggtagggcctaagattctgcatttctaacaagctcccaggttttaccaatgctgctggtctatagaccacatgtcgaggaagaaggtttcagcagcttgtgggcttggaaaaagacagacaagtgcccagataattaaaatgtgacactggaggcatgagggaaagccctgggaggacaagcaggaaaatcttcacaagggaagttcaatatgtatcagttatcatataagtaagtttttctaatttatttatttgttattttaattttacttatttatttattttttgagacagagtcatgctctaccacctcctgggttcaaacgactctcccacctcagcctcccaagtagctgggactacaagcatgcaccaccatgcccagctaatttttgtgttttttgtagagaccaggtttcactatgttggccaggcttgtctcaaactcctgacctcaagtgatctgcccgccttggcctcccaaaatgctggattacaggtgctagtcactgtgcccggcctatttctttattatttaattattgagtcgaatgtgttcagaagtttagaagacttactttggcactcaaaagtatgtccagaaaatcccagcgccttttctgagtagtatcttgttttagcttatccttaagagactccttccggtcctggattactttctctagatggaaaaattatgatctttgttattatcaaggttactggaaagtcaatcaaagccaaatgtagttctgagaagctggtgctttatcggtagcccctggctgccccccacccaatgttcctgagttggtaagggacagtaccactagctgtctttttaaaaaaatcgtcccatcccaccttttagccacaatttctcttccttcaaataaggatgtttaaatgtatcacacagggttgttgtaaaggttggaggtgtttgacatatatgcttagaggtgcttggtacataaatttaattcaaaggttgtaaaatttgtttgtgatgtagggtactgttaccaatcgctgagcttaatttgtacaacctaggctttggttttaaagaaaaagatgagatgtcatatctcatggtagagactggtgctcaaattgagtggcagaggaatactgaaaatattccccttgagaactggaacaagacaaggaagcctactctcaccactcctatttaacatagtactgggaatgctagccacagcaatcaggcaagagaaagaaataaaaagcatccaaataggaaaataagaaatcaaactttctctctttgtagatgacaaagttctatgcctggaaaaccctgaagactctgccaaaaggctcctggaactgataaatgactagtggaaacagaaattctctccataacacacattgttggttctctgcagtacgttgtggctttccaacgtttcctttttgtgccttttctactggaaactaggctctaagctacttctgtgaacaggaaagttctgcctttagcagttaggagtaaaatgtcttccatagccaaattttagtctccatattgtcccatcagcatgaaaatagcccctcagttcctatgttcttttaagacatccaatctgtttcctactaaaatggtacttagtaaggggattctaagtttggaagttaaccggaaccatttttctaaggtaaatgctttagcatgggccataatagcaggcaatttggcacattgcctccattaaaggaggcttgcccaaaaatgacacagtctctcatattttggggagccgggcagattacacaggtttaggaagtgaaaagaggaatgacacaaggtggataagctaaggttgtgtgggtaaagcatcacttagttcatctggttccatagcttggaggaccacgccttcgaccataggtggcatatttaacagggtgctgggacccaagaaccagggagagaaaacagccagaaggatgctcccctgtcttgtccttcaccctgggtcatatggaaaggaaggagactaaaagaactctcacatctttttctagatgggtaacagattatcttcagcttgcacccctctggagtgcactctgaaacactggaacttctttaacctcaggacttcaaaaagaaaagcaactcattttcttttgcacaagtgcatggcatttttactaaacccttgcaaacatcgtaagatcaacccaactcttttaacaatcatatcaggcaggcccaaaaaagaatagttcccccaaattagagaagtaacctccagggaaaccatctgaggattccccttatttggggccccttcaagttcccttctcattataggaccttaggcaaataaatggagacttaggccagttttctaatgaccctgataggtatttagaggctttccaaaatttaactcaggtatttcacctgccatggagggatgttatgctgttcctaaaccagaccctcacagcagctaaaaatcaggcagctctgcaagcaacagaaaatgttggagatgagcaatatatctcctataatacaccaaaagggaagaaagcagatagggaaagtgaagaaatagcaaaaacaccattcccaattgggagagaggcaattctggtaaagacccctaattgcaaccccaataactcagaagataaatggaaaaggaagcactttttaatatgcattttagaaggcctatggaaaaccaggaccaaccctctcaattactctaaactgtctgtaagagaccagaagccagataagaattccgtagcctttacagaaaggctgagagaggctgtactagaaccccaatattagaaggaaagtacagaagcaagctataggaccagatagcaccttagagaacctcctgaatgtggccactttggtcttttataatagggaccagggggaggcccaaaagaagagaaaaagctcaggagaaggagagagacggtagcaacaactttgcaggcttgcaaagtccaggatccccaagttgcatccgctagtttctatcggtgtggcattttaagaaggagtgcccaggcagcaagacaaagccagcgtgaccctgtccagcctgtggcacagatcactggagatggaagtgcccccagaggtggaggtcactgggttcaggaccactctcacagatggtccagcaggactgatgggtcctgagactcaaatgccgactccagtggctcaaactgctattacagcacgggagccctgggtgattctggaaattaaaggaaggaaagcggacctccttctgaacattagagccagtctcctttctcccctttaactccaggcctcccctcttcccacagcaggaccggaaggggcatatcaggaaaaactctgatccaatatttttctcaaccttagttgcagttagaacttattgtttacacgtgtttccaaaccatcgtcataacagctctactagcaaaaaaaagcctccaggttaaccctaggaaataatttaactgtttacactccacatgatgtggcattatcactgtcctgtagggggagctcttagttaacaaacagccagtaaagcaagaagtacataaggcaggataagcagtagtcactctaaataatgtctctccccaggcacaagcacttaattgacggagctaatagctcttacaagagcacttgaattaagcaaggaaaggtagctaacatttatacctactccaagtatgctctcttagctctccatgctcatgctgccatttaaaaggaaaaccgccaatggacctcctataaaatatcaccacaaaattagcaggttattatcctcagtttttcttccatgagcaataggagggatgcattgtaggggacatcaaaagggaacaaataagatagccgaagaaaataggttagctgatcaggcagctaaatcaaaggcaaggaagcctcagggcatcaacatgcttcaagccccttctaatttaggaaggcgtcataagagaaattaaatcccagtattcccctgcagaaataaaataggccacttctcaagggcatacttttcagttctcaggatggttacagtcaggatggcaaactctatttgccagcctccagccaatggaaagtccttaaaatcctttgccaagcttttcacttggaaaaggacaaaaacttatcaatgtgctcagagattgtttcaggcaggaaacctctaaattggttaagcatgtaaactctctagctcacttccaatagacgataacacaactaacaagaacccaatcccaagaaatagaaacacctttatttaacccaggaaatttggtattggtgaaaactctcagctctttctccttccctaagtcaagctggaaaaggccctacactgttcttctttcaaccccctcagcagtaaaagttacaggaatcaactcctggatacatcacactcaagtcaaagcctgaagagctgagggagcaacccctgacagctcagaggaatgtctccatatcaatgtgaagaaacagaggatcttaagctgaaaatcatgaaagataagtaactgagtgacggctacttatcttactcagtccctctcctacctcaccagatacttttcactatttctaacctttcctctcaaagatcatcaccagatactaaaacctctttttaacgcatatttgcagggagattttaattattcgtagaatcgcatttgtaactttgtaaatccccaaagggaaatgttatgtaaacttttcaaaggaaattatttactatgccactcttgtgggaattgttatagtcatgctactatttgcaaaagaagtatacactgtagcacccacaatgtggaactctggttataaaattctaattgctgtaatatcttgcctaattattatccttataacaggattaataattgcaggaaagatttagtcaaggttgttttgcttatggcaggagtaatagttatggataagaaacaagtatgaaaattttactatcattaagtttaataggactttttactgaaggttcataatataatccactttaagctatgaagagaaggttataaagaagaagattttataaaagaaaggattttgtatggtaaatacttgtcctaaaaaagatgactggttgtttaaaggaagaatgtttaggacatgtcagaaattttaagtatgttgtaagagggtctatgaaagtcagaaaaaattaataattaaaggaaaggaattgtgagattaacactaaagttgttttagcatccaatatcatatttctcccaatcatattgcaagttataaaaatggcctaagcctgaacttattctctaagcaaacctaactgctgtgaaggggcattggacgacaattctttcttgctactgcctgctgaaaaggggcgttgtgtgggagaaaggcagttgggcctcctcctgaggttgatctaagggttctcaaaaaaatagcttgttcatgtgtggttctgcctgcagcactgtttggagtttgattgcttctaggtgaaaagagataaattttacaagaaggtttaaaatatagggttagaatatgagtattaagagtatcactgttaatggggataactataggccataacagagtttgatacctgttacaccaatggattgcaatattggtttgcgtccattaggtgtcgctgtgcattaccagaaacattaacataaaagtaacatttttcttaagaaaagcatacatttcccccttgacttgtcattagagaataacttccacaatgtggaattctggttgtaaaattctaattgctgtaatattttgcctaattattatccgtatcctgcacatcctgcacatatacctcggaacttaaaaaaaaattattaaaaaaacccatcacaacaatatttaaaaatatgagaagtagtaaatagaggttcaaatggtgtaagatccttgcattttcagggaagtatttaatgtaattacatatgttagattctaataaataaagactacatgttgtaatttctagcatacccatgaaaactaaacttatgatctaaaacagaaaaaataataatataaaatgatccagcaattaataaaagaagggataaaaatcggttaaatagaaaacaaatagttacacggcatgttgaaatccaaatattctagtgattacattaaatataagtggtttaaatgctctaaccaaagcacaaatattttcagactacataagcaaaatctaaataaatgctgcatatgagaaataaaccttggctgagcacagtggctcacgcctgtaatcctagcactttgggaggctgacgcaggcaaattgcttgagctcaggagttcgaaaccagcctgcacaaaatggtgaaaccctgcctctagtaaaaaaaaaatacaatatttagccgggtgtggtggcacacacctgtagtcccagctgcttggggggctgaggcaggaggatcacttgaacccaggaggttgaatctgcagtgagctgagatagtgccaccacactgcagcctgggtgataaggtgagaccctgtctcaaaacaaaacaaaaacaaaaaacaaaaaaaaattggagaatcaaatagacacatttgaagaatcaaatagacgaaaaaaaaatgataaagggatgtcaccaccaatcccacagaaatacaaactactatcagagaatactataaacgcctctaagcaaataaactagtaaatctagaagaaatggataaattactggacgcatacaccctcccaagactaaaccaggaagaagttgaatctctgaatagaccaataacaggctctgaaattgaggcaataattaatagcctaccaaccaaaaaaagtacaggaccagatggattcacagccaaattctaccagagggacaaggaggagctggtaccattccttctgaaactattccaatcgatagaaaaagagggaatcctccctaactcattttatgaggccagcatcatcctgataccaaagcctggcagagacacaacaaaaaaagagaattttagaccaatatccctgatgaacattgatgcaaaaatccttaataaaatactggcaaacggaatccagcagcacatcaaaaagcttatccaccatgatcaagtgggcttcatccctgggatgcaaggctggttcaacatacgcaaatcaatcaacgtaatccagcatataaagagaaccaaagacaaaaaccacatgattttcccaatagatgcagaaaaggcctttgacaaaattcaacagcccttcatgctaaaatctctcaataaattaggtattgatgggatgtatctcaaaataataagagctatttatgacaaacccacagctaatatcatactgaatgggcaaaacctggaagcattacatttgaaaactggcacaagacagggatgccctctctcaccactcctattcaatgtagtgttggaagttctggccagggcaatcaggcaagagaaagaaataaagggcattcaattagggaaagaggatgtcacattgtccctgtttgcagatgacgttattgtatatttagaaaaccccattgtgtcagcccaaaatctccttaagctgataagcaacttcagcaaagtctcaggatacaaaatcaatgtgcaaaaatcacaagcattcttatacaccaataacagacaaacagagagcaaatcatgagtgaactcccatttacaattgcttcaaagagaataaaatacctaggaatccaacttacaagggatgtgaaggacctcttcaaggagaactataaactactgctcaatgaaataaaagaggatacaaacaaatggaagaacattccatgctcatgggtaggaagaatcaatatcgtgaaaatggccatactgcccaaggtaatttatacattcaatgccatccccatcaagctaccaatgactttcttcacagaattggaaaaaaactactttaaagttcatatggaaccaaaaaagagccctcattgccaagtcaattgtaagccaaaagaacaaacctggaagcatcacactacctgacttcaaactatactacaaggctacagtaaccaaaacagcatgatactggtaccaaaacagagatatagaccaatggaacagaacagagccctcagaaataataccacacatgtacacccatctgatatttgacaaacctgacaaaaacatgaaatgaggaaaggattccctatttaataaatggtgctgggaaaactggctagccatatgtagaaagctgaaactggatcccttccttacaccttatacaaaaattaattcaagatggattaaagatttaaatgttagacataaaaccataaaaaccctagaagaaaacctaggcaataccattcaggacataggcatgggcaaggacttcatgtctaaaacaccaaaagcaatggcaacagaaaccaaaattgacaaatgggatcttattaaactaaagagcttctgcacagcaaaagaaactaccatcagagtgaacagacagcctacagatgggagaaaatttttgcaatctcctcatctgacaaagggctaatatccagaatctacaaagaactcaaacaaatttacaagaaaaaaacaaacaaccccatcaaaaagtgggcaaaggatatgaacagacacttctcaaaagaagacatttgtgcagccaacagacacatgaaaaaatgctcatcatcactggccatcagagaaatgcaaatcaaaaccacaatgagataccatctcacaccagttagaaaggcgatcattaaaaagtcaggaaacaacaggtgctggagaggatgtggagaaataggaacacttttacactgttggtgggactgtaaactagttcatccattgtggaagacagtgtggcgattcctcaaggatctagaagtagaaataccatttgacccagccatcccattactgggtatatacccaaaggattataaatcatgctgctataaagacacatgcacacgtgtgtttactgtggcacttttcacaatagcaaagacttggaaccaagccaaatgtccaacaatgatagactggattaagaaaatgtggcacatatacaccatggaatactatgcagccataaaaaaggatgagttcatgtcctttgtagggacatggatgaagctggaagccatcattctcagcaaactatcacaaggacaaaaaaccagacaccgcatgttctcactcataggtgggaattgaacaatgagaacacttggacacaggaaggggaacatcacacactggggcctgttgtggggtggggggaggggtgtgggatagcattaggagatatacctaaggtaaatgacaagttaatgggtgcaacacatcaatatggcacatgtatacatatgtaacaaacctgcacgttgtgcacatgtatcctagaacttaaagtataataataaaaaaaaggaaaagaaaaagaaaaaaagacataaaccgcaaatataagggcacagaaatggaaaaaaaagagtatggaataatatactatcaaaatactaaccaaaggaaagcagaggttatcatactagtagcagatagagtagatcttaagactagaagcattattagagaaaaagaggccaattttatcaagataaaatgataaatcagaaatatattccaattgtaaatggctattgtcataggtagatttatggtccctcaaagttatctatgtcctaagtccccaaaaacccatgcaaaaggaatactcagtggtgtgctgtgttgtttgatgaactgtgcatagtaggcagtacccactcatgttcagtacttgctcagatgtcctgctctgtcttcctacagaaatgtacttcctttcacttttacttttcttcacatctgaagctgctccataagaaatgaagcaaaatagacagatgttttgcttattgtattagttctaacaccaaacattaaaatacagctatatatagtcaataatataataccctctacatagcatttatgtagcacattcatttaagaggtacaaattagcatttctgaatgatgaccatgccatatgtccatagtagaagcagccataaccagagtcaatgtctcagacaatgagatgtctcatagtggactctggccatgtaaatcccaggactaacctgtgaactgatgaagttcttggttaaatttagaaaagatttggccttgagagctgaatttgaaaaccaggtcgttgtgatgtagaaaattgttcatgcgctggttggagattttgctaaggttgaacactgctttcaggtatgagtccagggtactggaatagggaagatggaacaacatgttagtgggtgacacagttattggcaaacaattaccttccttttgtcactgacctgtccaactggatgctgccctggtggctgaaggcacacttcatgatgctgtccagggtcatcagggagacatgttgaaagagctccagacgtgagttttgggcaatgtgttcctcccatttgttctggggcaggggatgaatatcatgatc

SEQ ID NO: 23902 - DNA, 4758 bp, Homo Sapiens
cgcggagaagcttgggtacctgagccgcggtcccgggtgacaccctcagtgacgccaggcgcgttccttcctcttcctctctcctctccggccccgccttcccttccctccgcccacctccctgaagcggagccgccgtcgccaccagcgccgtcatgtcggcccccgccgggtcctctcacccggccgccagcgcccggatcccgcccaagttcggcggatcggccgtctcaggagccgcagcgcccgcgggcccgggtgcgggcccggcgccgcaccagcagaacggtccagcccagaatcaaatgcaggttccatctggatatggattgcatcatcaaaactatattgctccctcaggacattactctcaaggacctgggaaaatgacctcattgccattggatacccagtgtggtgattactactctgctctctatacagtaccaacacaaaatgtgactcctaacacagtgaaccagcaaccaggagcacagcagttgtacagcaggggtcctcctgcccctcatattgtgggatccactctaggatctttccaaggtgctgcatcgtcagcatcccatttgcatacgagtgcctcccaaccatactcctcttttgtgaatcactacaatagtccagccatgtactctgccagctcttctgttgcgtctcagggatttccctctacttgtggtcattatgctatgtcaactgtttctaatgccgcgtatcctagtgtttcatatccctctctgcctgctggtgatacatatgggcaaatgtttacctcacagaatgctccgactgttaggccagttaaagataattcattctctggtcaaaatacagctatcagccatccatcgccacttccacctctaccatcacaacagcaccaccagcagcaaagtctttcaggatacagtactctaacgtggtcatctccaggccttccatcgactcaagacaatctcatccgaaaccacacaggatccctggctgtagcgaacaacaacccaaccattactgttgcagattctttatcctgtcctgttatgcaaaatgttcagcctcccaagtccagcccagtggtatccactgttttatcaggatcctcaggatcctcatcaacaagaacacctcccactgcaaatcacccagttgagcctgtgacctcagttacacagccatcagagctattacaacaaaaaggcgtgcagtatggtgaatatgttaataaccaagctagctccgcaccaactcccttgtcatcaacttccgatgatgaggaagaggaggaggaggatgaggaagcaggtgttgacagctcttctaccacaagcagtgcttctccaatgcccaacagttatgatgccctggaaggaggcagttacccagatatgctttcttcatcagcaagcagtcctgctcctgatcccgcccctgaacctgatcctgcttctgctccagctccagcttcagctccagctcctgtcgtccctcagccttcaaaaatggctaagcctttggctatggctatccaacacttcagcctggttatcagaatgctacagcaccacttatttctggagtacagccccagtaacccggtatattctggattccagcagtatcctcaacagtatcctggtgtgaaccagctatcctccagtataggaggattgagtcttcagagttctccacaaccagaaagcctgagacctgtaaaccttactcaggagaggaatattttacctatgactcctgtttgggctcctgtacctaacttgaatgcagacctcaaaaaattaaactgtagcccagattcatttcggtgtactttgacaaatattccacagacacaggctttactgaataaagctaagcttcctttaggattgttgttacatcccttcagagacctaacgcaattaccagtgataacatcaaataccattgtgaggtgccgatcctgtcgaacgtatattaacccctttgtatccttcattgatcaacgtagatggaaatgcaatttgtgctatagagtaaacgatgttcctgaagaatttatgtataacccccttacccgatcttatggagagcctcataaacgaccagaagttcagaattcaactgtggagttcattgcttcttcagattacatgctgcgtcctcctcaacctgcagtttacttgtttgttttagatgtgtctcataatgcagtggaagctggatatttgacaattttgtgccagtcactcctagaaaatctagacaagcttcctggagattcacgaacaagaataggattcatgacctttgatagcactattcatttctacaatttacaagaaggattatcacagcctcaaatgttgattgtgtctgatatagatgatgtttttctacctacaccggatagtttacttgtgaatctatatgaaagtaaagagcttataaaagacttactgaatgcattaccaaacatgttcaccaatacaagagaaacacacagtgcccttggtcctgcacttcaggctgcctttaaattaatgtctccaacaggtggccgtgtgtctgtatttcagacacagttaccttccttgggtgcaggacttctgcaatccagagaagatcctaatcagagatcaagtacaaaggtggtacaacatcttggccctgcaactgatttttataagaaacttgcattagattgctcgggacagcaaactgcagtggatttgttccttttaagttcacagtattctgatcttgcttctctagcttgcatgtccaagtattctgcagggtgcatctattattatccatcattccactatactcacaatccttcacaagcagaaaagttacaaaaagacctaaaacggtatctcacaagaaaaattgggtttgaagctgttatgagaataaggtgtactaaaggtctttcaatgcacacttttcacggtaacttctttgtccgttctactgatttgttatcccttgccaacatcaatcctgatgctggatttgcggtgcagttgtcaattgaagaaagtttaacagatacttccttagtatgttttcaaacagccctattatatacatcaagcaaaggtgagcggagaattagagtacatacactttgtttgccagtggtaagttcactagcagatgtatatgcgggagtggatgtacaagctgccatctgccttctggcaaacatggctgtggatcggtccgtttcatcaagtctgtcagatgcaagagatgccttagtgaatgctgtagtggactcattgtctgcatatggctcaactgtctcaaatttacagcactctgcattgatggcgcccagctccctcaagttgtttcctctctatgttttggcccttctcaaacagaaagcatttagaacgggtacaagcacacggctggatgatcgtgtatatgccatgtgtcagataaagtctcagccacttgttcatctaatgaaaatgattcatcccaacttatacaggatagacagattgacagatgagggtgcagtacatgttaatgacaggattgtaccacagccacctcttcaaaaattgtctgcagagaagctgacaagagaaggtgctttccttatggactgtggctctgttttttacatttgggttgggaaaggctgtgacaataacttcatagaggatgtgcttggatatactaattttgcatcaataccacagaaaatgacacatcttccagagctagatacactttcatcagaaagagccagatccttcataacttggcttagagacagcagaccattaagtccaatccttcacatagtaaaagatgagagtcctgccaaagcagaattttttcagcatttgattgaagaccggacagaggctgcattttcttactatgaatttttgcttcatgttcagcagcagatttgtaagtgaagtagaataaaattgaataagaaaaagatctataacctaggtaaagcataatctgtcagagaagcgcgtgagaaatttgaaatgaaggcatttgttaatacaagatgcaacgcacagcactctgtctgaggctttggtaaaaagtaaaggggaagaaagaacttgacagatctttttcaactcaaattaatggtaacgatgatgctgtttcaccaagtatattttgaattggtttctacacatttccagtagtatggcagtacagtgctctgttcattgcaagctggcaaatttatgtagctatgtggaatgatatgtcataatgtaaaattagataaattcttttttcttataattaatataacatttctggacttgaactctggcaagagatgccaaaaggcattggtaccgtgttatttgtttatatgaattactttttaacaaggaatgtttcttattcattaaatgaattcaacattttctctgtaaaaacaatagagtttcagtacatgaactatagaaaaaaatctatatataatgtacataaatgttacatttgtaaagaaaatgtaaaaatgtaactatagcatatgaattgcttaaactgtgctgcattgttggatgacaactctttttgtcacagttagagaatgaggttgactaatgcatattatgaattgagtccacaaaggaacacaaaactctttgtaattctgttaaatcttttatgtagatttatttatgatcagcctactaattaaaactatttcgcttgacaaaaaaaaaaaaaaaa

SEQ ID NO: 23903 - DNA, 3109 bp, Homo Sapiens
cattggacttcagcatgactactcagttgccagcttacgtggcaattttgcttttctatgtctcaagagccagctgccaggacactttcattgcagctgtttatgagcatgcagcgatattgcccaatgccaccctaacaccagtgtctcgtgaggaggctttggcattaatgaatcggaatctggacattttggaaggagcgatcacatcagcagcagatcagggtgcgcatattattgtgactccagaagatgctatttatggctggaacttcaacagggactctctctacccatatttggaggacatcccagaccctgaagtaaactggatcccctgtaataatcgtaacagatttggccagaccccagtacaagaaagactcagctgcctggccaagaacaactctatctatgttgtggcaaatattggggacaagaagccatgcgataccagtgatcctcagtgtccccctgatggccgttaccaatacaacactgatgtggtatttgattctcaaggaaaactggtggcacgctaccataagcaaaaccttttcatgggtgaaaatcaattcaatgtacccaaggagcctgagattgtgactttcaataccacctttggaagttttggcattttcacatgctttgatatactcttccatgatcctgctgttaccttggtgaaagatttccacgtggacaccatagtattcccaacagcttggatgaatgttttgccacatttgtcagctgttgaattccactcagcttgggctatgggcatgagggtcaatttccttgcatccaacatacattacccctcaaagaaaatgacaggaagtggcatctatgcacccaattcttcaagagcatttcattatgatatgaagacagaagagggaaaactcctcctctcgcaactggattcccacccatcccattctgcagtggtgaactggacttcctatgccagcagtatagaagcgctctcatcaggaaacaaggaatttaaaggcactgtctttttcgatgaattcacttttgtgaagctcacaggagttgcaggaaattatacagtttgtcagaaagatctctgctgtcatttaagctacaaaatgtctgagaacataccaaatgaagtgtacgctctaggggcatttgacggactgcacactgtggaagggcgctattatctacagatttgtaccctgttgaaatgtaaaacgactaatttaaacacttgcggtgactcagctgaaacagcttctaccaggtttgaaatgttctccctcagtggcactttcggaacccagtatgtctttcctgaggtgttgctgagtgaaaatcagcttgcacctggagaatttcaggtgtcaactgacggacgcttgtttagtctgaagccaacatccggacctgtcttaacagtaactctgtttgggaggttgtatgagaaggactgggcatcaaatgcttcatcaggcctcacagcacaagcaagaataataatgctaatagttatagcacctattgtatgctcattaagttggtagaatattgactttttctcttttttatttgggataatttaaaaaatgatggatgagaaaagaaagattggtccgggttaatattatcctctagtataagtgaattactagtttctctttatttagacaaacacacacacaccagataatataaacttaataaattatctgttaatgtagattttatttaaaaaactatatttgaacattggtctttcttggacgtgagctaattatatcaaataagtatcacaaatcttttacgcagaagaaataaaaactacgggtagaaaacataagaactatcataaaatttacttacaaggaggctgctcttgttaccacttttattatattacgtatcacttattcagctctgctgaaaatttccaatgactttgtttgtttgctcttttagttttttacctaaacaatacattttgattctcttgtgggttgataatgtctccccaaaatttacatgttgaagcacctcagaatgtgactgtatttggagacagggtctttaaagaggtaaaataaggtcattaggatagaccctaattcaatatgactgatgatcataaaagaagaggcgagtagggcacaacaggcacaaagggagaccataaggagacacagaggaaggacaactctttacaagctaagaagagagggcctcagaagaaaccaaccctgccaacaccttgatcttggacttccagcctccaaaactatgagaaataaatttctattgtttaagtcacccagtccatggtactttgttaggcagccctggcaaatgaatcaaagacccattcctgttcctctccccaccactactgttttctactgtaatctgaagcttcaacaaaaggcttacctggtaagaatattcagctggtctgggtcctcaagactccaatagacactcttaaagaaggattgctgatggattgatagtgaaaccattagatcattgaattcctctggaattagaaaaccagagagtcccattttaagaaattagatatttaatatagcattgtgtgttctattttagtaacagcagaatctcttgacattacacaactcagtgaaacaacatcatttaagccaaaatatctcccaactgactgatagactctgagcactaatatcatagtgctgtgatgatggacaattacatagtaccgataacagccatgcactgtgcaaagcatgcccttctgcacaggagagcaaggcacttgcagtagtgatctatgccagcaaaacatcattttgagacaaacatttttgtggcagatgtttttcctaaaaagtactatatcatccaagaaatatttgagtaaaatcccttgttcttttgggtgacattaactgacatttgctttttttcaagacctaatagaaaataagaaagcccataatgtatttagaaacaggaatcctcagagcaattctctgtattctcatataatttcaatgtaaaacagaaaacatattgatgtgttggtgataggcttgaattattaaaaacttcaaaaacaaaa

SEQ ID NO: 23904 - DNA, 6200 bp, Homo Sapiens
ggcaccaggctggtttcatcctaaggctggatcttttcatgggtctgtgtagtgtaattgcagcagcaaatgggactaataatttcatgagtcatctttagagggaaagaaagacaactgcttctcttcaaccatcaaatgaaagtcctaaattttttgctgttggatgagcatgaaccaattcctctggccagggtaagctgtgctagaacaaaaatgcaatgaaagaaacactggatgaatgaaaagccctgctttgcaacccctcagcatggcaggcctgcagctcatgacccctgcttcctcaccaatgggtcctttctttggactgccatggcaacaagaagcaattcatgataacatttatacgccaagaaaatatcaggttgaactgcttgaagcagctctggatcataataccatcgtctgtttaaacactggctcagggaagacatttattgcagtactactcactaaagagctgtcctatcagatcaggggagacttcagcagaaatggaaaaaggacggtgttcttggtcaactctgcaaaccaggttgctcaacaagtgtcagctgtcagaactcattcagatctcaaggttggggaatactcaaacctagaagtaaatgcatcttggacaaaagagagatggaaccaagagtttactaagcaccaggttctcattatgacttgctatgtcgccttgaatgttttgaaaaatggttacttatcactgtcagacattaaccttttggtgtttgatgagtgtcatcttgcaatcctagaccacccctatcgagaaattatgaagctctgtgaaaattgtccatcatgtcctcgcattttgggactaactgcttccattttaaatgggaaatgtgatccagaggaattggaagaaaagattcagaaactagagaaaattcttaagagtaatgctgaaactgcaactgacctggtggtcttagacaggtatacttctcagccatgtgagattgtggtggattgtggaccatttactgacagaagtgggctttatgaaagactgctgatggaattagaagaagcacttaattttatcaatgattgtaatatatctgtacattcaaaagaaagagattctactttaatttcgaaacagatactatcagactgtcgtgccgtattggtagttctgggaccctggtgtgcagataaagtagctggaatgatggtaagagaactacagaaatacatcaaacatgagcaagaggagctgcacaggaaatttttattgtttacagacactttcctaaggaaaatacatgcactatgtgaagagcacttctcacctgcctcacttgacctgaaatttgtaactcctaaagtaatcaaactgctcgaaatcttacgcaaatataaaccatatgagcgacagcagtttgaaagcgttgagtggtataataatagaaatcaggataattatgtgtcatggagtgattctgaggatgatgatgaggatgaagaaattgaagaaaaagagaagccagagacaaattttccttctccttttaccaacattttgtgcggaattatttttgtggaaagaagatacacagcagttgtcttaaacagattgataaaggaagctggcaaacaagatccagagctggcttatatcagtagcaatttcataactggacatggcattgggaagaatcagcctcgcaacaaacagatggaagcagaattcagaaaacaggaagaggtacttaggaaatttcgagcacatgagaccaacctgcttattgcaacaagtattgtagaagagggtgttgatataccaaaatgcaacttggtggttcgttttgatttgcccacagaatatcgatcctatgttcaatctaaaggaagagcaagggcacccatctctaattatataatgttagcggatacagacaaaataaaaagttttgaagaagaccttaaaacctacaaagctattgaaaagatcttgagaaacaagtgttccaagtcggttgatactggtgagactgacattgatcctgtcatggatgatgatgacgttttcccaccatatgtgttgaggcctgacgatggtggtccacgagtcacaatcaacacggccattggacacatcaatagatactgtgctagattaccaagtgatccgtttactcatctagctcctaaatgcagaacccgagagttgcctgatggtacattttattcaactctttatctgccaattaactcacctcttcgagcctccattgttggtccaccaatgagctgtgtacgattggctgaaagagttgtagctctcatttgctgtgagaaactgcacaaaattggcgaactggatgaccatttgatgccagttgggaaagagactgttaaatatgaagaggagcttgatttgcatgatgaagaagagaccagtgttccaggaagaccaggttccacgaaacgaaggcagtgctacccaaaagcaattccagagtgtttgagggatagttatcccagacctgatcagccctgttacctgtatgtgataggaatggttttaactacacctttacctgatgaactcaactttagaaggcggaagctctatcctcctgaagataccacaagatgctttggaatactgacggccaaacccatacctcagattccacactttcctgtgtacacacgctctggagaggttaccatatccattgagttgaagaagtctggtttcatgttgtctctacaaatgcttgagttgattacaagacttcaccagtatatattctcacatattcttcggcttgaaaaacctgcactagaatttaaacctacagacgctgattcagcatactgtgttctacctcttaatgttgttaatgactccagcactttggatattgactttaaattcatggaagatattgagaagtctgaagctcgcataggcattcccagtacaaagtatacaaaagaaacaccctttgtttttaaattagaagattaccaagatgccgttatcattccaagatatcgcaattttgatcagcctcatcgattttatgtagctgatgtgtacactgatcttaccccactcagtaaatttccttcccctgagtatgaaacttttgcagaatattataaaacaaagtacaaccttgacctaaccaatctcaaccagccactgctggatgtggaccacacatcttcaagacttaatcttttgacacctcgacatttgaatcagaaggggaaagcgcttcctttaagcagtgctgagaagaggaaagccaaatgggaaagtctgcagaataaacagatactggttccagaactctgtgctatacatccaattccagcatcactgtggagaaaagctgtttgtctccccagcatactttatcgccttcactgccttttgactgcagaggagctaagagcccagactgccagcgatgctggcgtgggagtcagatcacttcctgcggattttagataccctaacttagacttcgggtggaaaaaatctattgacagcaaatctttcatctcaatttctaactcctcttcagctgaaaatgataattactgtaagcacagcacaattgtccctgaaaatgctgcacatcaaggtgctaatagaacctcctctctagaaaatcatgaccaaatgtctgtgaactgcagaacgttgctcagcgagtcccctggtaagctccacgttgaagtttcagcagatcttacagcaattaatggtctttcttacaatcaaaatctcgccaatggcagttatgatttagctaacagagacttttgccaaggaaatcagctaaattactacaagcaggaaatacccgtgcaaccaactacctcatattccattcagaatttatacagttacgagaaccagccccagcccagcgatgaatgtactctcctgagtaataaataccttgatggaaatgctaacaaatctacctcagatggaagtcctgtgatggccgtaatgcctggtacgacagacactattcaagtgctcaagggcaggatggattctgagcagagcccttctattgggtactcctcaaggactcttggccccaatcctggacttattcttcaggctttgactctgtcaaacgctagtgatggatttaacctggagcggcttgaaatgcttggcgactcctttttaaagcatgccatcaccacatatctattttgcacttaccctgatgcgcatgagggccgcctttcatatatgagaagcaaaaaggtcagcaactgtaatctgtatcgccttggaaaaaagaagggactacccagccgcatggtggtgtcaatatttgatccccctgtgaattggcttcctcctggttatgtagtaaatcaagacaaaagcaacacagataaatgggaaaaagatgaaatgacaaaagactgcatgctggcgaatggcaaactggatgaggattacgaggaggaggatgaggaggaggagagcctgatgtggagggctccgaaggaagaggctgactatgaagatgatttcctggagtatgatcaggaacatatcagatttatagataatatgttaatggggtcaggagcttttgtaaagaaaatctctctttctcctttttcaaccactgattctgcatatgaatggaaaatgcccaaaaaatcctccttaggtagtatgccattttcatcagattttgaggattttgactacagctcttgggatgcaatgtgctatctggatcctagcaaagctgttgaagaagatgactttgtggtggggttctggaatccatcagaagaaaactgtggtgttgacacgggaaagcagtccatttcttacgacttgcacactgagcagtgtattgctgacaaaagcatagcggactgtgtggaagccctgctgggctgctatttaaccagctgtggggagagggctgctcagcttttcctctgttcactggggctgaaggtgctcccggtaattaaaaggactgatcgggaaaaggccctgtgccctactcgggagaatttcaacagccaacaaaagaacctttcagtgagctgtgctgctgcttctgtggccagttcacgctcttctgtattgaaagactcggaatatggttgtttgaagattccaccaagatgtatgtttgatcatccagatgcagataaaacactgaatcaccttatatcggggtttgaaaattttgaaaagaaaatcaactacagattcaagaataaggcttaccttctccaggcttttacacatgcctcctaccactacaatactatcactgattgttaccagcgcttagaattcctgggagatgcgattttggactacctcataaccaagcacctttatgaagacccgcggcagcactccccgggggtcctgacagacctgcggtctgccctggtcaacaacaccatctttgcatcgctggctgtaaagtacgactaccacaagtacttcaaagctgtctctcctgagctcttccatgtcattgatgactttgtgcagtttcagcttgagaagaatgaaatgcaaggaatggattctgagcttaggagatctgaggaggatgaagagaaagaagaggatattgaagttccaaaggccatgggggatatttttgagtcgcttgctggtgccatttacatggatagtgggatgtcactggagacagtctggcaggtgtactatcccatgatgcggccactaatagaaaagttttctgcaaatgtaccccgttcccctgtgcgagaattgcttgaaatggaaccagaaactgccaaatttagcccggctgagagaacttacgacgggaaggtcagagtcactgtggaagtagtaggaaaggggaaatttaaaggtgttggtcgaagttacaggattgccaaatctgcagcagcaagaagagccctccgaagcctcaaagctaatcaacctcaggttcccaatagctgaaaccgctttttaaaattcaaaacaagaaacaaaacaaaaaaaattaaggggaaaattatttaaatcggaaaggaagacttaaagttgatagtgagtggaatgaattgaaggcagaatttaaagtttggttgataacaggatagataacagaataaaacatttaacatatgtaaaaaaaaaaaaaaaaaaa

SEQ ID NO: 23905 - DNA, 1337 bp, Homo Sapiens
tttccagtccagggccgctgagagtgggggtggctgggagcagcgcagcctccggaggaggaggcggaggccgaggaccaggaatcaccttcaagcctatgtcgtgaggctttggcagaaattaagaaggaaatatctccattgttcattggcatggaaaaatgttcagtgggaggattagagttgactgaacagactcctgctttattagggaatatggccatggcaactagtctcatggacataggggattcatttggtcatccagcttgtcctttagtcagtagatctaggaactcaccagtggaagatgatgatgatgatgatgatgttgtgtttattgaatctatacaacctccttcaatttctgctccagcaatagctgatcaaagaaacttcatatttgcatcatcaaaaaatgaaaagcctcaaggaaattattctgtaattcctccttcttcaagagatttggcatctcagaaaggaaatataagtgagacaattgttattgatgatgaagaggacatagaaacaaatggaggagcagagaaaaagtcttcctgttttatcgaatggggacttcctggaactaaaaacaaaaccaacgatttggatttctccacttccagtctttcaagaagtaaggtaaatgcaggaatgggtaatagtggtatcactacagaattgactctgaaatacattattactaatgttacaaccttagaaacaggtataagctctgtgaatgctgggcaagatgtgaacataattattacatataaaacatcactatagaataccaacttgggagatgtcgctaaaggacttcagtcaagtaattttggtgttaatatacaaacgtacaccccatctttaactccacagaccaagactggagtaagaccttttaaccctggtagaatgaatgtggcaggagacttatttcagaatggagaatttgcaactcatcatagtcctgaagatgcatctacaaagaaggctaatgtcattcttccagtagaatcaagcaaatccttccaagaattttatagtacatcttgtttgtctccctgtgaaaacaactggaatcttaaaaaaggagtttttaataagtcaagatgtacaatttgtagtaaattagcagaggtctggatttttatacctaagttgttgtttaggctaacagtgataattttaacttttaagtgctattatgtactctttcatctacataatgcacgtgttctggatgtataacatgaagctgaaaggaagaataaggatatgttagaactatcttatgggatattttataaataaaattccatttgcatagc

SEQ ID NO: 23906 - DNA, 3656 bp, Homo Sapiens
ggcacgaggccgctccccggcgggctggctcctggccccggaagcgcgagcgttcacttagcggcgagtggctccgtctccgcggacagagcgcgcgccccctggcccggcccgcgaggggctcccggcgcggtccccgagcatttcccgccgggtggagcgggccgagcccggcaggatgaccagccccgcggccgctcaaagccgggagatcgactgtttgagcccggaagcgcagaagctggcggaagcccggctcgctgcaaaacgggcggcccgcgcggaggctcgcgagatccgcatgaaggagctggagcggcagcagaaggaggaagacagtgagcgctactctcgtagatccagaagaaacacatcggcttctgatgaagacgagcgcatgtcagtgggtagtcgtggaagcctgagggtagaagagagaccagaaaaagattttactgagaaggggtctcgtaacatgccgggcctgtctgcagccacgctggcctctctgggtgggacttcctctcggagaggcagcggagacacctccttctccatcgacaccgaggcatccatcagggaaatcaaggactctctagcagaagttgaagagaaatataagaaggctatggtttccaatgctcagctagacaatgaaaagacaaacttcatgtaccaggttgataccctaaaagatatgttgctggagcttgaagaacagctggctgaatctaggcggcagtacgaagagaaaaacaaagaatttgaaagggaaaaacacgcccacagtatactgcaatttcagtttgctgaagtcaaggaggccctgaagcaaagagaggaaatgctcgagaaacatggaataatcctaaattcagaaatagctaccaatggagagacttccgacaccctcaataatgttggataccaaggtcctaccaagatgacaaaagaagagttaaatgccctcaagtctacaggggatgggaccctaggaagagccagtgaagtggaggtgaaaaatgaaatcgtggcgaatgtggggaaaagagaaatcttgcacaatactgagaaagaacaacacacagaggacacagtgaaggactgtgtggacatagaggtattccctgctggtgagaataccgaggaccagaaatcctctgaagacactgccccattcctaggaaccttagcaggtgctacctatgaagaacaggttcaaagccaaattcttgagagcagttctctccctgaaaacacagtacaggttgagtcaaatgaggtcatgggtgcaccagatgacaggaccagaactccccttgagccatccaactgttggagtgacttagatggtgggaaccacacagagaatgtgggagaggcagcagtgactcaggttgaagagcaggcaggcacagtggcctcgtgtcctttagggcatagtgatgacacagtttatcatgatgacaaatgtatggtagaggtcccccaagagttagagacaagcacagggcatagtttagagaaagaattcaccaaccaggaagcagctgagcccaaggaggttccagcgcacagtacagaagtaggtagggatcacaacgaagaagagggtgaagaaacaggattaagggacgagaaaccaatcaagacagaagttcctggttctccagcaggaactgagggcaactgtcaggaagcgacaggtccaagtacagtagacactcaaaatgaacccttagatatgaaagagcccgatgaagaaaagagtgaccaacagggagaggcattggactcatcgcagaagaagacaaagaacaagaaaaagaaaaacaagaagaaaaaatccccagtacccgtagaaacccttaaagatgttaaaaaagagttaacgtatcagaacacagatttaagtgaaattaaggaagaagagcaggtaaagtctactgacagaaagtcagcagtggaagcccaaaacgaggtgactgaaaatccaaaacagaaaattgcagcagaaagcagtgaaaatgttgattgtccggagaatcctaaaattaagttggatggaaaacttgaccaagaaggtgatgatgtacaaacagcagctgaggaggtactagctgatggagacacattagattttgaggatgacaccgttcaatcatcaggcccgagggctggtggtgaagaattagatgaaggtgttgcaaaagataatgctaaaatagatggtgccactcaaagcagtcctgcagaaccaaagagcgaagacgcagatcgctgcaccctgcccgaacatgaaagtccctcacaggacattagtgatgcctgtgaagcagaaagtacagagaggtgtgagatgtcagaacatccaagtcagaccgtcaggaaagctttagacagcaatagcctagagaacgatgacttgtcggcaccaggaagagagccagggcacttcaatccagaaagcagagaagataccagaggagggaatgagaagggcaaaagcaaagaagactgtaccatgtcctaagctgaggcaggcggcaggcgcggtgcacaggaagtctcagtgtgaaggggtcttttctctccactgccaatgtaagtagaatgttctaaattcatagagaggcactgtatgacaattaccaggtgctctactgctttaagttatagactgttacttgtagatttccatgtaatcattgaggttatcacccagattagaaagacatatttgttatcagtgtacgttctaattgagagcattccagtagtatcaaacaataatgtctactgtttatagtccacttaataaaaatagaggcatttactatttgccttaggctgataggaatgtgggttttcttgaccaaatatatcagcatctaattgaaatgaccaaatagcattcttagacttctgtattatgaatataattgatatttaaattaatgtcttgttcacatatgtgtactttcatatttgattttaaaatgtacattataacctgtatggtattttatttaaaggagataaacagccaaatagcaaataggtcactgaatgataagatttgcaccttagaacaataatcattttaaggataacaagtaaatgtctgaaagcatgaggggctttatttgcctttacctcatatgagtctttgatcttgaaccgatacttttggatctcattgttgatatacctgaatttactttgtaagagattttaacttcacttcatgctgatgatgtatcaaattcattttatagaaagatttaaagtttttttctggaagtgatatatgtcaaattacatttcctactgcagtatttgagcagggacagtcattttttaaatgtttttggccgggcgtggtggctcatgcctgtaatctcagtacattgggaggccaaggcaggtggatcacctgaggtcaagagttcgaggccagcctggccaacatggtgaaaccctgtctctactaaaaatacaaaaaattggccgggcgtgatggtgggcgcctgtaatcccagccactccagaggctgaggcaggagaatcgcttgaacctgcgaggcagagattgcagtgagccaagatcaagccattgtactccagcctggacaacaagagcgaaactctgtcta

SEQ ID NO: 23907 - DNA, 938 bp, Homo Sapiens
ggagatgcaggagttcacccgtagcttcttccgaggccgcccggacctcagcacgcttacgcattccatcgtgcggcggaggtacttagctcactcgggccgcagccacctggagcccgaggagaagcaggcactgaagcggctggtggaggaggagccgctgaagatgcaggtggatgaagccgcttccagggaagacaaactggaccttaccaagaagggcaagaggcctcccaccccttgtagcgacccggagagaaaaaggttccgcttcaattcagagtcggctggctcaggtcgccgtggagaggaccacccggctgtgatgaggctgaagcgctacattcgggcctgtggtgcccatcgaaactacaagaagctgttgggctcctgttgctcacacaaagagcgcctgagtatcctccgggcagaactggaagcgctaggcatgaagggtaccccttccctagggaagtgtcgggccctgaaggagcagagggaggaggcagctgaggtggcctccttggatgttgcgaacatcatcagtggctcgggccggccacgcagacgtacagcctggaaccctttaggagaagcagcacccccaggggagctgtaccgacggaccctggactcagatgaagagcggccccgtcccgcacccccagactggtcacatatgcgtggcatcatcagcagtgatggcgagagtaactgagctctgccacccccaggagggacccttgatacatgtacaaagcatacatagcaccccttgccctgtgtctgtggaacagaagcagcttccttcagagaagactgcagctcccaaggacacaagctgttgggatgctacttctcagcttcacgctgtccctttaaggtgtttattttttaagactcaataaaggagtgtttttaatcacctcaaaaaaaaa

SEQ ID NO: 23908 - DNA, 1760 bp, Homo Sapiens
cgaggagaagcaggcactgaagcggctggtggaggaggagccgctgaagatgcaggtggatgaagccgcttccagggaagacaaactggaccttaccaagaagggcaagaggcctcccaccccttgtagcgacccggagagaaaaaggttccgcttcaattcagagtcggagtccggctctgaagcctccagcccagactactttggacccccagcaaagaatggggtggcagcagaagtcagcccagccaaagaggagaatccaaggcgagcctcaaaggcagttgaggagagcagtgatgaggaacggcagagggacctgcccgcacagaggggagaggagagcagtgaggaggaggaaaaggggtacaaggggaagactaggaagaaacctgtggtaaagaagcaggcaccaggcaaggcctcagtcagtaggaagcaggccagggaagaaagtgaggagagcgaggcagaacccgttcagaggacagcaaagaaggtggagggaaataaaggaactaaaagcctgaaggaaagtgaacaggagagtgaagaggagatcctagcccagaagaaagagcagagagaggaggaagtggaggaggaagagaaagaagaggatgaggaaaagggggattggaaacccagaaccaggagcaatggccggagaaagtcagctagggaggagaggagctgtaagcagaaaagccaggcaaagaggctcttgggagactcagacagcgaggaagagcagaaagaggcagccagcagtggggatgacagtgggagagatagagaacccccagtgcagaggaagagtgaggacaggacccagcttaagggtgggaagaggttgagtggaagcagcgaggacgaggaagacagtgggaagggggaacccacagctaaaggctctagaaagatggccagactgggcagcaccagtggtgaggaaagtgacttggagagggaggtaagtgacagcgaggcagggggaggcccccagggggagaggaagaaccgctcttccaagaagagctccaggaaaggcaggacacgaagctcctcttcctcctcagatggaagtccagaggccaaaggagggaaggctggctcaggtcgccgtggagaggaccacccggctgtgatgaggctgaagcgctacattcgggcctgtggtgcccatcgaaactacaagaagctgttgggctcctgttgctcacacaaagagcgcctgagtatcctccgggcagaactggaagcgctaggcatgaagggtaccccttccctagggaagtgtcgggccctgaaggagcagagggaggaggcagctgaggtggcctccttggatgttgcgaacatcatcagtggctcgggccggccacgcagacgtacagcctggaaccctttaggagaagcagcacccccaggggagctgtaccgacggaccctggactcagatgaagagcggccccgtcccgcacccccagactggtcacatatgcgtggcatcatcagcagtgatggcgagagtaactgagctctgccacccccaggagggacccttgatacatgtacaaagcatacatagcaccccttgccctgtgtctgtggaacagaagcagcttccttcagagaagactgcagctcccaaggacacaagctgttgggatgctacttctcagcttcacgctgtccctttaaggtgtttattttttaagactcaataaaggagtgtttttaatcacctcaaaaaaaaa

SEQ ID NO: 23909 - DNA, 907 bp, Homo Sapiens
cttttcttaagggaaaaatcacgctgtgttcttttaaaatccctcaggttttatgttttattgctaccagagtctgcctccctgaggttcttgtatagactagttatttccctctgtaaagaagctgttctattcgttctcgcctggtttggaacaaactgaacacttccaaaggaggcagtccttgcagccttgtctccttccactcccctcctccccacagtcctggctggagcagcgagtctgtcgatcccaggccagagacaaggcagacaaaggttcatttgtaaagaagctccttccagcacctcctctcttctccttttgcccaaactcacccagtgagtgtgagcatttaagaagcatcctctgccaagaccaaaaggaaagaagaaaaagggccaaaagccaaaatgaaactgatggtacttgttttcaccattgggctaactttgctgctaggagttcaagccatgcctgcaaatcgcctctcttgctacagaaagatactaaaagatcacaactgtcacaaccttccggaaggagtagctgacctgacacagattgatgtcaatgtccaggatcatttctgggatgggaagggatgtgagatgatctgttactgcaacttcagcgaattgctctgctgcccaaaagacgttttctttggaccaaagatctctttcgtgattccttgcaacaatcaatgagaatcttcatgtattctggagaacaccattcctgatttcccacaaactgcactacatcagtataactgcatttctagtttctatatagtgcaatagagcatagattctataaattcttacttgtctaagacaagtaaatctgtgttaaacaagtagtaataaaagttaattcaatctaatttttctctgtggaaaaa

SEQ ID NO: 23910 - DNA, 2478 bp, Homo Sapiens
ggcccacggagcccaccatgccgcgcccggcccccgcgcgccgcctcccgggactcctcctgctgctctggccgctgctgctgctgccctccgccgcccccgaccccgtggcccgcccgggcttccggaggctggagacccgaggtcccgggggcagccctggacgccgcccctctcctgcggctcccgacggcgcgcccgcttccgggaccagcgagcctggccgcgcccgcggtgcaggtgtttgcaagagcagacccttggacctggtgtttatcattgatagttctcgtagcgtacggcccctggaattcaccaaagtgaaaacttttgtctcccggataatcgacactctggacattgggccagccgacacgcgggtggcagtggtgaactatgctagcactgtgaagatcgagttccaactccaggcctacacagataagcagtccctgaagcaggctgtgggtcgaatcacacccttgtcaacaggcaccatgtcaggcctagccatccagacagcaatggacgaagccttcacagtggaggcaggggctcgagagccctcttctaacatccctaaggtggccatcattgttacagatgggaggccccaggaccaggtgaatgaagtggcggctcgggcccaagcatctggtattgagctctatgctgtgggcgtggaccgggcagacatggcgtccctcaagatgatggccagtgagcccctagaggagcatgttttctacgtggagacctatggggtcattgagaaactttcctctagattccaggaaaccttctgtgcgctggacccctgtgtgcttggaacacaccagtgccagcacgtctgcatcagtgatggggaaggcaagcaccactgtgagtgtagccaaggatacaccttgaatgccgacaagaaaacgtgttcagctcttgataggtgtgctcttaacacccacggatgtgagcacatctgtgtgaatgacagaagtggctcttatcattgtgagtgctatgaaggttataccttgaatgaagacaggaaaacttgttcagctcaagataaatgtgctttgggtacccatgggtgtcagcacatttgtgtgaatgacagaacagggtcccatcattgtgaatgctatgagggctacactctgaatgcagataaaaaaacatgttcagtccgtgacaagtgtgccctaggctctcatggttgccagcacatttgtgtgagtgatggggccgcatcctaccactgtgattgctatcctggctacaccttaaatgaggacaagaaaacatgttcagccactgaggaagcacgaagacttgtttccactgaagatgcttgtggatgtgaagctacactggcattccaggacaaggtcagctcgtatcttcaaagactgaacactaaacttgatgacattttggagaagttgaaaataaatgaatatggacaaatacatcgttaaattgctccaatttctcacctgaaaatgtggacagcttggtgtacttaatactcatgcattcttttgcacacctgttattgccaatgttcctgctaataatttgccattatctgtattaatgcttgaatattactggataaattgtatgaagatcttctgcagaatcagcatgatttttccaaggaaatacatatgcagatacttattaagagcaaactttagtgtctctaagttatgactgtgaaatgattggtaggaaatagaatgaaaagtttagtgtttctttatctactaattgagccatttaatttttaaatgtttatattagataaccatattcacaatggaaactttaggtctagtttcttttgatagtatttataatataaatcaatcttattactgagagtgcaaattgtacaaggtatttacacatacaacttcatataactgagatgaatgtaattttgaactgtttaacactttttgttttttgcttattttgttggagtattattgaagatgtgatcaatagattgtaatacacatatctaaaaatagttaacacagatcaagtgaacattacattgccatttttaattcattctggtctttgaaagaaatgtactactaaagagcactagttgtgaatttagggtgttaaactttttaccaagtacaaaaatcccaaattcactttattattttgcttcaggatccaagtgacaaagttatatatttataaaattgctataaatcgacaaaatctaatgttgtctttttaatgttagtgatccacctgcctcagcctcccaaagtgctgggattacaggcttgaaagtctaacttttttttacttatatatttgatacatataattcttttggctttgaaacttgcaactttgagaacaaaacagtcctttaaattttgcactgctcaattctgtttttcgtttgcattgtctttaatataataaaagttattacctttacatatt

SEQ ID NO: 23911 - DNA, 4863 bp, Homo Sapiens
ctcacttccgcccaggtgaggcagggccgacaccgagcccgcccgacccgggctcccacctgctcctccagcgcaccaggtgtctttaagagtgattgaagagaataattcaaaatgcctgaaaatcctgctacagataaactgcaggtgctgcaggtacttgatcgcctgaaaatgaaattgcaggagaagggtgacacgtcgcagaatgagaagttatctatgttttatgagacactaaagagtcctctcttcaaccagatactcacacttcagcagtccatcaagcaactgaagggtcaactcaaccatataccctcagattgttcagccaactttgatttttctaggaaaggtttgttagtgttcacagatggttccattactaatggaaatgtccacaggccctctaataactcgactgtatctgggttatttccgtggaccccgaagttgggaaatgaagactttaactcagtcattcaacagatggctcagggccggcaaattgaatatatagatatagaacggccttcaactggaggccttggattcagtgtggtggccctcagaagtcaaaatctcggaaaagttgatatcttcgtgaaggatgtccagccagggagtgtagcagacagggatcaaagattaaaggaaaatgatcaaatattggccattaatcacacgccattggatcagaacatttcccatcagcaagcaattgcattattacaacaaaccactggatctttgagactgattgtggccagggaaccagtccacacaaaaagcagtacttctagcagcctaaatgatacaactctgcctgaaacagtttgttggggccatgttgaagaggttgagctcattaatgatggctctggactaggttttggaatagttggaggaaaaacaagtggcgtggttgtgaggactatagttcctggaggattagcagatcgagatggaagactccagacaggggaccacatcttgaagattggtggcacaaacgtgcagggaatgaccagtgagcaagttgcacaagttctaaggaactgtgggaattcagtcaggatgctcgttgctagagatccagctggtgacatttcagtcaccccccctgcccctgcagccttacctgttgccctgcctactgtagccagcaagggccctggttctgacagttctctttttgaaacttataatgttgagcttgtgagaaaagatgggcagagtcttggaattagaattgttggctatgttggaacatctcatacaggggaagcttcagggatttatgtgaaaagtataatacctggcagtgctgcgtaccacaatggccacattcaagtgaatgacaaaatagttgctgtcgatggcgtgaacattcagggttttgccaaccatgatgttgttgaagtattacgaaatgcagggcaggtggtacacctaaccctagttcgaaggaagacatcctcatctacttctccacttgaaccaccttcagacagaggaactgttgtagaaccactgaaaccaccagctctctttctaactggagcagtggaaactgaaactaatgtggatggtgaagatgaggaaattaaagaaagaattgatactttaaaaaatgacaacatacaagccttagaaaaattggaaaaagtcccagactctccagaaaatgagctgaaatccagatgggaaaacctgttgggtcctgattatgaagtaatggttgctactttggacacacagattgcagatgatgctgagttacagaaatattcaaagctgctgcctattcacactctgaggcttggtgtggaagtggattcctttgatgggcaccattatatttcttcaattgtttctggtggtcctgttgatacattgggtctcctacagccagaagatgagctgcttgaggtcaatggcatgcagctttatggaaaatctcgccgagaagcagtctcctttcttaaagaagtgccacccccttttactttggtttgctgtcggaggttgtttgatgatgaagcttctgtagatgaaccaaggcgcactgaaacctctcttcctgagacagaggttgaccacaatatggatgtcaatactgaagaagatgatgatggggaattagcactgtggtcccctgaagtcaagattgttgaactagtaaaagattgtaaaggtttgggattcagcattttggattaccaggaccctttagatcctacaagatcagtgattgtgatccgctccctggtagcagatggtgtagcagaaagaagtgggggactattacctggagaccgcctggtctcagtcaatgaataccgtttggacaacacctcacttgctgaagctgtggaaatattgaaagctgtgccaccaggcctagtacaccttggcatctgtaagcctttggtggaagataatgaagaagaaagttgttatattttacattcaagcagtaatgaagacaagactgaattttcaggaacaattcatgatataaattcatctttaatactcgaagcacccaagggatttagagatgaaccatattttaaagaagaacttgtggatgaaccatttctagatctgggaaagtctttccattcccaacaaaaagagatagagcaaagcaaggaggcctgggagatgcatgaatttctgactcctagattgcaggaaatggatgaagaaagagaaatgcttgttgatgaagaatatgagttatatcaagatccctcaccatccatggagttgtatcccttgtcgcacattcaagaggccactcctgtgccctctgtgaatgaacttcactttggtacacagtggttgcatgataatgaaccatccgagtctcaagaggcaagaaccgggaggactgtctattcccaggaggcacagccgtatggctattgccctgaaaatgtgatgaaagaaaattttgtcatggagtccctaccatctgtaccatcaactgaaggaaacagtcaacaaggcagatttgacgacctggaaaatcttaattcattagcaaaaactagtctggatttaggcatgatcccgaatgatgtccaaggtcctagcttgctcattgaccttcctgttgtggctcaaaggagggagcaagaagatttgcctttatatcaacaccaagcgacacgagttatttccaaggcctcagcatacacaggaatgttgtcttctagatatgccactgatacatgtgagttacctgagagagaagaaggcgaaggagaagaaactccaaattttagccactggggtccaccgagaattgttgagatttttagagaacccaatgtgtctcttgggatcagtattgttggtggacaaactgttataaaacgtctaaagaatggagaggagcttaaaggtatattcatcaaacaagttttagaagacagtccagcagggaagacgaacgcacttaaaactggagataaaatacttgaggtgtctggagtagatttgcagaatgcctcacacagcgaagcagttgaggccattaagaatgcaggaaaccctgtggtgttcattgttcagagtttgtcatccactccacgagtcattcctaacgtacataacaaggccaacaaaatcaccggtaaccagaaccaggacacccaagaaaagaaagaaaagaggcaaggaactgctccaccgccaatgaaacttcctcctccttataaagctctgactgatgacagtgatgaaaatgaagaagaagatgcctttaccgaccaaaaaatcagacaaagatatgcagatctgcctggagaactgcacattattgaacttgaaaaagataagaatggacttggactcagccttgctggtaataaagaccgatcacgcatgagcatatttgtggtgggaattaacccggaaggacctgctgccgcagatggacgaatgcgtattggagatgaactcttagagataaacaatcagattctgtatggaagaagtcaccaaaatgcatctgccattattaagactgccccatcaaaggtcaagctggttttcatcagaaacgaggatgcagtcaatcagatggccgttactccctttccagtgccatcaagttctccatcttctattgaggatcagagcggcaccgaacctattagtagtgaggaagatggcagcctcgaagttggtattaaacaattgcctgaaagtgaaagcttcaaactggctgtcagccagatgaaacagcaaaaatatccaacaaaagtctccttcagttcacaagagataccattagcaccagcttcatcataccattcaacagatgcagacttcacaggctatggtggtttccaggctcctctgtcagtggaccccgcaacgtgtcccattgtccctggacaggaaatgattatagaaatatccaagggacgttcagggcttggtctcagcattgtgggaggaaaagacacacccttgttctggaggctgggaagtccaagagcatggagccagcatctggtgagggccttcatgctgcatcatcctgtgacagaagttgaagggcaaaatgctatagttatccatgaagtctatgaagaaggggcagcagccagagatggaagactttgggctggtgaccagatattagaggttaatggggttgacctgaggaactccagccacgaagaagccatcacagccctgaggcagaccccccagaaggtgcggctggtggtgtatagagatgaggcacactaccgggatgaggagaacttggagattttccctgtggatctgcagaagaaagctggccggggcctgggcctgagcatcgttgggaaacggtaa

SEQ ID NO: 23912 - DNA, 1857 bp, Homo Sapiens
gacccacgcgtccggctacggagtcactacagggagaggtctcatcactagaaatagccgaagaacctgcagcctcaaccagcgttaaggaggacgtgccgtttctagggagtcttagtcggggctcaccagcttcctgcattttctgaccggctccaggaatagaaccaaaagaagctgaacaaggaagcagcgcggcaccaagaaaagcagaagtcggggccttggaggcgtgactttcccctcgggtccaggtagggcctggagctgctgcaagtgccgcctgtgctggggaagggaccatgtggctgccttgggctctgttgcttctctgggtcccaggatgttttgctctgagcaaatgcaggaccgtggcgggccccgtggggggatccctgagtgtgcagtgtccctatgagaaggaacacaggaccctcaacaaatactggtgcagaccaccacagattttcctatgtgacaagattgtggagaccaaagggtcagcaggaaaaaggaacggccgagtgtccatcagggacagtcctgcaaacctcagcttcacagtgaccctggagaatctcacagaggaggatgcaggcacctactggtgtggggtggatacaccgtggctccgagactttcatgatcccgttgtcgaggttgaggtgtccgtgttcccggcatcaacgtcaatgacacctgcaagtatcactgcggccaagacctcaacaatcacaactgcatttccacctgtatcatccactaccctgtttgcagtgggtgccacccacagtgccagcatccaggaggaaactgaggaggtggtgaactcacagctcccgctgctcctctccctgctggcattgttgctgcttctgttggtgggggcctccctgctagcctggaggatgtttcagaaatggatcaaagctggtgaccattcagagctgtcccagaaccccaagcaggctgccacgcagagtgagctgcactacgcaaatctggagctgctgatgtggcctctgcaggaaaagccagcaccaccaagggaggtggaggtggaatacagcactgtggcctcccccagggaagaacttcactatgcctcggtggtgtttgattctaacaccaacaggatagctgctcagaggcctcgggaggaggaaccagattcagattacagtgtgataaggaagacataggcttttgtcctgcctcgccatcggagctctcatgggccccaggaagtccagggacagctcccttatacctggcccacgtccttctcagcctgccctcgacaacagtgaccaacagacaggcagctgggtttcccaggccatccctctgttgccatcagcttgattggcttccccgagggccagcagggctgggggctccggagagcagcaggaagcactcccagccaccagtgcctgtcgcctctttcccctttgcccctgcttcatcccagctctgtgtgtggaggacaaagcttcttcctgcgtggctccaggaaaagatgtggctcacgtaggtggcacctgccaatagctttgtcaatcacagccccataggaacgtctggaattgcttgggagttggggagaactgtcaagaagagtgaagagagtgccaaagcggagatctgttcacctgggggccatggaggggggacccactaaagatcaagatcaaagattctccccatctcacagacaaggaaactgaggccagagggaggagagaattgctcatggctccagaactggtggcaagtttctctggactcttaggtttatttttaatatgaaatataaaaacagtttcaaatatcttaaaaaaaaaaaaaaaaaaa

SEQ ID NO: 23913 - DNA, 747 bp, Homo Sapiens
  misc_feature (20)..(20): n is a, c, g, or t
  misc_feature (95)..(95): n is a, c, g, or t
  misc_feature (113)..(113): n is a, c, g, or t
  misc_feature (211)..(211): n is a, c, g, or t
  misc_feature (240)..(240): n is a, c, g, or t
  misc_feature (323)..(323): n is a, c, g, or t
  misc_feature (344)..(344): n is a, c, g, or t
  misc_feature (426)..(426): n is a, c, g, or t
  misc_feature (483)..(483): n is a, c, g, or t
  misc_feature (555)..(555): n is a, c, g, or t
  misc_feature (558)..(558): n is a, c, g, or t
gaagtttgatgttgtgtcgnatgaccagaaatatgctgtgaacttaattctttcttatagcagttagcctatgggaaaattggttttgttctacnttattttatttaaagtcntaatttccagatcctatcaactccattaagtgaggacttactgtactgtaccctgaggctcatcttagtcttccctcatcccccctgcctttccttcnagtcagcctgcatggtggtctgaggcctncccccctacagcctctcccctttatctttcacggtaatcacccctcattactcgtacttctaactccatcttgaaagctgctncctggaagatccaaacggacncaaggagggactgaaggattagaaatgagggaagtaacccatgcactgcttatttgagatgggaaccgaggactttggccgntcctacacagagacagatggcagagagacaagtttctcagagatgcgtgagtaactngaatgcttttcctgagacccagaccagcctgctcaagagacactgttgcagctgccctcctggaggaactangangattttattctttacttcccagagaatggaaccaggacacagtagcattaacaaaaaaggatcgcatctcgtcagaacgtatgcattgcttctctcggattacctgaagttactccccttccctcaataataaggcattagaaaaaaatggaattgatcaaagaagtaagagtaacagaggaagactcg

SEQ ID NO: 23914 - DNA, 1145 bp, Homo Sapiens
  misc_feature (64)..(64): n is a, c, g, or t
tttttttttttttttagctttgttaactgtgaattcacccctcttcctccactgcatatttaangcatgtgttcacactgtgtgtaaacattaactgaagatttttctctttgcgcatcgctgactgttcaaggataataagtattattaaaattaaatattaaccgaccaagcccatattctttcacactggcctcctaaacagcacactgtacttctaatcatacggggttcaaattgttggacagttccagggacaaaacccgctggaggaggactcgaagggaccagtccccacctgagcctcctgcatcctgctgctgtggtggcgctcacgccctgtcagtggcacctggagacagatattttgtgcagtgtctttcatctcagttcccagcagtcagctttattttcctgtagtagctgagccagctagatggaggtcatcctctattaaccacctttcttgattatcctatttacttcacacaactgagcctctcctttgggctgtcagcacctgtcagggcctccaggagctcagaggcaaactcccaagacaggagaggaaatacagcctcccagcttcagatcttcagctgagaatgatgccgaatgaatctgcatttctgttggtttagggcagctagagcctcacaaagcagacgtcatgccaaattggtctaataaatcagggatcatagccgagaccttttcttagcaccaaggagaggcggaataatttgggcatttgtgctttcatacttgctttatcacaaggatggaagtcttccatacactcataaacatcctgggcagaaacaacctgccaaaaaaaatgtgattaacctttaacaaatagtcctgcagcacaggctggcccaggacatatggcaaaaccagatcaaaggagccatctccacatctactttaaactatttagggtggaggcaaaaaaacaaaccatcacccacaaccaatcacatcataccaagaataaagagccaagaaatgagagtcagagatgaccagaaaacttggtaaagattaacaaagagatcctttccaaagagaaggccttgtgccagatatatcctcacctgcggaagaataaacacttcattggcttgctcaaaaaagcaaat

SEQ ID NO: 23915 - DNA, 7288 bp, Homo Sapiens
ttcttgtcccacagtgcctggcccagaagccttgctaaatatttgaacaggattgcccaatacttttctgctgtgagaatgtaagatggatccagaagagcaggagctcttaaatgattacagatacagaagctactcttcagtgattgaaaaggctttgagaaattttgagtcctcgagtgaatgggcggatctcatatcttcacttggcaaactcaacaaggctcttcagagtaacctgaggtactccttgttgccaagacggctcctcatcagcaaaagattagctcagtgtttgcaccctgccctgcccagtggtgtccacttaaaagctctggaaacctacgagattatctttaaaatcgtggggaccaaatggctggccaaggacttgtttctgtacagctgcgggttatttcctctcctggcacacgcggcggtgtcggtgaggccggtgctgctcaccctgtacgagaagtacttcctcccactgcagaagctgctcctgcccagtctgcaggccttcatcgtgggcctgctgcccggccttgaagagggctccgagatctccgacagaacggatgctctgctcctgagactgtcgctggtggttggcaaagaggtgttttacaccgccctctgggggagcgtcctggccagcccgtccatccgcctccctgcctcagtcttcgtggtgggccacatcaacagggatgcccccggccgggagcagaagtacatgctggggaccaatcaccaactcacggtgaagtctttgcgtgcctccctgttggactcaaatgttcttgtgcaaagaaataatctggaaatcgttctgtttttcttcccattttatacctgtctggattccaatgagagagccatccccctcctcagatctgacatcgtgcgcattctctcagccgccacccagaccctactgagaagggacatgtccctgaacagaagactgtatgcatggttactaggctcagacataaaaggaaataccgttgtgccagaatctgaaatctcaaattcttatgaagaccagtcgtcttatttttttgaaaaatactccaaggatcttttagttgagggtttggctgagatattgcatcagaagttcatagatgctgacgtggaggaacgccatcatgcatacctgaagccttttcgcgtcctcatcagtctgcttgacaagccagaaatagggcctcaagtggttgggaatttgtttctcgaagtcatcagggccttttattcttactgcagagatgcccttggctctgatcttaaacttagctacacccagagtggaaattcgctgataagtgcaatcaaggaaaacagaaatgcctctgagattgtcaaaacggtaaatttgctgataacttctctaagcacagactttctctgggattatatgacaaggtgttttgaggaatgctttagaccagtgaagcagcgttacagcgtgaggaacagcgtcagccctccccccacggtctcggagctctgcgccctcctggtcttcctgctggatgtcattcctttggaactttactctgaggtgcatacccagtatctccctcaggtgctcggctgcctggtgcagcctcttgctgaggacatggaggccttaagtttacctgaactcacgcatgccttgaagacgtgtttcaaggtgctcagcaaagtccagatgcctccttcctacctcgacacggagtccaccagcggaacctcgagtccagtaaaaggtgaaaacggcaaaataattttggaaacaaaggcagtgattcccggtgacgaagatgcttcgtttccccctctgaagtctgaggacagtgggatcgggctcagtgcctcgtcaccggagctctctgagcacttgagggttcctcgagtttctctggaaagggacgacgtttggaagaagggcgggagcatgcagaggacgtttctttgcatccaagagctaatcgccaactttgccagcaagaacatttttggagtacagctgacagcgtcaggagaagaaagcaagtccgaggagcctgcagggaagagggacagggatgggacgcagagcctggcagccaatgattccagcaggaagaactcttgggagcccaagcccatcactgtgcctcagttcaagcagatgctgtcagacttgttcacagcacgagggtctccattcaagacaaaaagttcagagtcaccatcgtcttcgcccagcagccctgccaggaaaaacgggggagaatgggatgttgagaaggtggtcattgacctggggggttccagggaggaacgcagggaggcctttgccgccgcctgccacctgctgctggattgtgccactttccctgtctacctgtccgaggaagagaccgagcagctctgtgcaacgctcttccagctgccaggagccggtgattccagttttccatcttggctgaagtccctcatgactatttgctgctgtgtgactgactgctacctccagaacgtggccatttccactctgctggaagtgataaaccattcccagtccctggcgcttgtcattgaagacaagatgaaacgctataagagctctggacacaaccctttttttggcaagctgcagatggtgacggttcctcccattgctccagggatattgaaagtcattgcagagaaaacagatttctatcagagggtggctcgcgtgctttggaatcagctgaacaaagagacccgggagcatcacgtcacctgcgtagaattgttctaccggctgcactgcctggcccctacggccaacatctgcgaggacatcatctgccatgccctcctggaccctgacaagggaacaaggctggaagctctgtttagattttccgtgatctggcatctgacaagagagatccaaggcagtcgagtaacatctcacaatcgctcctttgataggtccttgtttgtcgtgctggacagcctggcctgcacggatggtgccatcggtgcggcagcccagggctggctggtgcgtgcgctctccctcggggacgtggctcgcatcctcgaacccgtgctcctgctgctgctgcagccaaaaacccagagaacctccatccactgcctcaagcaggagaactcggccgatgacttgcaccgttggtttaacaggaagaaaacctctttcagagaggcatgcgcagtgcccgagcctcaggagagcggctctgaagagcacctgcctctgagccagttcaccacagtggaccgtgaagccatttgggccgaagtggagaaggagcccgagaagtacccgctgcgaggcgagctgagcgaggaagagctgccctactacgtggagcttccagacaggacggcccacggcgccccggacagcagcgagcacaccgagtctgcagatacaagctccggccacacggacagcgagaacacgtcctccttctcctccccttcccacgacctgcaggagctgagcaacgaagagaactgctgtgcacccatccacatggggggcagggcgtaccccaagcgctcggccctgctggcggccttccagtcagaaagcttcaaggctggggccaagttaagcctggtgcgggtggactcggacaagacgcaggcttctgagtcgttctccagcgacgaggaggcggacttggagctccaggccctcaccacatccaggctgctaaagcagcagcgggaaaggcaggaggccgtcgaggccttgttcaagcacatcctgctctacctgcagccctacgactctcggcgggtcctctatgccttctcggtgctggaggctgtgctcaaaaccaaccctaaggaattcatcgaggctgtgtccaggactagcatggataccagctccaccgcgcacctcaacctcatctccaacctcctcgctcgccaccaggaggccctcattggccagagtttctacggaaagctccagacccaggtccccaacgtgtgcccccactctctgctcctggagctgctcacctacccctgcctgagcttcctgcgctcctactacccttgctatttgaaggtctcgcaccgagacattctcggcaaccgggacgtgcaggtcaaaagtgtcgaggttttgatcaggataatgatgcagctggtctcagtggccaagtcttcggaagggaagaacgtggagttcatccacagcttgctgcagaggtgcaaagttcaggagtttgtcctgctctccctgtcggcgtccatgtacacgagccagaagcgctacgggctggccaccgcccaccacggcagggccctgccagaggacagcctctttgaggagagtctcattaacttgggtcaggaccagatctggagtgagcacccgctgcagattgagctgctgaagctgctgcaggtgctgattgtcttggaacaccacctgggtcgggcccatgaggaggcggaaaaccagcccgacctgtcccgggagtggcagagagccctgaacttccagcaggccatcagcgccctgcagtacgtgcagccccaccccctcacctcccagggtcttctggtctctgcggtggtgaggggtctgcagcccgcctacggttacggcatgcatccggcctgggtgagcttggtcacgcattccttgccctacttcggaaagtccctgggctggacggtgacaccctttgttgtccagatttgcaaaaacttggatgacttggtcaagcagtatgaaagcgaatctgtgaagctctctgtcagcacaacctccaagagggaaaacatttctccagattatccactcacccttctagaaggtctaacgaccattagtcatttttgtcttttggaacaagccaaccaaaacaaaaagaccatggctgcaggtgatcctgccaacttgaggaatgccagaaatgccattttggaagagctgcctcgaactgttaacaccatggcccttctctggaatgttctcagaaaggaggagactcaaaagagacctgtcgatctcctaggggccacgaagggatcctcttccgtttactttaaaaccaccaaaaccataagacaaaaaattttagacttcttaaaccccttgacggcccatcttggggttcagttgacagcggctgttgcggcagtgtggagcagaaagaaagcccagcgtcacagtaagatgaagattatcccaacggcaagtgcatcccagctaacccttgtcgacttggtgtgtgcactcagcaccctgcagactgacacgctgctgcacctggtgaaggaggtggtgaagaggccaccccaagtcaaagggggtgatgagaaatcgcccctagtggacattcctgtgttgcagttttgctatgcttttctccaaaggctcccagtaccagccttgcaagagaacttttcttcactgttgggagtattgaaagagtctgtacagttgaatctagccccacctgggtattttctgcttctcagcatgctgaatgactttgtaacaagaactcccaacctggaaaacaagaaggaccaaaaagacctgcaggaaatcactcagaaaatcctagaagctgtggggaacattgccggctcttccttggagcaaaccagctggctaagcagaaacctggaagtgaaggcccaacctcaggcctctctagaagaatctgatgctgaggaggacctgtatgatgctgctgcagcttcagcaatggcgtcttcatccgccccgtcggtgtacagcgtgcaagccctctctctcctggcagaggtactggcttccctcctggacatggtttatcgaagtgatgagaaggagaaagctgtgccgttaatctcccgtctgctttactatgtttttccatacttacgcaaccacagtgcctacaatgctcccagcttccgggctggcgctcagctgctgagctccctgagtggctatgcctacacaaagcgagcctggaggaaggaggtcctggggctgtttctcgaccccgctttctttcagatggatacttcctgtgttcattggaagtccattattgaccatcttttgactcatgagaaaacaatgtttaaggatttaatgaacatgcagagcagttctttgaaactattctcaagttttgaacagaaagccatgctgttaaagcgccaggcttttgctgtcttcagtggagaacttgatcaataccacctttaccttccactgatacaagaacgcctgacagacaatctcagagttggacagacatccatagttgctgctcagatgtttctttttttcagagttttgctgctaagaatatctcctcaacatttgacttcattgtggccaataatggtctctgaattgattcagacattcacacagcttgaagaagatctaaaagatgaagatgagtcattgagaagcaccaacaaagtaaacagaacgaaagtttcagtcccggatgcaaatggaccctcagtgggggagataccccagagtgaactcatcttgtatttatcagcttgcagattcttggacacagcgctttcttttccacctgacaagatgccattatttcaaatttataggtgggcatttattccagaagtggacacagagggccctgccttcctgtcggatgtagaggagaatcaccaagaatgcaaaccccacactgtcaggattctagaacttctaaaattaaagtttggggaaatcagtagctctgatgagatcaccatgaagagtgaattcccgcttctgcgccaacattctgtttccagcatcaggcagttgatgccattcttcatgactctaaatggtgcatttaagacccagagacagctgcctgctgatagcccaggaactccattcttggactttcctgtcacagatagcccaaggatcttaaaacaactggaagaatgcatcgaatatgattttctggaacatccagaatgttaaccatgtgagagagaatatgtttaatccatgtattggtactttactgaaaaccaggttatattctaaagaagaaagaaggcaggatagtgcttttgaacaagcctatttccattttgaaagtagatttcaggctaggtgcggtggctcacacctgtaatctcagcactttgggaggccaaggcaggcagatcacttgaggtcaggagttcgagaccagcctgaccaacatggtgagaccctgtctctactaaaaatacaaaaattagctgggtgtggtggcggcgcctgtaatcccagctacttggg

SEQ ID NO: 23916 - DNA, 3240 bp, Homo Sapiens
agacagtccaaacaggagctttacagaaatgcactgtatgagtggccattccaattttgtatcttgtgtatgcatcataccctcaagtgacatctaccctcatggcctaattgccaccggtggaaatgaccacaatatatgcattttctcactggacagtccaatgccactttatattctaaaaggccacaaaaatactgtttgtagtctatcatctggaaaatttgggacattacttagtggttcatgggacaccactgctaaagtctggctgaatgacaagtgcatgatgaccttgcagggtcatacagctgcagtgtgggcggtaaagatcttacctgaacagggcttaatgttgactggatcagcagacaagactgttaaactgtggaaggctggaagatgtgagaggactttttcagggcatgaagactgtgtaagaggtttggcaattttgagtgaaacagaatttctttcctgtgcaaatgatgctagtattagaaggtggcaaatcactggcgagtgtcttgaagtatattatggacatacaaattatatttatagcatatccgtttttccaaattgtagagactttgtgacaacagcagaggacagatctctgagaatctggaaacatggggaatgtgctcaaactatccgacttccagctcagtctatatggtgctgctgtgtgctcgacaatggtgacattgtggttggtgcgagtgatggcattattagagtgtttacagaatcagaagatcgaacagcaagtgctgaagaaatcaaggcttttgaaaaagaactgtctcacgcaaccattgattctaaaactggcgatttaggggacatcaatgctgagcagcttcctgggagggaacatcttaatgaacctggtactagagaaggacagactcgtctaatcagagatggggagaaagtcgaagcctatcagtggagtgttagtgaagggaggtggataaaaattggtgatgttgttggctcatctggtgctaatcagcaaacatctggaaaagttttatatgaagggaaagaatttgattatgttttctcaattgatgtcaatgaaggtggaccatcatataaattgccatataataccagtgatgacccttggttaactgcatacaacttcttacagaagaatgatttgaatcctatgtttctggatcaagtagctaaatttattattgataacacaaaaggtcaaatgttgggacttgggaatcccagcttttcagatccatttacaggtggtggtcggtatgttccgggctcttcgggatcttctaacacactacccacagcagatccttttacaggtgctggtcgttatgtaccaggttctgcaagtatgggaactaccatggccggagttgatccatttacagggaatagtgcctaccgatcagctgcatctaaaacaatgaatatttatttccctaaaaaagaggctgtcacatttgaccaagcaaaccctacacaaatattaggtaaactgaaggaacttaatggaactgcacctgaagagaagaagttaactgaggatgacttgatacttcttgagaagatactgtctctaatatgtaatagttcttcagaaaaacccacagtccagcaacttcagattttgtggaaagctattaactgtcctgaagatattgtctttcctgcacttgacattcttcggttgtcaattaaacaccccagtgtgaatgagaacttctgcaatgaaaaggaaggggctcagttcagcagtcatcttatcaatcttctgaaccctaaaggaaagccagcaaaccagctgcttgctctcaggactttttgcaattgttttgttggccaggcaggacaaaaactcatgatgtcccagagggaatcactgatgtcccatgcaatagaactgaaatcagggagcaataagaacattcacattgctctggctacattggccctgaactattctgtttgttttcataaagaccataacattgaagggaaagcccaatgtttgtcactaattagcacaatcttggaagtagtacaagacctagaagccacttttagacttcttgtggctcttggaacacttatcagtgatgattcaaatgctgtacaattagccaagtctttaggtgttgattctcaaataaaaaagtattcctcagtatcagaaccagctaaagtaagtgaatgctgtagatttatcctaaatttgctgtagcagtggggaagagggacggatatttttaattgattagtgtttttttcctcacatttgacatgactgataacagataattaaaaaaagagaatacggtggattaagtaaaattttacatcttgtaaagtggtggggaggggaaacagaaataaaatttttgcactgctgaactgtgagattttcctgtgtaatttgggtagattttcaagagtgtgaacacaaatttaaaataagctataatcagcaacaacacaatgacaatgacatcttccccttaccttagccactaagaagacaagggctgttactcatataacttgcttttcttacttaatgtacaccaaactgttgttgtcaattatcttttatttaacttctccaccttcattgctagatccttcgaacagcactgatacatttcaaggtcttgttttaggataactactttaaaattttttaaattatattaaatttataaaataatttataaattcatatattaaaacaatataagataatttcttgatttgtcatttataaatccctaaagtatatttgtttaatggcctatttttggatgaagaaaaagccagttggtaagctgtgttagtcatgtatcagttcagacagacggaggtctcaatttaactccaggcttagatcccagtttccttttgcccttcactatttgaggtaacttcatttttcattctagttttgatatttggctgtttatttttgtcattttccattatttcaaagggaatttggaacatgttgaattttatcaggtggttacataagcaagagtacatcaaactgtattatttgaaagtctagaacctgtcatgtgaaattactatttttgagccctctatgtggtccaggcagaatagtagacacactgatatttaatccttaaaacccctttaaatgagggccagtattatctctgctttcagaagtagacataataggatgaatcatataacaga

SEQ ID NO: 23917 - DNA, 3227 bp, Homo Sapiens
gggcggccgttcccgcggccccctcggctttgccagcgccgcctgcgaggcggaggcaggatgaagatgactggggatttcgaggagtgtctgaaggactcgccccgcttcagggcagctttggaagaagtagaaggtgatgtggcagaattggaactaaaacttgataagcttgtgaaacttgggattgcaatgattgatactggaaaagccttttgtgttgcaaataaacagttcatgaatgggattcgagacctggcccagtattctagtaatgatgctgtcgttgagacaagtttgaccaagttttctgacagtcttcaagaaatgataaattttcacacaatcctgttgccaaactcagagatcaatttaaggcacagcttcagtaactttgttaaagaagatcttagaaaattcaaagatgccaagaagcaatttgaaaaagtcagtgaagaaaaagaaaatgcgttagtaaaaaatgcccaagtacaaagaaacaaacaacatgaagttgaagaagccaccaacattctgacagcaacaagaaaatgtttccgacacatagccctcgattatgtgcttcagattaatgttcttcaatcaaaaaggagatcagaaatcctaaaatcaatgttgtcatttatgtatgcccatttggccttctttcatcaaggatatgatctgtttagtgaacttggaccctacatgaaggatcttggtgcacagttggatcgactggttggggatgcagcaaaggagaaaagagaaatggagcaaaaacattccaccattcaacaaaaggatttctccagggatgattctaaattaaaatataacgtagatgctgcaaatggcatagttatggaaggatatctgttcaaacgagccagcaatgccttcaaaacttggaacaggcgctggttttcaatacaaaataatcaggtggtttaccagaaaaaatttaaggataatccgactgtggtagttgaagacctcaggctttgcacagtgaaacattgtgaagacatagagcgacgattctgctttgaggtggtctcgccaacaaaaagttgtatgctccaggcagattccgaaaagctgcgccaggcatggattaaggctgttcagaccagtattgctactgcttatagagagaagggtgatgaatcagagaagctggataagaaatcatctccatccacaggaagcctagattctggaaatgagtccaaagagaaattattgaaaggagaaagtgcgcttcagcgggtccagtgtatccctggcaatgccagctgttgtgactgtggcctggcagatccacggtgggccagcatcaacctgggcatcaccttgtgtatcgagtgctccggaattcaccggagccttggggttcatttttcaaaagtacgatctttaactttagacacctgggagccagaacttttaaagcttatgtgtgagttggggaatgatgttataaatcgagtttatgaagctaatgtggaaaaaatgggaataaagaaaccccaaccaggacaaagacaggagaaggaggcatatatcagagcaaaatatgtggagaggaaatttgtggataaatattctatatcattatcacctcctgagcagcaaaaaaagtttgtctctaaaagttctgaagaaaagaggctgagcatttctaaatttgggccaggggaccaagtcagagcatctgcccaaagttcagtcagaagtaatgacagtggaattcagcagagctctgatgatggaagagaatctttaccctccacggtgtcagccaatagtttatatgagcctgaaggagaaaggcaagattcttctatgtttcttgactcgaaacatcttaatccaggacttcagctttatagggcgtcatatgaaaaaaaccttcctaaaatggctgaggctttggctcatggtgcagacgtgaactgggccaattcagaggaaaacaaagcgacaccacttattcaggctgtattagggggctctttggtgacgtgtgagttcctcctacagaatggtgctaatgtcaaccaaagagatgtccaagggcggggaccattgcaccatgccaccgtcttagggcacacagggcaggtatgtttattcctaaaacgaggtgccaatcaacatgccactgatgaagaagggaaagaccctttgagcatagctgtggaagcagccaatgctgatatagtcaccttgttacgtttagcaagaatgaatgaagagatgcgggaatcagaaggactttatggacagccaggtgatgaaacttatcaggacatatttcgtgatttttcccaaatggcatccaataatccagagaaactaaatcgtttccagcaagattcacagaaattctgaatttttttaaaaatgggaaaatatgaaatctggtgaccccctaatgtatacagctaaaaattcacaatttttttactgctttaattctacttaattttggtagatattgaatggcttggaaaagaggtacccattcatatatttataaattaaaacatagttatctagtagtaggagaggaacctagtttaggacctcttttattaaaaaagcctatttaaagggctatttctgtagacagaagttcagtctagatttaggccatctctaggttacaagatgataggaggttagacaaaagtgattcttttgccaatgggtggtggcattgatttttttcctccatgcatcttgcccaggatcactcagtcaagcatgtcttcatcaagtggaagccaactgtcctgcctgcctcaagaatatgtgttttctttagcttccctgaggatttttggtggttcagaaataggtgtgtgtgttgatgtgtttttggtaacctagctttcatacacataatatatgatttattagaactagagaatgtgttttccccgtttgttcataaatgcggtcggttatacttcttaggtgacaggttattgtccagtactttaatgtatgtatgtataatggctgtacaggtagaccataattcagtcctttagatttattttatgcagcaaaaagaagctctttttttttttaatcacaaaaaaaaaccccagttcaaaatgtgtagttcttcattgttgggttgattccccaaaaccttgacagatgtatcgatggaataaaagtatgttttaaaggttaaaaaaaaaaaaaaaaaa

SEQ ID NO: 23918 - DNA, 7020 bp, Homo Sapiens
acgatctaaaacagacagagatgataaatattttagctattcaaaacttgaatgagatactcggtatgtatcttcccgatgtagatcagaaagagagcgacggcggagcagatctcactctaggtctgagagaggctctagaactaatttatcctattccagatcagaacgatctcattattatgactctgatcgtcgctaccataggagctccccttatcgagagaggacgcgctattctcggccatacacagataacagagcacgagagagttctgactcagaagaagagtataagaagacatactcaaggcgtacctcatctcattcctcttcttacagggacctaaggacatcatcctattctaaatctgatcgggactgtaaaactgagacctcttacttagagatggaaagaagaggcaagtattcttcaaaactagaaagagaatctaaaaggacttcagaaaatgaagcaattaaaagatgttgttctccccctaatgaactgggattccgacgagggtcatcatattctaagcatgacagtagtgcttcccgttataaatctaccctttcaaaacctatacccaagtctgataaatttaaaaattctttctgttgtacagaattaaatgaagaaatcaaacaatctcattcttttagtttacagacaccttgttcaaaaggtagtgaattaagaatgattaataaaaatcctgaaagagaaaaggctgggtctccagctccatcaaatcgattaaatgattcacctactttaaaaaagctagatgaattgcctatttttaagtccgaatttataacacatgatagccatgatagtattaaggaattagactctttatctaaagtgaagaatgatcaattaagaagtttttgtcccatagaattaaatataaatggatctcctggggcagaatctgatttggcaacattttgcacttctaaaactgatgctgttttaatgacttctgatgatagtgtgactggatcggaattatcccctttggtcaaagcatgcatgctttcatcaaatggatttcagaatattagtaggtgcaaagaaaaagacttggatgatacctgcatgctgcataagaagtcagaaagcccatttagagaaacagaacctctggtgtcaccacaccaagataaactcatgtctatgccagttatgactgtggattattccaaaacagtagttaaagaaccagttgatacgagggtttcttgctgcaaaaccaaagattcagacatatactgtactttgaacgatagcaacccttctttgtgtaactctgaagctgaaaatattgagccttcagttatgaagatttcttcaaatagctttatgaatgtgcatttggaatcaaaaccagttatatgtgatagtagaaatttgacagatcactcaaaatttgcatgtgaagaatataagcagagcatcggtagcactagttcagcttctgttaatcattttgatgatttatatcaacctattgggagttcaggtattgcttcatctcttcagagtcttccaccaggaataaaggtggacagtctaactctcttgaaatgcggagagaacacatctccagttctggatgcagtgctaaagagtaaaaaaagttcagagtttttaaagcatgcagggaaagaaacaatagtagaagtaggtagtgaccttcctgattcaggaaagggatttgcttccagggagaacaggcgtaataatgggttatctgggaaatgtttgcaagaggctcaaaaagaagggaattccatattgcctgaaagaagaggaagaccagaaatctctttagatgaaagaggagaaggaggacatgtgcatacttctgatgactcagaagttgtattttcttcttgtgatttgaatttaaccatggaagacagtgatggtgtaacttatgcattaaagtgtgacagtagtggtcatgccccagaaattgtgtctacagttcatgaagattattctggctcttctgaaagttcaaatgatgaaagtgattcagaagatacggattcggatgatagcagtattccaagaaaccgtctccagtctgttgtggttgtgccaaagaattctactttgcccatggaagaaacaagtccttgttcttctcggagcagtcaaagttatagacactattctgaccattgggaagatgagagattggagtcaaggagacatttgtatgaggaaaaatttgaaagtatagcaagtaaagcctgtcctcaaactgataagtttttccttcataaaggaacagagaagaatccggaaatttcttttacacagtccagtagaaaacaaatagataaccgcctgcctgaactttctcatcctcagagtgatggggttgatagtacaagtcatacagatgtgaaatctgaccctctgggtcacccaaattcagaggaaaccgtgaaagccaaaataccttctaggcagcaagaagagctgccaatttattcttctgattttgaagatgtcccaaataagtcttggcaacagaccactttccaaaacaggccagatagtagactgggaaaaacagaattgagtttttcttcctcttgtgagataccacatgtggatggcttgcactcatcagaagagctcagaaacttaggttgggacttctctcaagaaaagccttctgccacgtatcagcaacctgacagtagctatggagcttgtggtggacacaagtatcagcaaaatgcagaacagtatggtgggacacgtgattactggcaaggcaatggttactgggatccaagatcaggtagacctcctggaactggggttgtgtatgatcgaactcaaggacaagtaccagattccctaacagatgatcgtgaagaagaggagaattgggatcaacaggatggatcccatttttcagaccagtccgataaatttcttctatcccttcagaaagacaaggggtcagtgcaagcacctgaaataagcagcaattccattaaggacactttagctgtgaatgaaaagaaagatttttcaaaaaacttagaaaaaaatgatatcaaagatagagggcctcttaaaaaaaggaggcaggaaatagagagtgattctgaaagtgatggtgagcttcaggacagaaagaaagttagagtggaggtagagcagggagagacatcagtgcccccaggttcagcactggttgggccctcctgtgtcatggatgacttcagggacccacagcgatggaaggaatgtgccaagcaagggaaaatgccatgttactttgatcttattgaagaaaatgtttatttaacagaaagaaagaagaataaatctcatcgagatattaagcgaatgcagtgtgagtgtacacctctttctaaagatgaaagagctcaaggtgaaatagcatgtggggaagattgtcttaatcgtcttctcatgattgaatgttcttctcggtgtccaaatggggattattgttccaatagacggtttcagagaaaacagcatgcagatgtggaagtcatactcacagaaaagaaaggctggggcttgagagctgccaaagaccttccttcgaacacctttgtcctagaatattgtggagaggtactcgatcataaagagtttaaagctcgagtgaaggagtatgcacgaaacaaaaacatccattactatttcatggccctgaagaatgatgagataatagatgccactcaaaaaggaaattgctctcgtttcatgaatcacagctgtgaaccaaattgtgaaacccaaaaatggactgtgaacggacaactgagggttgggttttttaccaccaaactggttccttcaggctcagagttaacgtttgactatcagttccagagatatggaaaagaagcccagaaatgtttctgcggatcagccaattgccggggttacctgggaggagaaaacagagtcagcattagagcagcaggagggaaaatgaagaaggaacgatctcgtaagaaggattcagtggatggagagctagaagctctgatggaaaatggtgagggtctctctgataaaaaccaggtgcccagcttatcccggctaatggttagaattgaaactttggagcagaaacttacctgtctggaactcatacagaacacacactcacagtcctgcctgaagtcctttctggaacgtcatgggctgtctttgttgtggatctggatggcagagctaggtgacggccgggaaagtaaccagaagcttcaggaagagattataaagactttggagcacttgcccattcctactaaaaatatgttggaggaaagcaaagtacttccaattattcaacgctggtctcagactaagactgctgtccctccgttgagtgaaggagatgggtattctagtgagaatacatcgcgtgctcatacaccactcaacacacctgatccttccaccaagctgagcacagaagctgacacagacactcccaagaaactaatgtttcgcagactgaaaattataagtgaaaatagcatggacagtgcaatctctgatgcaaccagtgagctagaaggcaaggatggcaaagaggatcttgatcaattagaaaatgtccctgtagaggaagaggaagaattgcagtcacaacagctactcccacaacagctgcctgaatgcaaagttgatagtgaaaccaacatagaagctagtaagctacctacatctgaaccagaagctgacgctgaaatagagcccaaagagagcaacggcacaaaactagaagaacctattaatgaagaaacaccatcccaagatgaagaggagggtgtgtctgatgtggagagtgaaaggagccaagaacagccagataaaacagtggatataagtgatttggccaccaaactcctggacagttggaaagacctaaaggaggtatatcgaattccaaagaaaagtcaaactgaaaaggaaaacacaacaactgaacgaggaagggatgctgttggcttcagagatcaaacacctgccccgaagactcctaataggtcaagagagagagacccagacaagcaaactcaaaataaagagaaaaggaaacgaagaagctccctctcaccaccctcttctgcctatgagcggggaacaaaaaggccagatgacagatatgatacaccaacttctaaaaagaaagtacgaattaaagaccgcaataaactttctacagaggaacgccggaagttgtttgagcaagaggtggctcaacgggaggctcagaaacaacagcaacagatgcagaacctgggaatgacatcaccactgccctatgactctcttggttataatgccccgcatcatccctttgctggttacccaccaggttatcccatgcaggcctatgtggatcccagcaaccctaatgctggaaaggtgctcctgcccacacccagcatggacccagtgtgttctcctgctccttatgatcatgctcagcccttggtgggacattctacagaacccctttctgcccctccaccagtaccagtggtgccacatgtggcagctcctgtggaagtttccagttcccagtatgtggcccagagtgatggtgtagtacaccaagactccagcgttgctgtcttgccagtgccggcccccggcccagttcagggacagaattatagtgtttgggattcaaaccaacagtctgtcagtgtacagcagcagtactctcctgcacagtctcaagcaaccatatattatcaaggacagacatgtccaacagtctatggtgtgacatcaccttattcacagacaactccaccaattgtacagagttatgcccagccaagtcttcagtatatccaggggcaacagattttcacagctcatccacaaggagtggtggtacagccagccgcagcagtgactacaatagttgcaccagggcagcctcagcccttgcagccatctgaaatggttgtgacaaataatctcttggatctgccgcccccctctcctcccaaaccaaaaaccattgtcttacctcccaactggaagacagctcgagatccagaagggaagatttattactaccatgtgatcacaaggcagactcagtgggatcctcctacttgggaaagcccaggagatgatgccagccttgagcatgaagctgagatggacctgggaactccaacatatgatgaaaaccccatgaaggcctcgaaaaagcccaagacagcagaagcagacacctccagtgaactagcaaagaaaagcaaagaagtattcagaaaagagatgtcccagttcatcgtccagtgcctgaacccttaccggaaacctgactgcaaagtgggaagaattaccacaactgaagactttaaacatctggctcgcaagctgactcacggtgttatgaataaggagctgaagtactgtaagaatcctgaggacctggagtgcaatgagaatgtgaaacacaaaaccaaggagtacattaagaagtacatgcagaagtttggggctgtttacaaacccaaagaggacactgaattagagtgactgttgggccagggtgggaggatgggtggtcaggtaagacagactctagggagaggaaatcctgtgggcctttctgtcccacccctgtcagcactgtgctactgatgatacatcaccctggggaattcaaccctgcagatgtcaactgaaggccacaaaaatgaactccatctacaagtgattacctagttgtgagctgttggcatgtggttagaagccatcagaggtgcaagggcttagaaaagaccctggccagacctgactccactcttaaacctgggtcttctccttggcggtgctgtcagcgcacagacccatgcgcatccccacccacaaccctttaccctgatgatctgtattatattttaatgtatatgtgaatatattgaaaataatttgtttttaaaaaaaaaaaaaaaaaaaaa

SEQ ID NO: 23919 - DNA, 5883 bp, Homo Sapiens
ggcataggcgcaggctgaatagtagcagcggcggcgggcagcgcgggacccagtactatggctgtgtactgctatgcgctcaatagcctggtgatcatgaatagcgccaacgagatgaagagcggcggcggcccggggcccagtggcagcgagacgcccccgcccccgaggagggcagtgctgagccccggcagcgttttcagccccgggagaggcgcctctttcctcttccccccagccgagtcgctgtcccccgaggagccccggagccccgggggctggcggagcggccggcgcaggctgaatagtagcagcggcagtggcagcggcagcagcggcagtagcgtgagcagcccaagttgggctggtcgcctgcgaggggaccggcagcaggtggtggcagccggtaccctctccccgccagggccggaggaggccaagaggaagctgcggatcttgcagcgcgagttgcagaacgtgcaggtgaaccagaaagtgggcatgtttgaggcgcacatccaggcacagagctccgccattcaagcgccccgcagcccgcgtttgggcagggctcactcgccctccccgtgccccttccgcagcagcagtcagccccctggaagggtcctggttcagggcgcccggagcgaggaacggaggacaaagtcctggggggagcaatgttcagagacttcaggaaccgactccgggaggaaaggagggcccagcctatgctcctcgcaggtgaagaaaggaatgccacctcttcccggccgggctgcccctacaggatcagaggctcagggtccatccgcttttgtaaggatggagaagggtatccctgccagtccccgctgtggctcacccacagctatggaaattgacaaaaggggctctcctaccccgggaactcggagctgcctagctccctcattggggctgttcgcccctagcttcccgatggccacggaagtggcagcgagagttacatccactgggccacaccgtccacaggatcttgccctcactgagccgtctgggagagcccgtgagcttgaggacctgcagcccccagaggccctggtggagaggcaggggcagtttctgggcagtgagacaagcccagccccagaaaggggcgggccccgcgatggagaaccccctgggaagatggggaaaggatatctgccctgtggcatgccgggctctggggagcctgaagtgggcaaaaggccagaggagacgactgtgagcgtgcaaagcgcagagtcctctgattccctgagctggtccaggctgcccagggccctggcctccgtaggccctgaggaggcccgaagtggggcccccgtgggcggggggcgttggcagctctccgacagagtggagggagggtccccaacgctgggcttgcttgggggcagcccctcagcacagccggggaccgggaatgtggaggcgggaattccttctggcagaatgctggagcctttgccctgttgggacgctgcgaaagatctgaaagaacctcagtgccctcctggggacagggtgggtgtgcagcctgggaactccagggtttggcagggcaccatggagaaagccggtttggcttggacgcgtggcacaggggtgcaatcagaggggacttgggaaagccagcggcaggacagtgatgccctcccaagtccggagctgctaccccaagatcaggacaagcctttcctgaggaaggcctgcagccccagcaacatacctgctgtcatcattacagacatgggcacccaggaggatggggccttggaggagacgcagggaagccctcggggcaacctgcccctgaggaaactgtcctcttcctcggcctcctccacgggcttctcctcatcctacgaagactcagaggaggacatctccagtgaccctgagcgcaccctggaccccaactcagctttcctgcataccctggaccagcagaaacctagagtgagcaaatcatggaggaagataaaaaacatggtgcactggtctcccttcgtcatgtccttcaagaagaagtacccctggatccagctggcaggacacgcagggagtttcaaggcagctgccaatggcaggatcctgaagaagcactgtgagtcagagcagcgctgcctggaccggctgatggtggatgtgctgaggcccttcgtacctgcctaccatggggatgtggtgaaggacggggagcgctacaaccagatggacgacctgctggccgacttcgactcgccctgtgtgatggactgcaagatgggaatcaggacctacctggaggaggagctcacgaaggcccggaagaagcccagcctgcggaaggacatgtaccagaagatgatcgaggtggaccccgaggcccccaccgaggaggaaaaagcacagcgggctgtgaccaagccacggtacatgcagtggcgggagaccatcagctccacggccaccctggggttcaggatcgagggaatcaagaaagaagacggcaccgtgaaccgggacttcaagaagaccaaaacgagggagcaggtcaccgaggccttcagagagttcactaaaggaaaccataacatcctgatcgcctatcgggaccggctgaaggccattcgaaccactctagaagtttctcccttcttcaagtgccacgaggtcattggcagctccctcctcttcatccacgacaagaaggaacaggccaaagtgtggatgatcgactttgggaaaaccacgcccctgcctgagggccagaccctgcagcatgacgtcccctggcaggaggggaaccgggaggatggctacctctcggggctcaataacctcgtcgacatcctgaccgagatgtcccaggatgccccactcgcctgagctgcccacgccctccctggcccccgcctgggcctcctttcctcctcctgtgcttcctttctcgttcctaacttttccttcacttacacctgactgaccctcctgaactgcactacaagacactttgtagaagaggagatgagagtttctagtcattttcctaacttcagggcttggaggtggtgtttgcactgctttttgtagagagggtcacctactagaagagaaatgcccagtcttagaggtgggtcaggtgtagagctggagggggtccctggctgctgaggggaccctaccagatgagccctgcctctgggagccccctaggaagcaccagcctggacctaccacctgcggaggcctgctgccccctggcggccagtgctgttagagtgctgccaagcacagccttatttctgccggggcctccccaccggagagcccagggggccggccgggttcctggtccctggctgggagcagggctttctggtagttggggcacaaaaccatcggggaaccacatgttgactgtgagcaaagtgtcttccgattagcagcctcagggatgccctggtggcctctccagggctgctcaggcaaggccccccacccatctggtatggaaacctgccggctccaggccagacccaggagccaagagaaggctgaagccagcttggctgtgttctctgatctaggccttcccagaggaggcgagcagaagctgtgccacttggaattgcaacccatgagttcagaaggcacactctgccatgctgagctccaagggtgctaccaggggaagatgggatctatagagtctctgggccctggccccagggaggagcacatttttcttgaccctcacctacctggtgctagttggtcaaccctgcctgcatacatgggctcctgtcatggggcccagagtcccttgcagatatagaaataggggaggagctcaggtctgcgccaggcaggaagaaggcaggcttctggcttccagaggtgccgcggtggcctcctggcatcatttgttattgcctctgaaacaagccttactgcctggagggcttagattcctgcttccccaatgtagtgtgggtatcttgtagggtatgtggtggatgccagggcgtgctccaggcacctcttcctgaagtctctgcatttggagattcgtggagaacctatttaagcccaattttaactgaaagccagtgagtctgatatggaagggaatgtaaaatttgcctgacttcttaagaacaaaacccccagctctgtgccccatgctccttggggcttgccacccactcctttgctgtcagaggtacaggagctgggagagtccaggagctagggacacagagggagactatggaccaaggtgtgtgtgtctggaggaaccactgcccaccccaccaccccggggtctctggggaactgtcaacctgcccacgggacatgtacatttccccttttgtgctggaagtgtgagtgacacttgctgggggtggagggtgggacacatgaggatgtataagtacagattttaaaaaaggaaatcaacttacacttcctggctcttgtttaaaacagtggtgagctcctgtgtgggccgacttgctaaaggtcacacacgcgcccggtggagcacgagagacctcgtggcagcatgtgatctggaaggcaggcaggacgggggcgttggggagccaaagtcaactctgggcctctggagctatagtgacttttgggctagaagggaccctggtggtctgtgcttcagccatttgcagggcaggggcatcattaattcagacgtaaagattctatgaatatggactggccaaaagttatccttactccatctgtgaaagaagtttgctaaagcaaatcatgatatgaacaaaaattacaggggacctgtttaagagaacaaaatgttccaagcactttaggcagacaccagctgtttgcaaacaatgtgctaatatgcaaatgatgtgcttattaaaggaggcccatggggcctcttattggcaatacttggctgtgggttacattaaatatgtgaacatagtatgaagtagcatcattttagggttattctgttacttagggtttttgttttctgttttttttttctctttttttgtatttaccgtgctagttctcttctacacctactctgtctctcaagccattttgccactcgcttccctgccatctggcccttccctttgtctcagtgggatagatggattgtgaaatggaatctcccagaacccctgccctggcagcctggaagaccgtgcctgcccagccctcgtcaccacagggactccttgggtcctggcagtgcatgtgccagcaggcaggacaaactctgtgtacctgtgcccaggtgaatgggcgcagggtcctcttgccctgtcctgcggggggccccacgagttcctggcattcagcactgcttagcattctcggaaggtttcttcaactgcttgcttttcccaggcttgcctttagtgtcatgtaagacatttttaagttatatttattttgttgggttttaaaattgcacagaacactaagaccgaaaggctggactcttgtttctccttgaaagctttgcctttgttttgaacttcctttcccacttggtagaaagagcccagaagcagccctggccctgtaagatggactctttcatccttcagttgtatttagctttgagtttctctgcatctgtccaccccatgtgtatataacccagcccctggctctggggtggtcacctcgtcagtgccttttgttctggaggagaggacccccccgcctgccgagaggctctcttcctgttctgcacccctctccccatgggaccttggagaaaactgaactgttacaaacccctgcacagtgcctgtcaaacagatgcaaaccttcctgaataaagccttggagacggaattc

SEQ ID NO: 23920 - DNA, 3618 bp, Homo Sapiens
atggatgcaaaagctcgaaattgtttgcttcaacatagagaagctctggaaaaggacatcaagacatcctacatcatggatcacatgattagtgatggatttttaacaatatcagaagaggaaaaagtaagaaatgagcccactcaacagcaaagagcagctatgctgattaaaatgatacttaaaaaagataatgattcctacgtatcattctacaatgctctactacatgaaggatataaagatcttgctgcccttctccatgatggcattcctgttgtctcttcttccagtggtaaagattcagttagtggaataacttcgtatgtaaggacagtcctgtgtgaaggtggagtaccacagaggccagttgtttttgtcacaaggaagaagctggtgaatgcaattcagcagaagctctccaaattgaaatgtgaaccaggatgggtcaccatacatggaatggcaggctgtgggaagtctgtattagctgcagaagctgttagagatcattcccttttagaaggttgtttcccagggggagtgcattgggtttcagttgggaaacaagacaaatctgggcttctgatgaaactgcagaatctttgcacacggttggatcaggatgagagtttttcccagaggcttccacttaatattgaagaggctaaagaccgtctccgcattctgatgcttcgcaaacacccaaggtctctcttgatcttggatgatgtttgggactcttgggtgttgaaagcttttgacagtcagtgtcagattcttcttacaaccagagacaagagtgttacagattcagtaatgggtcctaaatatgtagtccctgtggagagttccttaggaaaggaaaaaggacttgaaattttatccctttttgttaatatgaagaaggcagatttgccagaacaagctcatagtattataaaagaatgtaaaggctctccccttgtagtatctttaattggtgcacttttacgtgattttcccaatcgctgggagtactacctcaaacagcttcagaataagcagtttaagagaataaggaaatcttcgtcctatgattatgaggctctagatgaagccatgtctataagtgttgaaatgctcagagaagacatcaaagattattacacagatctttccatccttcagaaggacgttaaggtgcctacaaaggtgttatgtattctctgggacatggaaactgaagaagttgaagacatactgcaggagtttgtaaataagtctcttttattctgtgatcggaatggaaagtcgtttcgttattatttacatgatcttcaagtagattttcttacagagaagaattgcagccagcttcaggatctacataagaagataatcactcagtttcagagatatcaccagccgcatactctttcaccagatcaggaagactgtatgtattggtacaactttctggcctatcacatggccagtgccaagatgcacaaggaactttgtgctttaatgttttccctggattggattaaagcaaaaacagaacttgtaggccctgctcatctgattcatgaatttgtggaatacagacatatactagatgaaaaggattgtgcagtcagtgagaattttcaggagtttttatctttaaatggacaccttcttggacgacagccatttcctaatattgtacaactgggtctctgtgagccggaaacttcagaagtttatcagcaagctaagctgcaggccaagcaggaggtcgataatggaatgctttacctggaatggataaacaaaaaaaacatcacgaatctttcccgcttagttgtccgcccccacacagatgctgtttaccgtgcctgcttttctgaggatggtcagagaatagcttcttgtggagctgataaaaccttacaggtgttcaaagctgaaacaggagagaaacttctagaaatcaaggctcatgaggatgaagtgctttgttgtgcattctctacagatgacagatttatagcaacctgctcagtggataaaaaagtgaagatttggaattctatgactggggaactagtacacacctatgatgagcactcagagcaagtcaattgctgccatttcaccaacagtagtcatcatcttctcttagccactgggtcaagtgactgcttcctcaaactttgggatttgaatcaaaaagaatgtcgaaataccatgtttggtcatacaaattcagtcaatcactgcagattttcaccagatgataagcttttggctagttgttcagctgatggaaccttaaagctttgggatgcgacatcagcaaatgagaggaaaagcattaatgtgaaacagttcttcctaaatttggaggaccctcaagaggatatgggagtgatagtgaagtgttgttcgtggtctgctgatggtgcaaggataatggtggcagcaaaaaataaaatctttttgtggaatacagacttacgttcaaaggtggctgattgcagaggacatttaagttgggttcatggtgtgatgttttctcctgatggatcatcatttttgacatcttctgatgaccagacaatcaggctctgggagacaaagaaagtatgtaagaactctgctgtaatgttaaagcaagaagtagatgttgtgtttcaagaaaatgaagtgatggtccttgcagttgaccatataagacgtctgcaactcattaatggaagaacaggtcagattgattatctgactgaagctcaagttagctgctgttgcttaagtccacatcttcagtacattgcatttggagatgaaaatggagccattgagattttagaacttgtaaacaatagaatcttccagtccaggtttcagcacaagaaaactgtatggcacatccagttcacagccgatgagaagactcttatttcaagttctgatgatgctgaaattcaggtatggaattggcaattggacaaatgtatctttctacgaggccatcaggaaacagtgaaagactttagactcttgaaaaattcaagactgctttcttggtcatttgatggaacagtgaaggtatggaatattattactggaaataaagaaaaagactttgtctgtcaccagggtacagtactttcttgtgacatttctcacgatgctaccaagttttcatctacctctgctgacaagactgcaaagatctggagttttgatctccttttgccacttcatgaattgaggggccacaacggctgtgtgcgctgctctgccttctctgtggacagtaccctgctggcaacgggagatgacaatggagaaatcaggatatggaatgtctcaaacggtgagcttcttcatttgtgtgctccgctttcagaagaaggagctgctacccatggaggctgggtgactgacctttgcttttctccagatggcaaaatgcttatctctgctggaggatatattaagtggtggaacgttgtcactggggaatcctcacagaccttctacacaaatggaaccaatcttaagaaaatacacgtgtcccctgacttcaaaacatatgtgactgtggataatcttggtattttatatattttacagactttagaataa

SEQ ID NO: 23921 - DNA, 2178 bp, Homo Sapiens
gctcagtagcgatagcagcggccgtggaggtggcgttggggactgttttctctcggaggccggagcggagccgcgtctgactgaggcgggcagcaagcggccccctcgctccctccctccctcctccgcgccctccccgccgccaccagccgtcaaacgccaaccgccgctcctggggaggagccgcggctcgcggggccggagccaggcctgcgtccggacatcagccggagccggagcgagagccggggcctcggcgtccccgccctctccccgcctcggccagcgtccgccgggcccccgcgcgtcgcgccatggactcggacgagggctacaactacgagttcgacgaggacgaggagtgcagtgaggaggacagcggcgccgaggaggaggaggacgaagacgacgacgagccggacgatgataccctggatctgggcgaggtggagctggtggagcccgggctgggcgtcggcggggagcgggacggactgctgtgcggggagacgggcggtggcggcggcagcgctctggggcccggcggtggcggcggcggcggcggcggcggtggtggtggcgggccggggcatgagcaggaggaggattaccgctacgaggtgctcacggccgagcagattctacaacacatggtggaatgtatccgggaggtcaacgaggtcatccagaatccagcaactatcacaagaatactccttagccacttcaattgggataaagagaagctaatggaaaggtactttgatggaaacctggagaagctctttgctgagtgtcatgtaattaatccaagtaaaaagtctcgaacacgccagatgaatacaaggtcatcagcacaggatatgccttgtcagatctgctacttgaactaccctaactcgtatttcactggccttgaatgtggacataagttttgtatgcagtgctggagtgaatatttaactaccaaaataatggaagaaggcatgggtcacactatttcgtgtcctgctcatggttgtgatatcttagtggatgacaacacagttatgcgcctgatcacagattcaaaagttaaattaaagtatcagcatttaataacaaatagctttgtagagtgcaatcgactgttaaagtggtgtcctgccccagattgccaccatgttgttaaagtccaatatcctgatgctaaacctgttcgctgcaaatgtgggcgccaattttgctttaactgtggagaaaattggcatgatcctgttaaatgtaagtggttaaagaaatggattaaaaagtgtgatgatgacagtgaaacctccaattggattgcagccaacacaaaggaatgtcccaaatgccatgtcacaattgagaaggatggtggttgtaatcacatggtctgtcgtaaccagaattgtaaagcagagttttgctgggtgtgtcttggcccatgggaaccacatggatctgcctggtacaactgtaaccgctataatgaggatgatgcaaaggcagcaagagatgcacaggagcgatctagggcagccctgcagaggtacctgttctactgtaatcgctatatgaaccacatgcagagcctgcgctttgagcacaaactatatgctcaggtgaaacagaaaatggaggagatgcagcagcacaacatgtcctggattgaggtgcagttcctgaagaaggcagttgatgtcctctgccagtgtcgtgccacactcatgtacacttatgtcttcgctttctacctcaaaaagaataaccagtccattatctttgagaataaccaagcagatctagagaatgccacagaggtgctctcgggctaccttgaacgagatatttcccaagattctctgcaggatataaagcagaaagtacaagacaagtacagatactgtgagagtcgacgaagggttttgttacagcatgtgcatgaaggctatgaaaaagatctgtgggagtacattgaggactgagaatggccctgcataaaatgaactctgaaaactttaccatctagagtgctcatgcaattaaaacaaaacaaacacaaacaaggaggcactaagcctattctgacaccactggtctgtagtaccagaattgttttgttaatggaaagtttaagtaaattatattgtaataaaaaggtagataaaccattgt

SEQ ID NO: 23922 - DNA, 103330 bp, Homo Sapiens
gatcatcttgacagcatcccatggggcccagagtaagccctacactgctctgggaagcgtcatccaatccctcaaatccatgcagtcctggcttctgccaggcactggcacatgctgccctcctgatacagcatgacagacaacctgggctctgttagtggctttattttcacctttaaatttaaaaaacaatttcttcaagtaataattcaaaacaaccagtggttttctatttctaaaaaagtaatccatgacataaatgaagattcgaacttatgaatgtctaggcactgccaggtactgtctcagaaatctttcactatcgtccatctaactcttagctgttctccaaattcaagcttacagaggtctttgatttcacctaagttttttttcttaaaatcaagtgtcttctgaggtttgtagtgcacatctctagtgccagttctgattcacaggtcttgaagtggcttagtggttttcatcagttattttccaacgcaccagtgacttttctccccagctggattataaattcctcaggctgggattgcagctttccagacccctggcacaggctatttggtgcagttgtgctcaagaaatgtgtgcatctccatgcatctcaatacagacacaccgccatttcttattctatcttctgtctttataaaattcatctctgaccactttataaaattcgtcaagaacctgccagagctccccatttcctactgaattaaatacagagtcctctatgagctctttgagatcactgccttgcagcccaaacttcctttcttctattcccaaatgaatatgagactgcatcaatgtgaatctccacctgggtttgtagccaggcgggcatgctcagcatctgtaggcctcagttctcacacacctggccatgcatcaccttcgcctgggaattgtgtctatttcaccacaattaaaataacctgggaagcttgaaaaaaatctctaggccttatatcaaccttagcatatgaaaatccgtggggtgtgaggcccaggcatgcaaattttaaaccaacacacccgatgatgcttatatactgcccagcacagctcatggccccgaatttggaatcagtcttgagcaaactgtcagtctgccactgcatttagcaacatagaaacacaaaaaggacttttaatgagctcttactctctgtaagtttctatggttcagttaagacactttccagaaggtcctggaacttatctcctgtatcctcagaaagggcctcctaacctttgggccacaaagcgttgagaagaaagtaggttcgtagtctaaccaggaagccagtgtagaaaaatctgactctctttccctctttgtatcttatctctactcacctactagctttctaacagttgcgactagaaaggcagtgccttatcaaggagttacaaggtgataaaccattggaaacccgtaaagaggcagcaggtgccattcggatctcaatttcctcctcaaaaaataagagccattgattagggggcctctaaattcttgtactgggaaaaaaatataaaaagagagccatttctaataaatccattttgctaattctcatatgcatgtcttttatgcaatttttaatgtgaaattgggaattgtctcgcaattgagatgtacttttaatgtgctgttcccttcctctctcactgtggtcattaacatgttttagatataatccatgatgtactataatcaagaacacttggaatattttatgttggggacacagcgtttccctccctgttgagtgtttagtttttttcccttctctttgctgtctgaggagagaggagaaaaaagccctatgggagaattcttgagagaatagcaattttaggagaaaatctaccctcccagaggccttgttagcccaggtaatgcttgagaacatcacctggggatgctgggagtgaggaggagggagaggagaaggggacagggacccagatgtgggcttcctgggtatcactgagcactctcctggcctagaaaagggaaaggcccctgggagtcttgggtgctagaaaacagacaaaagaaattttaacaaagtcaaaggtgatatttctggcagctgtgaattgaaatgagcagttgccagctctgggcagcattctaagtgttacccagaaaagcagagctgctctgcaggagctgaggttgtggggaggaagaaggcccaggagctgagctcatcccttctccccgtttcatcacttccaacatctctgggatgtggaaacatgatttgaaagccacagcccttctcccaggcaagccctccatgaggccacatgggaaacatttttccaggccctgggaacagaagtaatgcctacgaacagcaaatggttaagtcctataagcactgatcttgtttctttgtttgctttggctgctaggaatcttagagccacaattcaagttgatctcttgtagccaagtccctccagtggaaggccttgtggtattcctcagttttatgttctcaatgtaccctgcctttgtttccctagtctaccattatttttccatttatgtggtcttcctaaccacttcattctttgctgttgctttgtgtgcggttgtgaaaattgcatcaaatgctttggagcaaggcaaacaaactgcctaagttgccatagtcttggggagggcgttactgcagaggtgatggagggtgcagctgctccactccacctgggggacgagtggcagctcctttcatggggctgacactccctctttccggaactgccgggaccagctctttgctgtgctggacctcctggttcccctggtgctgacccctcagtcccatcaaaaccaccagcaaggtggccttgaatgccacgaaaaagcatgtttgttcacgtacatccactgcaatgggtgtgttgtttatgcatctgctgtgagttactgccatatgcatgggcacaaacatacgcacgctcacacacgtgcacacacacacacaggtgctcccacacaacatgtgccccctgcatgcacacacatgcaaccagacgtgcacacatgcatgcatgcacctccctacatacaaacatgtgcccctgtacatgtacacacacacacccatgcccacgcacacatatgtgcacacccatgcacccatacctatgcgcatacgcacctgcccacactcaagcacttgcacacacagcacacatgcacacacacacacaggcactggctcctgggcctggtgctatgacgaggaagaaggaaatataaatggaatatttcccactcaaggaactagctgagtgccagtgatagcttcatggaggccatccatcgcggtttccctcctcactggtcaggcatagggaccccattgtggccatgcccccctttagctttggtgacaccagtgactcttttgtcctttggtttggctgagtgttgtgtgcttgtcattgccctatacgtgtttaaaactcttcctttgttccaatttccttagagtatttgttgtggtttttaatactacctgccaagctctcaaccacggctgacttggtagttgttgacaagtgagcagtggatttgggcctctgccttaaactctatgtgaaccagctcactgggacagagggcatggccagggcttcagggcccccagggccttacctgccactgagctcactttgggactacagtaggctcttcagccaacatgggcaacagatccttgcccccctccttttttaagactttccttccgggtgatgggtgtcctctgagccactcaacttggcccactttgcttgcagtcccgagccatgaccaccatcctcagtgtaggaataataggctggcagagacaacgtctccatgactggagcgtgggtggcttgggctgataccctgcccagaggccctaccagggccctactgggctcctgctcagaaccgggctcctgtgtatcttccctccaatcctggggcacggtgagttgtgaaggcacagtaccgtttgtcaccagcgtcccctgcctcctgttgctcatgctgccttccttttctgcccccgtgtggtttcactgacttgaaaggcccatgcttctggctgaaggtgagaaagagaggtggatagagcatgccgggccccgaggagaaggcaggctgcctgggctgtaggtcagagggcaggaggactgtaagcagggcccagatgtgcacagaggatgactttagaggaggtgaccacataatatcccaacccaacccacttgcttggttaaggggaagggggctgaagcaatcactgccctgggataagaagcaagaggggcgcctgtagtcccagctgctcaggaggctgaggcaggagaatgacatgaacccgggaggcggagcttgcagtgaaccaagatcgtgccactgcactccagcctgggtgacacagcgagactccatctcaaaaaaaaaaaaaaaaaaaaaaaaaaaagaagcaggacgggggccaggcgtggtggttcacacctgtaaccccagcactttgggaggccgatcacctgaggttgggagttcaaggccagcctgaccaacatggagaaacctcgtctctactaaaaatacaaaattagccaggagtggtggtgcatacctgtaatcccaactacttgggaggctgaggcaggagaactgctcgaacctgggaggtggaagttgcggcgagccaagatcacgccattgcactccagcctgggtaacaagagcaaaattccgtctcaaaaaaaaaaaaaaaaaaaaagtaaaaaggaagaaagaaaaaaagaaaaaagaaaaaaaaagcagccggactgggacctgtggccctagctagaggctgtgccatggagctcggtcttcatgtggaacacactggggttgccactgaagggtttatttcacaggacaatatgggatttgccttgtgatttttagggatctctccagcttctgtgcccaggggccttgtggtctttattccactttggctccttagccccatggccacaccctgaccatagcagcttccaggactgtggtctgatgtgccagtctccactcagcccagggccccagcgctcccttccctgatggcagccacatggctggtgatagagccgcatcccatttccctggtacctcatacaaccattccccagccccgatatcacacccatgaccctctgtttgcccgccttccagaccctcacccctggaaccacctggggctgttttcttcaccctaacccatggggccgagtgcagctgccaaagaccccacagtcgagtgggtgtggactcctcttatgtgtggcccaaccccagctgctgctgggctcttgttagtccttctgtgtaccttaggtcagggccctgtcctactctctccagggctaaatgccctcagtgtgcaggttaagctttcatttaggtggagatgaccagtgagtagttggaggatggacaggaagcaggcactgggtggagagggccagggtcagtgggagtagctggagcccatcaggggtgggagggagaagagggctgcagcagagcctggaatgcactcactgtccccagagcccacccctcccgctgggttacctgtctcatatggtggcatccacacttggcaatgaatccaatcagacctgggagtcatttgggctccttggtcccctttgtccccactcccctgatatccattcagcccccagctcatgtttctcactgtagttcccatcatctctgaaatatcttccttccccatggccgctgggtctgcttcatccctggagcgcagggtccatgacttattcacctgcgtgtgccttgatggggagctggcctggcaaacagaccagtgttccttacaagtttgcttcatgcaaatgttatctgtgttgtgcaagcctcagaatcccctggagggcgtgttaaaacacagattgctgggtcccacactgcagcctcagattttgcagttctagcaagttgtcaggcaatgctgatgctagtggtctagggcctgtgctttgagaaccagtgctctcgtgcatggactgattggctgcaactatgctggtactcaacgtatggtctggtccattcagatggaagtggctcaggggtccatgcaacaattagaatgcccttagatccatctgcttttttttcttttcttttcttttgaggtggagtctctgtgacccaggctagagtgcaatggtgtgatctcagttcgctgcaacctccacctcctgggttcaagcgattctcctgcctcagcctcctgggtagctgggattacaggccaccaccatgccagactaatttttgtatttttggtagagacgaggtttcaccatgttgacaagactggtctcgaactactgacctcaggtgatccacccgcctcggcctctcaaagtgctgggattacaggcctgagccaccgaacccggcctgatccatctgctttttgtggcatccttattctactggacttccaggcaattccagccaattgtaacttgttttcacacaactcagtaaaacccaccccactgtccccactgtccccattgttcaggaactgtgcagttgtttgcgaggcttaaggacaggtctgatttggggtacacttgaaagagtcccatatctcttatgtaccagatatggactctttttaagagtcccatatctgttatgtaccagggcttcatgtgtgggatttgggagggcagtcatgctgataagcatttagaggtgcccagaacagttctttatgcaggaaggatgatgacaggttccattatcttgataagagtttcttttggatgccatccaatttccttgtcctcattctttgctccccaagcaaactattggtatataattttgtccctcaagcagactaattctggagccaaagtatacaccctattggaaataaatgaattggcctcctggtttaccaattagtgtttggtgagtacaattagtgtacctgggtttcctggaacctgatcactctgggctgagcaatctccgaaaggctggcttagtgatgctatcctgcctgaaatgctaccccgggctggtgctttggtgactttgttcttggacctgaaaccagggtttctttgctcagttccaataaccctttggagaggcagcacactgtgcttcaccaagctcaagtgccttaatgggaaagagttgcaaaataacttcgggaggatggtgattgttggtgaagtagaatggctcttggaatctggggtggaggaatgagggtagcacagaggatccgggagtgggagtcacagcttcaatctccttttattttccctctttgctgtaagcctcccctgaactgctagttgccttcgtgattataaccaggtcagtgtagatctagtgttgccattaaaaatattctctcttcactctttcggggataggccacttaccaccttttgtagggcttatgtcaaaaaatctgcactctccctgatgacctcagagccagttttccttctctacccattcctttgaatggttctgaatagcaagatgtcctttggtgtagaggactcaaacctaccatttgaatggaaacatagtcttttcgtgggaaggggaaagattcagtgtcttttggaaaaataccaggctttggggtcagacctcgatttaagctctggctctgccagtttctgggtgtgtgactttgagcaagttacttaacctctctgagcctcagatttctcataccaggggcagttagtaggtaaatgtgatgccctatccaaagtcgtcctccctaccacagctattctctatgccattgccttgttcatttcctccataattcttaccacaatctgaaacccttctccctgctgattgatttcttgtctgttgtctgttttgcctccctgtgaggacagggagcatgtccatctggcattaggctgcagccccaccctctagagcactccctagagcagtgtctggcacattggaggcatcagcgtgtatttgctgaatgagcagatgaatgaacagcattatccttcggcaaacacagaactcacttgaaccatctgtgcaaaggggcctggtcctcctcttccagatctgcccatgctcatccagtcaatcaatctgcagacctatctatctatctatctatctatctatctatctatctatctatctatctatctatctgcatatatatatatatctatatatacaatttttttcgagatggagtcttgctctgttgtctaggctggagtgcagtgccatgatctcagctcactgcaacccttgcctcctgggttcaagtgattcttctgcctcagcctcctgagtagctgggactacaggcatgtgccacattcccagctaattttttagtatttttagtagagacagggttcgccatgttggccaggctggtcacaaactcaagtgatccacccaccttggcctcccaaagtgctgggattacaggcatgagccaccgtgcctggcctgaatgcagatatttcttgagcatctactactatgtgtgaagcattgttctaggttctgagtatacagcaatggataaaacagacaaaaatcccaccttgtatagcttgcattttagtgagagcagacaggcaaaagaataaagaagtgaaatagaaggtggccagatggtgaggagtgccgtggggagaggatgggagtgttagggagtgctggggaggggcagtcggtaaggctgcatggaggcggtgctatgtgagaaaatctctggaggaggggaaggagtgagtctccagacatttggggaaaaagtcttcaggcacagggagcagcaagtgcaaaggccctggggctggatgatggttacagggggcaagggggagagagaggcaggggtatcttgtgcagggccttataaaccatgggagggctttgagccttactctgagcaagatgggaggcatgcaatgagatttctgtgtgtcaggggtccctagagggctgtgtttgttgctggaagattccacggttggatggcatcctgatgaacgtggagctcatctgtccttcagatggggggcagcagctgccgtgagtgctgtcctggacatggtctcagctctgtgtgtcatttcccctctctggacctcatcgtccccagctggaggctgagtggtggaggagaactggctcgtcaccagcccccgctgaaccacaagacttctttctggggacccctggacagcatgggtgagccgctcacaatccccaccttcaaagccattgcctgccaagcacctgctctgctggggcactgggatcacagaggggcagcaggagacaacaggtctcagcttgatcctcaaagcccagcagggaggtgtggggcagtggggggtggggggagtgagtgaaggagggtaggaaggggtccccttataacccgattgggaagaccggctctctgagcaacaaaaatgagcgacattataaatatcagacatacaatgtcaaaagattgttacaacggtaacgatgaccagcaattatggtgtgctactcaatgagggtaaaattagagtttggggtcagactgacacctgaaggggagccctggtcacacagattacaggattcagggactggaaggcaaacagcagcagccggaaggtgctacagccccgacccttcccaccaggctccccgtccttctgtccccctcgtctgtctgtcaggtcacagggctcctggttcagaaatcagagacccctcagaggtgggaggtgggaggggccctgggctgcctccctgatctccgtcttcctctggcttcccagggcactggtctgtgggtagaaagaatctttagaagaaggagaacaacgggctgttttgggaagtctgcctgggaccccagctcagcttcgtggcagggatgtgtgcctggcagccccaggggccctgctgggcctctcagtgccctgtcttatgaagggaggtcttggcttcccacaggtaatcctcagctctgacggcaggtggccctaggggaggggcctggaaggggactccctcaccacactcgggagcattccactggcctgttttatgttttggggcttccccatgaattccaatttaggaaaggattctgtagctttaaaaaaaaaagccatacatggccgggcgcggtgactcatgcctgtaatctcagaactttgagaggccgaggcaggcagatcgcaaggtcaagagatcgacaccatcctggccaacatggtgaaaccctgtctctactaaaaatacaaaagttagctgggtgtggtgatgcacgcctgtagttccagctactcgggaggctgaggcaggagaatcgcttgaactcgggaggcggaggttgtagtgagccgagattgcaccactgcactccagcctgggcgacagaacaagactccgtcttaaaataaataagtaaataaataaataaatggccacatatgatccagggggctcttccccataatgaccagtcctctggtgctgggatttaggggcttggtcccacctcctggagtgtgctgtgggggtgccgctggcttaattgcctggggaaggtgctttgcaaatggggcccgggcgccgagtctctgagctttaatgggcttatcttgcttcctgttgttcttcatggcagttctggggtgaataaaatggaactttgtggttgtggtcttccaacccctgctgtttaagcagatgcttctaaccagtaggaaggggaagatgagggtcctctggcaggggctgctgctggagaaggttgtccccctgaacccttctcttcgtccaaggaaagacctccctaaatggtgtcttatgagccacaaaatggccttgggacaagatgaggcacctgacggtgaaggctgaggtcccacacggtgttggcaggtggccctcaagcccattgtcttctgcccgcatgcccaggaccgccacatccttcctgttccactgacgtcacccatttcccacctgggatgcctacctgggctggctttgaaatgacagctaggcttcaccacttccttcttcctggtgtctcctgaacaaaaagctcacaaacccttattgtctcaggatcttttctgctaactaccatgggcaaaagatgcagtcaaaacaacaaaaacggggaggttacgcagttcagaaaatcccacacattctcaagaagggtgtccccgccaagctgagagatacctgggacatcatgctttcctggaggggaaggctccctgcccccattcctgtacagccgggagagtcgctcctgttcgtcatcccatcttctcgctctcatttgctgggctgacctctgctggtatttcaagactgtttggtgccaccctctctgagagatggcctccctcatctgatttagatgcttttctttaccttctcatagcagcttgtactaatacttgctaccccctgttgaaattgtcaccaggcaggtctgtctctaagaccagacagtctgcttttgtcttggaaggacacttattaccccttcctgttcacaggtatttagtattcttaccatcatctttccctgctgtgctcccggcagacaattctaatctgtcatgacactctgatgatcccagacccagctgcattatcattctcagtccaacactccaggaaccaagggatcacaatccccttctaagaggaatccagcatgtgcctggtcttgggcattccctggtaggtgagtaaccctgttctctcgtcacccagtgcttatcagttgctgatctggcagtaggaggatgaaacacagtgagcctattctgtgttcctattctactcaaggggtgaagaggcacctggaaacaacaggaagagttgtaggattaaaaaggacatccaagattgaatgtaactttcatctggatgaagccaaaggcagacttccagccctaaattctgactggtggctgacacaggacatgggttcatggtacccttctagaatgcagcatagactactgatgaacagtgcatggcaaagaagccaagtgtcatttcatggcctcagcctctcagctgagaagcagggcacagctcacccaggctaggaaaacagaggcaagtcctggaaagctgtctgcttttaaccaagagttactggccatcaagtgtcttggttaaaaaataagtgtcaggcaaccttcttggtagatagagtgtgttgggggcgattatcagagtctggtaatgacttctgagggtcccaaagagtgaagtgatatttacatagcaaatccaaggagggggattgtgtgcaatataggtggaggtgggggcaggttttgtgggtttgccaagctccaagggtcatacaatgtgcatgtcaaggacaagaaatcaaagccatgtgaaatggttggaggtggttcagtttgaggtcatgtgtttctcagctcctgttgtggaattagtgtgagacccagaagactgtggccaaagctattatggacccatggtctctgtggactcatccctcatgccttctgctctctgatcacatccacactcatgtcatcctcgttcttccaaggtgaggttactagcactgcacaggggctgatgagagcatgtcctgccaggaaaaaccatcccaaagagatgctttcccccttggcactgtgtcctgtatttgctcagcagcccacatcctgttctgccccaaaccttggggcagacttcccacaggtgaatttgaactccccaagattaaaatcaagcctgtattcaggaaacacttgggagtcctcgaggttcaccgagagggaagttggaaatttttcacttatgtcagtgcgtttgcagttgggcaacagccagattgttcatatggcaatcaatcaaacacacctaagttttttccacatattagccatcgactgttagcaaaagccctcacttcctttatattgatttatagcagcagcagaaatataccaccctagaggacacacctccttttagctaggtacctataaatgtccaggattttctattcaattgagaagaacccagcaaaatggggatctccacagtcatccttgaaatgtgtcttttatggggacaagttctatctacaggtattacgtttaattattatattcattaatttctctcctgcagacccaatcatggcaaattatatctactactttccattacaagggaagttttatatcaaagagtgggtagcactttgctgataattgtaattgtttgcaggtattcaggaggaatggctcttttttgttttatttctggctgagaaatataaatggttgtagttagaaaaagccagtcattaagtcaatgttttcagtaagtcattcaactaaaggaatgattgatttgtcttagaaaaatccctgaagtttaggaaaggtggatgtgtattattaagaggcccttaaactttgcagcaattggttaaacacacagtttgtgtgctatgaaaacggacagaaaggattcccactgcaaatgccctttatgtggcttctttctacaggtgtgtctggcttgatggctaatatttgccgagcaaaatcaggtcaagtaattgagcgcagacaagatcattaagattccaagtttgtcttggaattccaagtttgtctgtcatgcacagctttaaacaaacacttgaagcccagtcactcaagcatagctgtatgttcttagagagtcagatgataaacgtgagagagccgtcggtagcgcactctgattgctgcatctcaatggcattttgcagagatactagaggaacaagtgattctcagtttgcctattctgtctctctcttcctctctctctgcctctctctctctctctctctctctatctttctctcttatctattgtgtagttattatcatcttttctctcccctctctctccctctgtttctgtctgtctgtgtttctctctctctctgtatctttctctttttcccatcttttgggcagatatcaccttttcttcctcctcctccctctgtttctgtctctgcctttctctccctgcccccctcactgtatcttcctgtctttctcatctatcaggcagttattacctttcctccctccctcctcccccttctctgtttctctctccatctctctttctctttattgggcagctattatcacctttctctctgtctctgtctctgtctctctttctcttcaactattgggcaactattatcacctctcctctctctctctatctgtttctcttcatctgtcaggcagctattatcaccttccctccccctctctttttctctctcactctttctcatcatctattgggcagctcttatcacttttcctccctatttctctctctctctctccctttgtttctatcttctttctaccttccttccatccctttttctttctctccctctctttattcatttctttcttccttcttctcttttatctttcctactgccttttttttcttttatgtcaccttttgctagatttatgaatttcaggatacagggtaaaaatcacctaattttcaggtaacttccggaactctcactctccccctaggctcagtgggggaagatttgaagattaaggttcatctggttggttgctttcatgaaagcagcacctcccaacccagccctcacacccgggtggtagggagcaggcccaccccctgtgatgagcgtgtggagggcctgggggccactaggcccaggacctcaggggagtggagactgggcatcctcatcctgcctccatcagaagcatctgaaactgggaggctgcgtcctcagccccagctcttgtcagtaccgagttcaccctccagattgtctctgaaccatgacatggaattcacatcagccactgtagacagggagtgaattgccttgtctttatctacaaagaaacaacaggcagcagtgctcttggattgaggacatttgtagtttgcccatgatgttttgtgcatgcatatggacagacatgcacatatgtgcatgcatgcctgtgtttgccattcagaggtgggaattcatgctctctgaagtggacccgtattctcttatttaaatcttctaacattcctgaagttaggaacaattatttccacatttcagatggggaaactgaggctcagaaaggttattggcttgtccaaagacagcactggtgagtggctgggttagggcttgaatctggatcaaattcactagcattcagatgacagctctggcccactggcccttgctgctccttgcagggaactgaggtgatgaactgaactgtggcatctaactcagtgcttggagcctgaccacagagctttgtgctggaagtaccgaggtggcaggcacctgtcagctctggtcttcatgcaaactcttgagaaaaactcagtatgcccaggtttgtgctgggcaggaaaggctgtggtacccactgctagccccagcaatgcccctcctctgccacttgcctgctgtggatcctctgtgaccctcagtttactcatttataaatggaggttatgttccaacccatgcaatatctggcacatagacagagcctcagaaccatttagtgttactactctagacattttcctcatgttttatccaaaagcagcttcctaaaagtaatgtgagctcttggattggatcctgcaacagaaaatgaaaaactggtgaaatccagataaagcctggagtaaacttagtaggaaggtaccagtgtttgttagcatgagaatcacttgaactcaggaggcagaggttgccgtgagccgagattgtgccactgcactccagcctgggtgacagagtgagactctgtctcaaaaaaaaaaaaaaaaattaataaatcattttccagaagtgattcttctcccttcaggcaatttaccaccattcccacaatggcagctggagtaacctacagctatgtggttgattcttggaagactacagattggtctcagtatgtgcagaagggtctattcaaaatgtgtggacacagcagaaccaggaacaacttcaatgtggtgttccatgctgtggatgagccttgtcaaggctctggctggatgagttcgactgccatgggattaggcaggatacctgggacctggcagtgggaattgcatggtgtcaggtagactgtgtttaaatggccgagttttgaatggaaggctctcttaggcacatctatcagctcgttcttgagtgtgggagcagggatggcacgtcagaaaagaggtggggatgttctggtacagagttccctagtttgctatctctgttgaaagaatgttgtggtttctattccgagtttcttcttcattttaagggatgcatagccacatggtttcagtggcccccttcctaagccatcaatatgaagcagggcagctgggggagcccatcgtggagctcatattcaggctgttgaggcaggtgaagatgttctctgacatatggcaagtcctgtcactggcctgttggttccattagagaaattcaaatctctgaactgtgactgtcactgctctcaggacccacatttacaaagaatctgaagagccgggcgtggtggcacatgcctgtagttccagctactctagggctggaggcaggaggcttgcttgaacccaggaatttgaatctagcctgggcaatagagcaagactctatctctaaaagtaaaataataatctgataattttgtcaaatgccttaatcctccttttaccaggaagtaaaaagaaaaggaataatgaaagtatgctggaattgttaataagaatttaaacatagcagacctttttatatcacatacattttggtatataaacatcataaaagacaaaagaataccatcacaggtatttttttttttttagcaaaataagatggttgaagttcttgttgcaaaatatcatgtgatgaaatccctatcgaagtgtgtaagagtaccgtattttatttttgtccttagaattgtatcattgaccctggattcttgaatttgagaaattcatctaggatatcaccatctgaagactcatagtctgagatttctgttgtacaatcaattctaccattattagtatctggagtgctatatcttgtctctatattcctcttctggttcatctaattattgcaaaaacatcttctcttgtcagttttcttctctttgccatcacaagtagaaaatgaaaaaatttgaattcttaactgcattcaatgaaagctaaaaacagactatgaagaaagtgtctccagtcttaaaaaaaaatcttcttgaaagataatacaatactttgggcatggaagaattatgacttatttcactagttcatcttccttctaggcaacttcaccattctaccattttcttactatttaataattgatgaataatgatgcaatactttcttggatgatgaaatagtgaaatgcttcaagacataggaaaaataaaatcagaagccaataatgaatcttggatttataaaaggatctaatggatccatatggtgattacaagataggatgagttttatccttttttttaaatgaataaatactctctctgatctttgaaagacctctaaaatatataaaagttgtgaaatatcaacactcacgagtatagttagaactgctcaaaaagaaactcaaaagctacagttgagtccgatggaccttgtctggcctcactgaatataaagatccagggatctctagatttccatttgcttcaagatggaataaaatattttcaggttatgagtcagaaggaacagaatatctgacattaacatattttcttctttaggggtcatctgagtggctgttgcagctatactcaaatttcagactggacaaccagcttaagctgtcttctcttgtccagcccttctttccaagcatagattacatcctgtcaccataagctgtagtgttaggggcctagtaaagagacatatgcttcattacatctaaaatgattgagctcctcatatccaatccacttgctttaatccgctattgcagaattcatttagcaagaacgtcggggacacacaaacccaagattgagccacagcgccctctggtgtgattgtacggtgaagcgaaagccaatttctgtgacttgtaggaaatcatttctaaacagtgtttctaagacgaatttgtgttctttccaggtgggtggatcccaaggactacagactacggtaagaccttttcttcactcctcttccctggtggggttggccagttctcctctgctgctgttggctagttgaggctgagcacagctgaggtcacagagcaaacgcctgccttgtcgaacgcaggaatgccggggggacaggagacgtgggtgccaagacctggggcatgtctcaagtgcccactcggccaatcccagctgtcattctccttcctcttgctctctgactctcagtcatttatcagatgaggttagtttcagtttggtgtgaggagagatagttgaaaataaaggttagtaccttttcttttttttctttttcttttttcttttttttttgagacggagtcttgctcaccctgtcaccagactggagtgcagtggtgcaatctcagctcactgcaacctccgcctcctgggttcaagcaattctcctgtctcagcctccagagtagctgggactacaggtgcgcgccaccacgcccagctaatttttgtagttttagtagagatggggtttcaccatgttggccaggatggtcttgatctcttgacctcgtgatccacccacctcggcctcccaaaatgctggggttacaggcatgagccactgcgcccggcctaccttttcttttcactaataatgacaggtatcttgaagataactaacatctaccaagcacttgttatataccctgcataaaatgattttcatgtatgaaatgaattgatatatttttaaaaaatacttaaaataccacctggcacctaataagtgctcaactaatgcacatagtgagtgctattatcatgaaatctttccaagaacactttgaggtaagtaatacgattatacccattttgcagatgggaaaaccagggcacagttagctaatttgtcaatatttctatgtctaagatcatgtgtctggtgagtagcagggcagagatttgaggctaggatgggtgcctcctcttacccctgccctggtctttgactttggctaaatgtccctgcctctccagtgagaatgtgcagagaactttgtgcccaagtttaatttttcagggccttccatgtgttcacttaggatgactctgctcctgggcccttggccttgttgaggtcagtccctccccttccaggacatgacttgagagatccagaaatggcctgggaaaggcagatttctgaccaacacagagcaagggagaggctgaggcagggagaccgagcactctcctggagggaccattcacagggtgaccaggagggggcgcattgccccactgcacctctaggttcatctctgatccagaagagttgcagatggcatagaaggtagggtgttttgctcgtaagaggggcccttccgaataaggcctcaggtctgaacaggcatctccatggattatgtccctgagactggggaaggacagagcatgggaagtccagaatgtactttggggataccctgaagatggtccagctggcctttcctccctctgggaggaaaagcaacctgccccctccctttgcatcccattccagcctctcactctgtgaccacaagtttctcataatctcaaactcaccattgaaaagccacacccaggatctggctcctactgtcaggacggtgggctgcacccctcaggacctgtacctattttcctcacaccatcaatacagcttaccccagtgggtggtctagtggcatcacgtcgggcaggaacatggtgcttattgacttcccagcatggccagctccatggtgggaagcaggctcaattagcccctcccaggagaggaggctggaaaagtaggtcgaggcttgctcttggacttgatcctgatgggactggagagtgtactgaagcattttgagcaaggaattgaattgaatatatttgtactttctaaagataaaacttgaaaaccacctggagaccagtgaatcctcttagtatagaaatgggtgcagagtaagcactccatcgatgctgattgaatcaatgaatgtggatggactagagaaaggaagagcagacactgaggattcagctgggaggaggccaggttcaaggggatgaaggcttatcccagtgaaatggcagtgggaacgacacggaaggaatgaccttggtgatgttagatgtaggatgtgaggagaaggaggagtcgaatatgatgcccttattcccagcatggttaatatggagcatgatgacatccttaattcaaacggagggaagaggctgtgttgagtttgggatgatgtggggggtaggatggccaggaggccactgaaaatgctggtctagagctcagggctgggctgtcagggctgagtcagaaccagagaggtggatttgggggtcttctggaaagttctcagagtacatgaggttctccagggggaaaatacagaatgagaagagggcaaagagagaacatggaagaacaaggatacttaagatcctgctgggagaaagattgtaaataagcagggtggtgagaggaagaaggaggagtgaggagggtagggatgcaagtcaagggggccgagagcaccaagataaaagcttctggctgtgtcactgcaggtctgcctctgaggctggtgaatggaggtgaccggtgtcagggccgggtggaggtcctgtaccaaggctaatggggcactatgtgtgatgacagctgggacgcccaggatgcagatgttgtctgcaggcagctcggctgtggctattccatgtcagccctgggcggggcccactttggtcagggcttgggtaacattcccttgggtgacttgcattgcttgggaagggagtcctacctgtcaagctgtccccacagcggatggtacaaccacgaatgtggccacagggaagatgctggtgtcatgtgctcaggtagtgtggatatcaccttgctctgtgtatctgcaactctgagtcaatattaccacacataagtatgtgtgcgtacatatgtgtgtgctctacagcttacctgctttgcagtaagtcatgtcttaattgatattggagggcaggtggtactggcccttttcatagacaatgaaggtcaagggatcatcggccagtccttctaaagctggatatagtggaggcaggcttcagtctcaccccccagagcctgctgatgcaatcacctcatggagtggttttgatgagcagcatcacgaccacccccggcctgggataccaaatatatatcttcctaagtggcagtttctcctcctttaaaagctgacgaggatggaggaactgctggtccttaaaacataaatgtataccaacatcaaattgaggagtgaaccaaagcattctctttatttggaattaaatgacaaataaaagctacttaatatcctcaatggaaaagagaacttctcctggacccaacccagcaaatcccagtgttgatttcctttgtttgcgtagtgccaggaagtgtgtggacaccaaggggtcctttagttcccaaagaaaccttcaaggacactgtcccatggcgtgttccccaaagaggagtttgtggttagaatgttcacttctagagcaactctggcatttgccgtatggactggactgagcccatgccaccatgcatgggatgtacccttgataatccaaccagcaagtgggactggactccccaaggggacatggtcctccatgcaaccactttgtgagtgatttatttcggcattctgaaaaggttggtattctttcgaaaccacctttctttctagttgaaccatcttatcaggagtatatcagtgatggtgaatgtttgtcatttgagggtgtgttttagctatagatacagccagttgtcattgacattggatcttgtgactaggatggggctatgagtggacttggtgattttttgaatacagctcgtggcagcagaggaggtggggggagggtaacaggagcaaaggatgctggtgtggcatcctagcccagcctggggccatttcagtgatggagcgattggcacatagttggcttttagcaatggagggtgcccttaggccatgacttccagttcttgcttgagagctgaggaagccagggaccagccctccccaagcaagggctaccatcaatgagctcttccttttccaccctgcagcttcactgattccctcggaggtgcccttggatacaactgtagcagaaggtaaggtctattatgggggatccctgtgggctcattaccccactgcacccctaggttcatctctgatccagaagaaatgcagaagccatacttctagcaactctggcattcagtgtttgggctgactgaacccaggctaccatgcctggggtgtgcccttgataatccaactaccaagtgagactgggctccccaagggggcatggtcctccatgcagccactttgtgatggtttagttttgcattctggaatggttggttttctttcaaaaccatctttctttcttgttgaaccaccttctcgggaatatttcagtgatggtgaatatttgtcatttgagggtgtgtttgagctatagaaacagccagatgtcttttgacattcaatcttgtgactaggatggggctgtgaatagactgggtgactttttgaatagaggctgtggtagcagaagaggttgggggagggtaagtagagcaaaggatgcttgtgcggcatcttagcccagcctggggccagtacggtgacacagtgattggcacatggttggcttttagcaatggaggttgcccttaggatctgtgtttccagcccttgcttcagagctgacgaagccatggaccaaccctccccaaacaagggctaccatcaatgagctcttcctttctccaccctgcaggttctccatttccctcggagttgaccctggagtcaactgtagcagaaggtaacgtctactatgggggatccctgtgggctcattaccccactgcacccctaggttcatctctgattcagacgaggtgcagagggcatagaaggtagggtgctggtgtcatgttctcaggtagtgtggatatcaccttgctctgtgtatgtgcaactcagagtcaatatcaccacacatgagcacgtgtttgtacacgtgtatgtgctctgcattttacttgctttgctgtaagtgatggctgaattgacgtttggagggtaagtagtattgccccttttcatagacaatgaaggtcaagcggttatcttcctgtccttctgaagctggacgtggtggaggcaggcttcagtctcagcccctcagaatctgctgatggaatcaccttgtggactggttctgatgagcagcatcacgacaacccctgtcctggggtgccaaatatttatcttcctaagtggcagtttctccttttttaaaggctttggaggatgggggaactgctggttcttaagacataaaggtatcccaacatcaaattgaggagcgaaccaaggcattctctttactgggaattaaatgacaaataagatacttaacatcctcaatggaaaagagaacttctcctggacccaacccagcaaatcccagtgctgatttcctttgttcacatagtgccaggatgtgtgcagacaccaagagatttctttaattcatgaagaaacctgcaaggacactgtcccatggtgtgctccccaaagaggagtttctggtgaaactgtctacttctagagcaactctggcattcagtgtttgggctggactgaacccaggctaccatgcctggggtgtgcccttgataatccaatcaccaagtggaactgggctccccaagggggcatcgtcctccatgcagccacctttttgagtggtttagttttgcattctgaaatggttggttttctttggaaaccacctttcttgttgtaccaccttctcaggaatatttcagtgatggtgaatatttgtcatttgagggtgtgtttgagctatagaaacggccagatgtcatttgacgtccattcttgtgactaggatggggctgtgaatagactgtgtgacttgttgaatagaggctgtggcagcagaagaggttgggggagggtaaggagaacaaaggatgcttgtgcgtcaccttggcccagcgtgggaccagtacagtgacagagtgattggcacatggttggcttttagcaatggaggttgcccttaggacctgtgtttccagcccttgcttcagacctgaggaagccatggaccaaccctcttcaagcaagggctaccatcaatgagctcttcctttctccaccctgcaggttctccgatttccttggagtcaaccctggagtcaactgtagcagaaggtaacgtctactatgggggagctctatgggctcattacccctctgtactcctagattcatctctgatccagatgaggtgcagagggcatagaaagtagtgtgctggcgtcaggtgctcaggtagtgtggatatcaccttgtgctgtgtatgtgcaaccctgagtccatatcaccacacacgagcacgtttgtacacgtgtgtgtgctctgtagtttacttgctttgctgtaagtgacgtcttaattgatgttggagtgtgagtggtaccaccccttttcatagacaatgaaggccaagggatcatctacatatccttctgaagttggatgtggtggaggtaggcttcagtctcagcccctcagagcctgctgatgcaatcacttcagcagcatcacgacctggcctgggataccaaatatacatcttcctaagtggcagtttctccctttttaaaatttgaggagggtgggagaactcttgggacttaagacataaatgtatatcaacatcagattgaggagggaacccaggcattctatttactggaaattaagtgacaaataaaagatacttaacatgctcaatggaaaagagaacttcccctggacctaacccagcaagtcccagtgctgatttcctttgttcacatagtgccaggatgtgtgcagacaccaagaggtttttttaattcacaaagaaacctacaaggacactgtcccatggcgtgatccccaaagaggagtttctggttaaactgtctacttcaagagcaactctgtcatttggagtgtgggctggactgagcccatgccaccatgcctggggtgtgcccttggtaatccaaccaccaagtgggactgggctccccaagggggcatcgtcctccatgcagccactttgtgagtggtttagttttgcattctggaaaggttggttttctttcgaaaccaccttttttctggttgaaccaccttctcaggtatatttcagtgatggtggatatttgtcatttgagggtgtgtttgagccatagaaaccgccagatgtcttttgacattcaatcttgtgactagcatggggttgtgaatggactgggtgactttttgaatagaggctgtggcagcagaggagatgggggtagggtaataagagtaaaggatgctcatgtggcatcctagcccagtctggggccagtacaatgacaaagcgattggcacatggttggcttttagcaatggatggtgcccttaggacctgtgcttccagcccttgcttcagagctgagcaagccctggaccaaccctccccaagcgagggctacgatcaatgagctcttcctttctccaccctgcaggttctctgattccctcagagtcaaccctggagtcaactgtagcagaaggtaacgtctactatgggggatccctgtagactcattacccccctgcacccctaggttaatctctgattcagatgaggtgcagagggcatagaaagtagggtgcttagctcccacgaggggcccttccacaaaaggcctcaggtctgaacaggtatatcttgcatcgatcatgtctgagactgaggaggaatcaacttgaagacgcgtctccaaggagttctcagtggagccttttattctgtctctagagattctgttatctttgcttgttgctcactcctgtgttcctcacccagctgtgctcatccgtggccagcctagggttctggatctctggctacagggccttgagggtcaggtgcctacctgctaacgtaaccaaattgctaggacagcatccttgcccttgccctttctttaagcctatattatgccacccttgtttcttcttaacagagagaaatcacaatccttcagctcatgggcatcagagctcatgtacttcccccttgggtatctccagtgagaaatctgggagacatagtcaatacatcctgggattctggcagcctgggctttgggaagggaagtcacttcccatttcccatgggaaatcttggccctaggagaagctcaaggacaacattctcaccaaggcctctgcgctgcccagggttggcatgcagttgggaatgctgatggtacatgcatcgggccctcctgttcctcaggtcgtcttctttcttctcccttctccctctggcccatggggtgaggtctgacttaacctcttcctctttcctatgatgaaggacacagaagacacttgaagtgagggtgagactggctttattctgacttagccatgtcccttcgcaagattcccacattttcttatttgcagcagctataagaggagaatctgttccttcctcttgagtggtttcccctgaggtccctgttacatgttaaggaccacaccttggtgggacaagccctttggtataactggtccagccagggatgggagtgagggggcagaggtatttggctgatctgcctgtcacacaggactgcagataggacttacctggagttgctcttatcaggaactctagtgtcagctgggagtcacatttcttctagatctggagacctcacgtagcagcccagtggagagctcagacagaagctgagtgctgtggctgcagtgggttaagggtaactctcagatcacttcctctccaagccccagcactcagtcagctcctgtaggtgccctggacaaattccagggctctggagcaattcaaaaacggagattccaagccagtatcttacttaaaggggaatattagaagcatttctgctaatgtgaaaaacaaggcaagtatgccctccatctccactgctgttcaatgttgtactggaggtagtagccaatgcaatgagagaagagaaatcaattagaggcctaagcatgggaaaagttatttttgcatccctcttctggagttctgtataggttacatgtaggcacatcggaatcagagtgagtatgttggtacagaaatatttcctccccaagcagccctttagaatcaaagaactcaatgctagacaggtttcttgactttcccaaatttacacagcaagacaatatccagatcaggagtgatggctcctcagcagatcctagtttactttcagcccatgagtgtcttcagaggagacctaactttatattttctggttttttttgggggggtgtggtggggtttgtttttcatcttctacaattggcaaaagcagagactaccactacaaatactgagtctactgttgtgacaggtaatgagtaactttgaatccctttctgtaggtcatgttgccaactatatccatgggctttactgttactcaggaaaaattttagggaatgggatgggagggaatgttgtgagtacacagtgaccttctggatcccagaggtcagctagagtgaagcttccttcattgcccatgttcctggaggtagggagaaatcagtcagaatatggtgtctccaagagcctgtgtgctttggaagcagagaccagtgggatcagtctccagtccagagtgacagcccagctcccccatctccacagctctgtgctgaccctaacaatcctggccctgaggaaggctataaggccaggaatatcacgtgacaaatgtgctccaaaccaaccttagagctgcagatacacatcagagctcctcccgggacatcttgatgttatcgtgctgctcttcagtgtggggtgttgtgtgtcccctgtctgagggaatcaggcagagcccatggtctgcttagagaagggtcatgtgtatctctaggtcccctccaggatgcagatcaggaggagccttttattctgctccagctgaagctctaaggcttgggtttgggccaagcagtcactgtcctcttccccatgaagaactctaaccttaaggcctgttaaagcccagcccaattagagattctctcaaagatatctgcctatggggaagaccctgaatgccctgcaggccctgagaccttgtgcctcagtaggaatgtgcaagagaaattctgtgccttcctctaggatctgattctggtttggccctgaggctggtgaatggagatggcaggtgtcagggccgagtggagatcctataccgaggctcctggggcaccgtgtgtgatgacagctgggacaccaatgatgccaacgtggtctgtaggcagctgggttgtggctgggccatgtcagctccaggaaatgcctggtttggccagggctcaggacccattgccctggatgatgtgcgctgctcaggacacgaatcctacctgtggagctgcccccacaatggctggctctcccataactgtggccatggtgaagatgctggtgttatctgctcaggtaggcatccagatctctggagggttgggtgtggtggctcatgcctttaatccccacactttgggaggatgaggtaggcagattgcttgagctcaggcgttcaagaccagctctaggcaagatggcaaaccccatctctattaaaaaaagaaaatcacttgggcccattctggggacagactgtattcagagaatatagtaacaggtttctcactccagggcccccgcccaagtctttcctggttatctggtggctctggagtttagttggggcagttggcctgtgggtacaatgccacggtcagcacaaatccccaagctgcgagcagtgccgcaacattggtttggaggtgactgaggcaccagtgttcagacacagggtccagcatgctgacatcagaaatgatgagctttttattctgctccaggaacatccgcataactcatacccccattttccccgaggctccttctcagggacagcacgttttggggatctggttggtgaagccttccctccccttgaacactgtattaccttgagtgttgtcagccgctgacccagagggaaggatgcaattgtaaatagttcacttatgattgctgtgaagagaggcagggaagtggggtaagggtgggaggatggcagtgagtcgcaaatggtgggctcacgagtgagctcagcatagggagcagggggacctcctagagtatcaccaggaatccacgtcaaacctcagactcatcgcagctcaagcgtggagagttagggtcttcatctactcattgcttagggtggctgtttgctgctccctgggtgttgataccgaggttgttgtggccggtcccaggcaccgaagtgaccttcatatccctggagagtgagccacaggcacagagaaggcaatgccaggggctgtggggtccctgagggaccgagggcttcacggtgggcactggcagggcccacttggtgggcgtgtgatgggcatcagctcagggtgtagataccccaagtcacttcagccttaactctacttggagtcactgagtgtttggtgtctaatgttgctatttttttctcacagctgcccagcctcagtcaacactcaggccaggtgagtccccagaatccttcctcgggataccccttctctttctgctcagttaccccttccctactccacagagccctcctgcttctctgcagatactctggggcatattatttcacccccaactctgtaactgagaccctagcatggggcttcttaaccacacatgggatttagcttctgccttctcttcagtccatctcagctttcatcacacagttccatgctgtcccaatgaacaactcttagaagttcagaaagaagcctgctgtttaatgagctttggcctctttatattcagggctgacacaacctttctgggaattgagggtgagactctctaatgttctgttgaaggcaaggtcagtacaggcttgatacccccatctctcactacttgaaaaacccccagattctgcagggccacgtctgcattcagaagaggcagaggccatgctgaggggagagagaggctaagaaatgtttctggtgccttcacttaccaggaaacctgatttcccccagggcggacccctagtatcccgaacattttagctgcaagtgtcaagtcttggcagtggtgtcagatgagccagtcagtccacgcgtcagtggatggtgggggatgggggtggtgaaggtttcctaactgcgaataggtcatccctctctcagagagaggtggaagggcctgcatggtgtcctttgtccctgaatgagttccctgggcaggagacctgggcagacacatggggagcaagtggccagaccttcgagtggaattgttttcacagtgcttgcctggtccagagaaccgcttgttttttacctttttcccttcaagtccaattgtatcctttctctttgttgctgtttacagaaagttggcctgtcaggatatcaccacctgtacccacagaaggtaaagaatcctctcaacactccctggggctcactttctacctctggatacactttggatttcatagttcacttatgattgccataaagagaggtggggaagtgggctaagcgtgggagggtggcagcaggtgataaacagttggctcaagagtcagctcggcactgggaacaagagcaggacctcccagaagatcattaagaatcattaggctcatgataggatgaggctcaaggtgggccccttgctttttcatgtttctgtgggttgggtagggaggaagctggagtctctgaaaacccagaattagatgtgatattggagggtggagggtgctggtgacctgtctcctgtgggatcctgttccaagtggtcagaaaagatccttatctatgggctcagaacaagccctgggggtctccctaatcctatggggacctcatccctgccatctctggtactctgccagtcagatcccagataggaccatgctcctgaataagggaggggtctgggcctgccatctggagctgagcagctccatcctctgtgtacccaactggggagtggggcatccattcccatcacatccactggggtcacaggtgcttccccaaaagttgagcatccatagacctgggcagagtaggttatcagtgctactttcacggtgatgaagcctagtctgtggtcatatgcaaaggtgactgcctgcctaggtgacttagttcattaggaagtaccctgagtgtggaacttaccttagattcttgacctcatgatagggatggatgaagggttcttgtgttcccctgtaggatctgaatccagtttggccctgaggctggtgaatggaggcgacaggtgtcgaggccgagtggaggtcctataccgaggctcctggggcaccgtgtgtgatgactactgggacaccaatgatgccaatgtggtctgcaggcagctgggctgtggctgggccatgtcagccccaggaaatgcccagtttggccagggctcaggacccattgtcctggatgatgtgcgctgctcaggacacgagtcctacctgtggagctgcccccacaatggctggctcacccacaactgtggccatagtgaagacgctggtgtcatctgctcaggtgggccttcaagaacttgggctcactctcttggggtggagtttgctccaaaagaaactcctaattacattctgatctcctcactcaaagcttctatgttttctatgtttctgaagacttgtcagctctctgctaagaatccatatgtactcactgcctagtgttcctgtggtcacttaggacaggggatcaaactaaaacaacccagagtttttccccttcctgaggcaaggcaaggaagaggcagaagagaaaagtgccggctccccagggctccatttctcccctgctgagtagcacggtgtgagggtataatggatgcagcacagacagcaaggcaggggagggatcccctcactgcgaggaactctgaactaaagatgcttggctaaaagtgggttctcagctgagacccagtgaggaggtctggaaatagaggctcaagggttaggagtgcaaatgggtgtctgtttgtatcaggcctgggttgcgtggggttggagttcttgacctcagctcttctcagaacgctgctgagcattgcctgtgttctaggtctggtgaggggagggcagtccccatgaggccagccagacatggccttgtcattgcctgtgattggggcttgaagatcgcacaagggattttggctggagtggcttcctcagccttgctgactcaggaacacctaagatgtgcaagggagtgggttggtttaggtcaaccgggttaccctgggcagacacaatttgatcacctcagagctggcaatagtggacaggatctgcctcgaccccttacacggtgcatctctgtggggatgtgcatggcaatgtccctccctgtgtgataggaactaggatggactgagtgtcagactcgctcatttctttccctcctcgttccagttttgccgacttctgtgtaatgttcctgatctgaccttctcttctctttctcacagctccccagtcccggccgacacccagcccaggtaggtccccagtgtccttcctcaaaatgtcccttctctttctgcccaatcaccccttccacactccacagagctctcctgtttctctgtgtggatactgtggggcatattatttccacccccaacaccggctgtgtaactgagatcccagcacagcgctttttaaacacacacaggattgaggaggcctctgtcttcttttcaacccctctcagctttcatgaaacagtttcatactgtcccagtggacaacccttacaggttcaggaagtggccccatgtttaatgagctttggtccttttatattccggactcacatatagtttctgaaaattgagggtgtcaccctctgacccgttcaaggcatcgtcagggcaggctcgatacccccatccatcactgctggaaacattccgagattatgattccgagatttctatccagaagaggcagagtttgtgctcgggcagggagagggataataaaggtttgtgatgtctctgcttaaccagaaacctgattcctgattgtcccctgggcagcccctggttcccctaacattttacctggcagtgtccgagcttcagcaatggcgtctgatgtcctagtcagtccatgcatcagcagatgtgggatggcatggtgggggcatcctctaacagatagaaagataccccaggattacagaaatggagggctcagtctggtctccagcaggacctttgtccctggatgagttcacagcacaggagacctgggaagacacatgggaaacaaatggcaggaacaagaagtggaattgttgtcacgttgattcctcctcccagagatccttttgttctgtgccttttcccttcaagtctaattctgtcttttccttttgttgcaatttacagatacttggccgacctcacatgcatcaacagcaggtaaataaccctctcacccctccctaggactcactatctctggacatattttgtgtttgaaactgataggatgaggctcaatgtgggcttctctgttttcatgtccctgtgggttgcgtgggaggaaggtggaatctctgaggagccagtcctgggtctgatgtttgaggacggagggtgttggtgacctgtctcccatggaatcctgttccaagtggtcaggaaagatcctcatccaggtgctcaggacgagcactggagggctccttaatgctgctgggacctcattcctggccctcaggccatgggatccagacctctgaagagcgggtgaaagtgccggtccctgcacctgtgtggccaaggccttgccatcactggcaatttgccagaaggcagagaggcccatgcaggtgccaataagctcctgaatatggagggggtctaggcctgtcatttgtagctgtgtagctccatcctgtgttcacccagagtggggagtggggtgtccattcctgtcctctcctctggggtcatacatgcttacccatagcttgagcttttatagacttgagtagaatagggcatcactttttccactatgaccaagcttaacctctgggtgcagccatctgccattgtgactgcgtgccctggtgactttggcatttgtattcaaacttgactacttttcccattgccctgagtgttgtccatgccttttccttcacctcagaatggagatggatgaaggattcttgtgttcccctgtaggacctgaatccagtttggccctgaggctggtgaatggaggtgacaggtgtcagggccgagtggaggtcctataccgaggctcctggggcaccgtgtgtgatgatagctgggacaccagtgacgccaatgtggtctgccggcagctgggctgtggctgggccacgtcagccccaggaaatgcccggtttggccagggttcaggacccattgtcctggatgacgtgcgctgctcaggctatgagtcctacctgtggagctgcccccacaatggctggctctcccataactgtcagcacagtgaagacgctggtgtcatctgctcaggtgggcctccaagaccttgggctccctctcttggggtagattttgctcaggaagcgaggtctcattatgttctgatctcctcactcagagctttttcagcctttcctatatatctgatatctccttagctctctcctaggaaactgcatgagtcttcattgccaggttttgaggaggtcaggtaggacaacgggccaaagtgaaataagggtcacgcctttgttcacctaccgaggcagcgcaagcagagggagaagaggaaagtgccaggtctttgccttttagtgtggctggaaaggaatagctggggctggtttgttcatgaggaaagaggctgatttgggtcttggctttgcaggctgcataggaccatggtgcaggcgtctgctcagcttctgatgagggcctcgggctgcttgtactcctagcagaaagggatggggaggtggcctgggcagaggtcacaaggtgagggaggaaggaagagagagcaagagggagggctcagactcttcaaccaccagctcttgctaggaactaagagaagaactcacccctgaccagggagggcactaagttattcatgcagtgttggtctccatgacccagacctggtgcatcaggcctcacctctaaacttggggattcagttgcaatataacacttggatgtgacaagcctctaaagtatagcaccctggctctccagggttccatctttcccctactgaaagattttgcaaagggttacatggatgaagcacatatagaggatgggggagggactgtctccctgggaggagcccagaaccacaggctcctgctaggaagcgcggtcttctgctgaggcccaataaggtgatgtcttaatagagacacaaggctaggagtgcggatgtgtgtctgtccctctctggcctgagatttgggggctgtgagtccttgaccacaactccctccagagcactgcagtgtcttgcctgtgcaccggtctggtgtggagtgtgcagtccccatgaggtctgctaggcaaagcattgttatgaacgcctgtgggctggactggaacatcagaggcaggactttggctggagtggcctcctcacatttgctaactcagggactgctaagacatgcaagggagagggtaggttttgtgtcaacctgattactatgggcagacacaaggttaatcaccttggagttggcaatagtggacaggatctgcccagacaccctccaaggagcatctctgtggggacatgcatggcaatgccctccctctgtgatggggacctagggtggactgaaggcatgatctgtttagttccttccacctttgttccgattttgccagcttctgtatagtgcatctgatctgacctcctctttctcacagctgcccactcctggtcgacgcccagtccaggtgagtccccagtgtccttccttgggatgtcccttctctttctgtataattatccctttctgcactccacagagccctcgttcttctctgagtgaatactacatggcatacaattttcccctgctctgtaactgagaccctggaatggcgcttctgaaccagacatagggttcaagaggcttctgtcttctgttccatttatctcagctttcatgaagcagtttcatactgtcccagtggccaacccttagaggtttaggaagtggcctcatatttaaatagctttgacccttttctattcagagctgatatgaccttcctgagaattgagagtgattgccaaagtctcctcggaagccaatgtcagctaaagccttaaacatggctgccgccatgggcaagcaatgtcagtgcaggcctgacacctcccttcctcactccttccaacacccagattctgcagcgctacatgtgcatccagaagaggcataggccatgctcgggcagggagagggataataaatatttctggtgcctccacttactgggaaacttgatacccctttggtcagctccttggtttccctaacgttttagctcgagctagtagagtgtcagcaatggtgttagatgtacccgtcagtgcatgtgtcagtgcatggaacaggctaaccctttgtgactgagaagaggacatcccacacttcagaggcaggagggatcgaactggtctccagcaaggcttatgtcccttgctgagcttgctgagctgcagacttgggcagacacatggggagcaaagtggcaggaatcagaagtggggtagttttcatgatgctcgccttctccggagacttttccttttggagattttcaccatcaactttaattctagcctttgtctctgttgcaattacagacacgttgccgaccatcaccttacctgcatcgacagtaggtaaataatcctctcgcccctccctagggctcactctctacctctggacaaatgtttttttctgaaatgataggatgagggtcaaggtgggcccctctgtttttcatgtccctgtgggttgcatgggaggaaggtagagtctctggggacccagctgtgggtctgatgttggaggctggagggtgctggtgacttttctcccgtggaatcctgttccaagtggtcaggaaacatcctcatccaggtgccaaggaaaagccctggaagcttccctaatcctactaagacctcattcctgtccctcagcccatgggctgcagaggtgtgaagagtcagtgaaagtgagtgtccccacacctgtctggccaaggccttgtcatacctgtgaaattttcagaagccagacaggaccataggattgccaccaagctcctgagatggggagagtctggcctgcctactgtagctgtgtagctccatcctgtgtgtgcccaggttagggaatggggtttccgttcctgttaactccagtagggtcacaggtgcttccccaaacttgagccttcataaacccaggcagaactgcttctttgactttgatgaagctgaatctctggttttattcatattcaaaggtgactgcctgcccaggtgactttagccattaggacgtgccttgagtgtggaacattccttagattcttgacctcatgatagggatggatgaagggttcttgttttcccctgtaggatctgaatccagtttggccctgaggctggtgaatggaggtgacaggtgtcagggccgagtggaggtcctataccgaggctcctggggcaccgtgtgtgatgacagctgggacaccaatgatgccaatgtggtctgcaggcagctgggctgtggctgggccatgttggccccaggaaatgcccggtttggtcagggctcaggacccattgtcctggatgacgtgcgctgctcagggaatgagtcctacttgtggagctgcccccacaatggctggctctcccataactgtggccatagtgaagacgctggtgtcatctgctcaggtgggcctccaagacttttggtttcctctcttggggtagattttgctcaggaaggttttattatgttctaatctcctcacttagagctttttcaacttttcctatatttctgatacctccttagctctctcctaggaaaccgcatgagtcttcaccacattgccaggttttgaggaggtcagagaggacaatgggccaaagtgaaataagggtcacacctttgttcccctactgaggcagcgcaagcagagggagaagacgaaagcgccgggtctttgccttttagtgtggctggaaaggaatagctggggccaggttgttcatgaagatagaggttgatttgggtcttgggtctttgcaggctgcataggagcatggtgcaggcatctgctcggcttctgctgaggacctcaggctgcttgtactcctggcagaggggatggggagctggcctgggcagaggtcacatggcgagggatgaagcaagatggcagaagaagatggggaggtggcctggacagaggtcacatggtgagggaggaagcaagaaagagcaagagggagggcccagacagttttcaaccaccagctctttctaggaactaagagaagaacttacccctgaccagggaggacactaagttattcatgaagagttggccttcatgacccagacatggcacatcaagcctcacctctatacttggggatccaatcccaacatgagtcttagatgggacaaacatccaaactatagcatgctgcctctccagggttccacctttcccctactgaaaggtttaggtgagggtgaggtggatgcagcacatataggcattgagggagggacggtctgactgggaggattccagaaccaagggctcatgctgggaagggagggttttctgctgaggactaataaggaggcatcagaccggaaacacaaggctgggagtggagattcgtgactgtccatatctgacctgggttttgggggtgtgagtgcttgattgcaattccctccagagcactgcagtgtcttgcctgtgcaccggtcaggtgtggggcaggcagtgcccatgaggcttactgagcaaagccttgttatgaatgcctgtgggctgggctagaagatcacaggctggatattttttttttgcaggagtggcctcttcatacttgctgactcagggactgctaagatgtgcaagggagtgggttggttttgtgtcaacctgattactatgggcagacacaaagtccttcaaacacccccagatgcagcagggccccatctacatgcggaaaggcagaggccgtgctcaggcaaggagagagatattagatatttctggtacctccacttgccaggagactttatactcctttgggcagctccctgatccttctaacattttagctgtaacaatcagaggctcagcaatggtgtcagatgtgtccattagtccatgtgtcagtggatggggcaggcaaaccctttgtagctgagaagaggatatcccacacttcagaggtaggagggattggactggtctccagcgaggcctatgtcccttcctgagcttactgggctgaagagttgggcagacacatggggagcaagtggcaaaaaccagaaatccagtagttttcatgatgcttgccctatctggagacttttccttttggagcttttcaccctcaagtttaattctagcctttgtctttgttgcaattaaagacacgttgccgaccaccacattacctgcatcaacagtaggtacagaatcttctcacccccactagggctcactctctacttctggacaaatgtttttttctgaaaatgagaggatgagggtcagggtgggtccctgtctttttcatatccctgtgcattgagtgggaggaagttggagtctctggggagccagtcctgcttctggtgttggagggtagagggggctggtgacctgtctcccttgggatcctcttccaagtatcaggaaataataaagaaaaaaaaaaaagatcctcatccaggtgctgaggacaagccctggagggctccctactcctattcgacctcgttcctggccctccagccatgcactgcagacctgcaagggtgggtgacagtttctgtccctgcagctgtctggccaaagccttgccatccttggcaatttgccagaagccagggaggaccatgggggtgccacctaactcttgaacatggggacagcatggtcctgccctctggagctgtggagctccatcctgtgtgtgcccagagtagggagtcggttgtctattcctgtcacctccactggggtcacaggtgcttccccaaaacttgagccttcataaacccaaggagaatagtgtatcacctctccttctactgtgatgaagctgaacctctggttgcagtcatctttaatcgtgactgcctgcccaggtgactttggccattaggaagtgccctgagtgtggaatgtgccttagatccttgacctgctgatagggattgatgaagggttcttgtgttctcctataggacctgaatccagtttggccctgaggctggtgaatggaggtgacaggtgtcagggccgagtggaggtcctataccgaggctcttggggcaccgtgtgtgatgacagctgggacaccaatgatgccaatgtggtctgcaggcagctgggctgtggctgggccacgtcagccccaggaaatgcccggtttggtcagggctcaggacccattgtcctggatgatgtgcgctgctcaggacatgagtcctacctgtggagctgccccaacaatggctggctctcccacaactgtggccatcatgaagatgctggtgtcatctgctcaggtgggcctccagcaattttggtttcctctcttggggtagattttgcccaggaagagaggtcttatgttctaatctcctcactcagagctttttcaacctttcctatgtttctgatatctccttagctctcttctaggaaactgcatgagtcttcaccacagtgccaggttttgaggaggtcagagaggacaatgggccaaagtgaaataagggtcatgcctttgttcccctaccaaggcagcgcaagcagagggagaagaggaaagggctgggtctttgcattttagtgtggctggaaaggaatggctggggtcaggttattcatgaagaaagaggcagatttgggtcttggctttgcaggctgcataggagcgtggtatctgcttggcttctgctgacagcctcaggctgcttgtgctcctggcagaaggagatggggaggtggcctgagcagaggtcacgtggcaagggaggaagcaagagagggcaagaaggaaggcccaggctcttttcaaccaccagttcttgctagaaactaagagaagaactcacccctgatcagggagggcactaagttgttcatgaatggttggcttccatgacccagacatggcacatcaggcctcacctctatacttggggatccaatcccaacatgagtcttgtatgggacaaacatccaatctatagcacactggctctccagggttccatctttcccccactgaaaggtttaggtgagggtgaggtggatggagcacatataggtgttgggggacggacgatctcaccgggaggagtccagaaccaaaggcttatgctgggaagggagggtcttccgctgaggcccagtaaggaggcatcagactggaaacacaaggctgggagtgcagatctgtgtctgtccaagtctggcctgggttttgggggtgtgagtgcttgactgcaattccctccagagcactgcagcatcttgcctgtacaccagtcaggtgtagggcgggcagtgcccattagggctgctgagcaaagccttgttatgaatgcctgtgggctgggctagaagatcacaggctggatttttgctggagtggcctcttcatacttgctgactcagggactgctaagacgtgtaagggagagggttggttttgtgtcaacctgattactgtgggtagacacaaacttaatcactttggagctggcagtagtggacaagatctgcccagatgcctttcaaggagcatctttgtggggacgtgcatggcaatgcccctccctctgtgatggggacatagggtggactgaaggcgctaccagtttagttccttgtacctttgttctggttttgccagcttctgtatagtgcatctgatctgacctcctctttctcacagctgcccagtcccggtcgacgcccaggccaggtgagtccccagtgtccttccttgggatgtcccttttctttctgcacaattatcctttttcccattccacagagccctccttcttacctgtgtggatactgtgggtcatactattttccctgctctgtaactgagaccctagcatggagcttcttaaccagacatggttaagaaggtatgatctttctaagaattgagagtgattgccaaagtctcctgggaaggcaatttcagctaaagccttaaacatgcctgtccatgggcaagaatgtcagtgcaggcctgatacctccattcctcactccttcagacacccccagatgcggcagggccccatctacctccagacaggcagaggctgtgctcaggcagggagagcgatattagatatttccgttgcctccacttgccaggagactttatactcccttaggcagctccctgatccttctaacattttagtttcaagcgtgagaggctcagcattggtgtcagatgtgcccatcagtccatgtgtcagtggatggggcaggtaaaccctttgtagctgagaagagggtattccacacttcagaggcaggagggatcggactggtctccagtgaggactatgtccctggctgtgcttcctgagctacagacttgggcagacacatggggagcaagtggcaggaactagaaatggaagaatattcatgatgcttgccttgtccagagacctttccttttggagcttttctccctcaactttaattctagcctttgtctttgttgcaatttacagacacgttgtcgaccatcacgttacctccatcgacagtaggtaaataatcctctcacccctccctagggctcactctctacctctggacaaatgttttctctgaaaatgataggatgagggtcaaggtgggcccctgtctttttcacatccctgtgcgctgagtgggaggaagttgagtctctggggaaccagtcccgggtcgggtgttagagggtggagggtgttggtgacctatctcctgttggaccgtgttccaagtatcagtaaagatcctcattcaggtgctggacaaaccctggagagctccctactcctgggacctcattcctggccttctggccatgcattgcagacctgcaagggagggtgaaaatttctgtccctgcagttgtctggccaatgtgttgccatccctggcaatttgccagaagccagagaggaccacgtgggtgccaccaaactcttcgacatggggatagcataggcctgccctctggagcagtggagctccatcctgtgtgtgctcagagtagggagtggggtgtccattcctgtcacctccactggggtcacaggcgctttcccaaaatctgagcctccataaacccaggcagaatagggtatcacctctccttccagtatgatgaagctgaacctctggttgcagtcgtattcaatcgtgactgcttgtccaggcgaccttggccattaggaagtaccctgagtgtggaacgtgccttagatccttacctcatggtagggatggataaagggttcttgtgttcccctgtaggatctgaatccagtttgaccctgaggctggtgaatggaagtgacaggtgtcagggccgagtagaggtcctataccgaggctcctggggcaccgtgtgtgatgacagctgggataccaatgatgccaatgtggtctgcaggcagctgggctgtggctgggccacgtcggccccaggaaatgcccggtttggccagggctcaggacccattgttctggatgatgtgcgctgctcaggacacgagtcctacctgtggagctgcccccacaatggctggctctcccacaactgtggccatcatgaagatgctggtgtcatctgctcaggtgggcctccaagaccttgggctccctctcctagactggagtttgctcaggaagaaaatcctaattacattctgatctcctcactcaaagattcttctatgtttcctatatttatgtagtcttgttagctctctgctaaggatctgtatgaattttactacagggcttggtgttcctgtggtcacttaggacaggccccaaactgaaacaacaacccagactttatccccttcctgaggcagtgcaagaaagaggccgaagagaaaactgctggctccccagggttccatttctcctcagctgagtagcactgggtgagggtatcatggacataggacagacagcaaggtaggggaggaatcctctcactgagaggaactctgagctaaagatgcttgtctgaaagtgagttctcagctgagacccagtgaggaggtctggaaatagaggctcaagggttaggagtgcaaatgggtgtctggttctatcaggcctgggttgtgtgaggttggagtccttgacctcaggtcctctcagaacgctgcagagcactgccttgccctgggtctggtgtggggagggcagcccccatgagacaggccaggcatggccttgttattgcctgtggtcggggcttgaagatcacacaagggattttggctggagtggcttcctcagccttgctgactcaggaacacctaagatgtgcaagggagtgggttggtttaggtcaaccgggttaccctgggcagacacaatttgatcacctcagagctggcaatagtggaaggatctgcctcgaccccttacacggtgcatctctgtggggatgtgcatggcaatgtccctccctgtgtgataggaactaggatggactgagtgtcagactcgctcatttctttccctcctcgttccagttttgccgacttctgtgtaatgttcctgatctgaccttctcttctctttctcacagtttcccagtcccggccgacacccagtccaggtaggtccccagtgtccttcctcaaaatgtcccttctctttctgcccaatcaccccttccacactccacagagctctcctgtttctctgtgtggatactgtggggcatattatttccacccccaacaccggctgtgtaactgagaccccagcacagcgctttttaaacacacacaggattgaggaggcctctgtcttcttttcaacccctctcagctttcatgaaacagtttcatactgtcccagtggacaacccttacaggttcaggaagtggccccatgtttaatgagctttggtccttttatattccggactcacatatagtttctgaaaattgagggtgtcaccctctgacccgttcaaggcatcgtcagggcaggctcgatacccccatccatcactgctggaaacattccgagattatgattccgagatttctatccagaagaggcagagtttgtgctcgggcagggagagggataataaaggtttgtgatgtctctgcttaaccagaaacctgattcctgattgtcccctgggcagcccctggttcccctaacattttacctggcagtgtccgagcctcagcaatggcgtctgatgtcctagtcagtccatgcatcagcagatgtgggatggcatggtgggggcatcctctaacagatagaaagataccccaggattagagaaatggagggctcagtctggtctccagcaggacctttgtccctggatgagttcacagcacaggagacctgggaagacacatgggaaacaaatggcaggaacaagaagtggaattgttgtcacgttgattcctcctcccagagatccttttgttctgtgccttttcccttcaagtctaattctgtcttttccttttgttgcaatttacagatacttggccgacctcacatgcatcaacagcaggtaaataaccctctcacccctccctaggactcactatctctggacatattttgtgtttgaaactgataggatgaggctcaatgtgggcttctctgttttcatgtccctgtgggttgcgtgggaggaaggtggaatctctgaggagccagtcctgggtctgatgtttgaggacggagggtgttggtgacctgtctcccatggaatcctgttccaagtggtcaggaaagatcctcatccaggtgctcaggacgagcactggagggctccttaatgctgctgggacctcattcctggccctcaggccatgggatccagacctctgaagagcgggtgaaagtgccggtccctgcacctgtgtggccaaggccttgccatcactggcaatttgccagaaggcagagaggcccatgcaggtgccaataagctcctgaatatggagggggtctaggcctgtcatttgtagctgtgtagctccatcctgtgttcacccagagtggggagtggggtgtccattcctgtcctctcctctggggtcatacatgcttacccatagcttgagcttttatagacttgagtagaatagggcatcactttttccactatgaccaagcttaacctctgggtgcagccatctgccattgtgactgcgtgccctggtgacttacgtgccctggtgactttggcatttgtattcaaacttgactacttttcccattgccctgagtgttgtccatgccttttccttcacctcagaatggagatggatgaaggattcttgtgttcccctgtaggatctgaatccagtttggccctgaggctggtgaatggaggtgacaggtgtcagggccgagtggaggtcctataccgaggctcctggggcaccgtgtgtgatgatagctgggacaccagtgacgccaatgtggtctgccggcagctgggctgtggctgggccacgtcagccccaggaaatgcccggtttggccagggttcaggacccattgtcctggatgacgtgcgctgctcaggctatgagtcctacctgtggagctgcccccacaatggctggctctcccataactgtcagcacagtgaagacgctggtgtcatctgctcaggtgggcctccaagaccttgggctccctctcttggggtagattttgctcaggaagcgaggtctcattatgttctgatctcctcactcagagctttttcagcctttcctatatatctgatatctccttagctctctcctaggaaactgcatgagtcttcattgccaggttttgaggaggtcaggtaggacaacgggccaaagtgaaataagggtcacgcctttgttcacctaccgaggcagcgcaagcagagggagaagaggaaagtgccaggtctttgccttttagtgtggctggaaaggaatagctggggctggtttgttcatgaggaaagaggctgatttgggtcttggctttgcaggctgcataggaccatggtgcaggcatctgctcagcttctgatgagggcctcgggctgcttgtactcctagcagaaagggatggggaggtggcctgggcagaggtcacaaggtgagggaggaaggaagagagagcaagagggagggctcagactcttcaaccaccagctcttgctaggaactaagagaagaactcacccctgaccagggagggcactaagttattcatgcagtgttggtctccatgacccagacctggtgcatcaggcctcacctctaaacttggggattcagttgcaatataacacttggatgtgacaagcctctaaagtatagcaccctggctctccagggttccatctttcccctactgaaagattttgcaaagggttacatggatgaagcacatatagaggatgggggagggactgtctccctgggaggagcccagaaccacaggctcctgctaggaagcgcggtcttctgctgaggcccaataaggtgatgtcttaatagagacacaaggctaggagtgcggatgtgtgtctgtccctctctggcctgagatttgggggctgtgagtccttgaccacaactccctccagagcactgcagtgtcttgcctgtgcaccggtctggtgtggagtgtgcagtccccatgaggtctgctaggcaaagcattgttatgaacgcctgtgggctggactggaacatcagaggcaggactttggctggagtggcctcctcacatttgctaactcagggactgctaagacatgcaagggagagggtaggttttgtgtcaacctgattactatgggcagacacaaggttaatcaccttggagttggcaatagtggacaggatctgcccagacaccctccaaggagcatctctgtggggacatgcatggcaatgccctccctctgtgatggggacctagggtggactgaaggcatgatctgtttagttccttccacctttgttccgattttgccagcttctgtatagtgcatctgatctgacctcctctttctcacagctgcccactcctggtcgacgcccagtccaggtgagtccccagtgtccttccttgggatgtcccttctctttctgtataattatccctttctgcactccacagagccctcgttcttctctgagtgaatactacatggcatacaattttcccctgctctgtaactgagaccctggaatggcgcttctgaaccagacatagggttcaagaggcttctgtcttctgttccatttatctcagctttcatgaagcagtttcatactgtcccaatggccaacccttagaggtttaggaagtgacctcatatttaattagctttggcacttttctattcagagctgatatgaccttcctgagaattgagagtgattgccaaagtctcctgggtagccaatgtcagctaaagccttaaacatggctgccgccacaggcaagcaatgtcagtgcaggcctgacacctcccttcctcactccttccaacaccccagattctgcagggctacatgtgcatccagaagaggcataggccatgctcgggcagggagagggataataaatatttctggtgcctccacttactgggaaacttgatacccctttggtcagctccttggtttccctaacattttagctcgagctagtagagtgtcagcaatggtgttagatgtacccgtcagtgcatgtgtcagtgcatggaacaggctaaccctttgtgactgagaagaggacatcccacacttcagaggcaggagggatcgaactggtctccagcaaggcctatgacccttgctgagcttgctgagctgcagacttgggcagacacatggggagcaagtggcaggaaccagaagtggggtagttttcatgatgtttgccttctccggagacctttccttttggagattttcaccatcaactttaattctagcctttgtctctgttgcaattacagacacattgccgaccatcaccttgcctgcatcgacagtaggtaaatattcctctcgcccctccctagggctcactctctacctctggacaaatgttttttctgaaaatgataggatgagggtcaaggtgggcccctctctttttcatgtccctgtgggttgcatgggaggaaggtagcgtctctggggacccagctctgggtctgatgttggaggctggagggtgctggtgacttgtctcccgtggaatcctgttccaagtggtcaggaaacatcctcatccaggtgctgaggaaaagccctggagggttccctaatcctactaagacctcattcctgtccctcagcccatgggctgcagaggtgtgaagagtcggtggaagtgactgtccccacacctgtctggccaaggccttgtcatacctgtgaaattttcagaagtcagacaagaccataggattgccaccaagctcctgagatggggagagtctggcctgcctactgtagctgtgtagctctgtcctgtgtgtacccaggttagggaatggggtttccattcctgttaacttcagtagggtcacagatgcttccccaaaacttgagccttcataaacccaggcagaatagggtgtcactgcttctttgactttgatgaagctgaatctctgattttattcatattcaaaggtgactgcctgcccaggtgactttagccattaggacatgccttgagtgtggaacattccttagattcctgacctcatgatagggatggatgaaggattcttgtgttcccctgtaggatctgaatccagtttggccctgaggctggtgaatggaggtgacaggtgtcagggccgagtggaggtcctataccaaggctcctggggcaccgtgtgcgatgacagctgggacaccaatgatgccaatgtcgtctgcaggcaactgggctgtggctgggccatgtcagccccaggaaatgcccggtttggtcagggctcaggacccattgtcctggatgatgtgcgctgctcaggacacgagtcttacctgtggagctgcccccacaatggctggctctcccacaactgtggccatagtgaagacgctggtgtcatctgctcaggtgggccttcaagaacttgggatcactctcttggggtggagtttgctccagaagaaactcctaattacattctgatctcctcactcaaagcttcttctatgttttctatatttctgaagacttgttagctctctgctaagaatccctatgtactcactgcctagtgttcctgtggtcacttaggacaggggaccaaactcaaacaacccagagtttttccccttcctgagggaaggcaaggaagaggcagaagagaaaagtgctggctccccagggctccatttctcccctgctgagtagcacggtgtgagggtataatggatgcaggacagacagcaaggcggggtagggatcctctcactgtgaggaactctgaactaaagatgcttgtctgaaagtgggttctcagctgagacccagtgaggaggtctggaaatagaggctcaagggttaggagtgcaaatgggtgtctgattctatcacgcctgggttgtgtgaggttggagtccttgacctcaggtcctctcagatcactgctgagcattgcctgtgccccaggtctggtgtggggagggcagcccccatgaggccggccaggcatggccttgtcattgcctgtgatcagggcttgaggacggcacaagggattttggctggagtggcttcctcagccttgctgactcaagaatgcctaagacgtgcaagggagagggttggtttaggccaaccgggttaccctgggcagacacaagttgatcacctcagagctggcaatagtggacaggatctgcctcgaccccttacatggtgcatctctgtggggatgtgcatggcaatgcccctccctgtgtgataggaactaggatggactgagtgtcagactcgcccatttctttccctcctcgttccactttgccgacttctgtgtaatgttcctgatctgaccttctcttctctttctcacagcttcccagtcccggccaacacctagtccaggtgggtccccagtgtccttcctcaaaatgtcccttctctttctgcccaatcaccccttccacactccacagagctctcctgtttctctgtgtggatactgtggggcatattatttctacccccaacaccagttgtgtaactgagaccccagcacagcgctttttaaacacacacaggattgaggaggcctctgtcttcttttcaacccctctcagctttcatgaaacagtttcatactgtcccagtggacaacccttacaggttcaggaagtggccccatgtttaatgagctttggtccttttatattccggactcacatatagtttctgaaaattgtgagtgtcaccctctgacctgttcaaggcatcatcagggcaggctcgatacccccatccttcactgctggaaacattccgagattatcatgggccacatttgtatccagaaaaggcagagtttgtgcttgggcagggagagggataataaaggtttgtgatgtcactgcttaaccagaaacctgattcctgattgtcccctgggcagcccctggttcccctaacattttatctgccagtgtccgagcctcagcaatggcgtctgatgtcctagtcagtccatgcatcagcagatgtgggatggcatggtgggggcatcctctaagagatagaaagataccccaggattagagaaatggagggctcagtctggtctccagcaggacctttgtccgtggatgagttcacagcagaggagacctgggaagacacatgggaagcaagtggcaggaacaggaagtggaattgttgccaggtggattccccctcccagagaaccttttgttctgcaccttttcccttcaagtctaattctgtcttttcctttgttgcaatttacagacacttggccaacctcacatgcatcaacagcaggtaaataatcctctcacccctccctagggctcactgtctctggacatattttgtgtttgaaactgataggatgaggctcaaggtgggcccctcttttttcactcccctgtgggttgcgtgggaggaaggtggaatctctgaggagccagtgctgggtctgatgtttgaggatggagggtgctggtgactgtctcccatggaatcctgttccaagtggtcaggaaagatcctcatccaggtgctcaggatgagcactggagggctccttaatcctactgggacctcgttcctggccctcaggccatgggatccagatctctgaagagcaggtgaaagtgccagtctctgcacttgtgtggccaaggtcttgccatcactggcaaattgccagaaggcagagaggaccatgcaggtgccaatgagctcctgaattcggagggggtctgggcttgtcatttgtagctgtgtatctccatcctttgtgtacccagagtggggaatggggtgtccattcctgtcccctcctctggggtcatacatgcttacccatagcttgagcttttatagacttgagtagaatagggcatcactttttccactatgacaaagcttaacctctgggtgcagctatcttccatcatgactgcatgccctggtgacttctgcattcgtattgaaacttgactactttgcccactgccctgattgttgtccatgccttatccttgacctcatatttgagatggatgaagcgttcttgtgttcccctgtaggatctgaatccagtttggccctgaggctggtgaatggaggtgacaggtgtcagggccgagtggaggtcctataccgaggctcctggggcaccgtgtgtgatgactactgggacaccaatgatgccaatgtggtttgcaggcagctgggctgtggctgggccatgtcagccccaggaaatgcccggtttggccagggttcaggacccattgtcctggatgatgtgcgctgctcaggacatgagtcctatctgtggagctgcccccacaatggctggctctcccacaactgtggccatcatgaagacgctggtgtcatctgctcaggtgggcctccaagaccttcggctccctctcctaggttggagtttgctcaggaagaaaatcctaattacattatgatctcctctgaactcacagattcttctatgtttcttgtatttatgcagtcttgttagctccctgctaagaatctgtatgaattttgctacagcggttggtgttcatgtggtcacttaggacaggggaccaaagtcaaacaacaacccagactttatccccttcctgaggcagtgcaaggaagaggcagaagagaaaactgctggctccccagggctccatttcttccctgctgagtagcagtggttgagggtatcatggacataggacagacagcggggcagaggagggatcctctcactgtgaggaactctgaaccaaagatgcttgtctggaagtgggttctcagctgagacccagtgaggaggtctggaaacagaggctcaagggttaggagtgcaaaatgggtgtctggttctatcaggcctgggttgtgtgaggttggagtccttgacctcaggtcctctcagaacgctgcagagcactgccttgccctgggtctggtgtggggagggcagcccccatgagactggccaggcttggcctcattattgcctgtggtcggggcttgaagatcacacaagggattttggctggagtggcttcctcagccttgctgactcaggaacacttaagatgtgcaagggagtgggttggtttaggtcaactgggttaccctgcgcagacacaatttgatctcctcagagctggcaatagtggacaggatctgcctcaaccccttacacggtgcatctctgtggggatgtgcatggcaatgtccctccctgtgtgataggaactaggatggactgagtgtcagactcgcccatttctttccctcctcattccagttttgtcgacttctgtgtaacattcctgatctgaccttctcttctctttctcacagcttcccagtcccagccgacacccagcccaggtaagttcccagtgtccttcctcaaaatgtcccttctctttctgcccaatcaccccttccccactccacagagctctcctgtttctctgtgtggatactgtggggcatattatttctaccgccaccaccggctgtatttcacatgggtccttttctattttccctaagtgtcagccggtctgagaaataaagggaaggcatacaaaagagcaaaattttaaagctgggtgttggggggagacatcacatgtcagcaggttccgtgatccctcctgagtagcaaaaccagcaagtttttattggtgattttcaaaaggggagggagtgcacaaatagggtgtgggtcacagagatcacatccttcacaaggtaataaaatatcacaaggtaaatggaggcagggcaagatcacaggactggggtgaaattaaaattgctaatgaagtttcgggcacgcattgtcattgaaaacattttatcaggagacagggtttgagagcagacaactggtctgaccaaaatttattaggaggcaatttcctcatcctaataagcctggaagcgctacgggggaccggggcttatttcatcccttatctgtaagcgtaaaagacagacgttcccaaagcggccatttcagaggcctccccttaggaacacattctctttctcagggatgttccttgctgagaaaaggaattcagcgatatttctcctatttgcttttgaaggaagagaaatgtggctctgttctgcctggcccacaggcagccagcctttaaggttatctcccttgttccctgaacaacgctgttatcctgttcttttttcacagtgcccagatttcatattgtttaaacaatttctgcagttaacgcaatcatcacagggtcctgaggtgacattcatcctcagtttatgaagaagatgggattaagagattaaagtaaagacaggcataggaaatcacaagagtattgattggggaagtgataagtgtccatgaaatcttcacaatttatgttcagagattgcagtaaagacaggcgtaagaaattataaaaatattaatttggggaactaataaatgtccatgaaatcttcaaatttatgttcttgtgccatggcctcagccggtccctctgtttggggtccctgacttcccgcaacacagcacagtgctttgaaaacacacataggattcaggaggcctctgtcttcttttcaacccctctcagctttcatgaaacagtttcatactgtcccagtggacagcccttacaggttcaggaagtggccccatgtttaatgagttttggtccttttatattcaggactcacatatagtttcgaaaattgagggtgtcaccctctgacctgttcaaggcattgtcagggcaggctcgatacccccatccatcactgctggaaaaattctgagattatgatggaccacatttgtatccagaagaggcagggtttgtgcttgggcagggaaagggataataaaggtttgtagtgtctctgcttagccagaaacctgattcctgattgtcccctgggcagcccctggttcccctaacattttatctgccagtgtctgagcctcagcaatggcatctgatgtcctagtcagtccatgcatcagcagatgtgggattgcatggtggggggcatcctctaacagatagaaagataccccaggattagagaaatggagggctcagtctggtctccagcaggacctttgttcatggatgagttcacagcagaggagacctgggaagacacatgggaagcaagtggcaggaacaggaagtggaattgttgccaggtggattccccctcccagagaaccttttgttctgcaccttttcccttcaagtctaattctgtcttttcctttgttgcaatttacagacacttggccaacctcacatgcatcaacagcaggtaaataatcctctcacccctccctagggctcactgtctctggacatattttgtgtttgaaactgataggatgaggctcaaggtgggcccctcttttttcactcccctgtgggttgcgtgggaggaaggtggaatctctgaggagccagtgctgggtctgatgtttgaggatggagggtgctggtgactgtctcccatggaatcctgttccaagtggtcaggaaagatcctcatccaggtgctcaggatgagcactggagggctccttaatcctactgggacctcgttcctggccctcaggccatgggatccagatctctgaagagcaggtgaaagtgccagtctctgcacttgtgtggccaaggtcttgccatcactggcaaattgccagaaggcagagaggaccatgcaggtgccaatgagctcctgaattcggagggggtctgggcttgtcatttgtagctgtgtatctccatcctttgtgtacccagagtggggaatggggtgtccattcctgtcccctcctctggggtcatacatgcttacccatagcttgagcttttatagacttgagtagaatagggcatcactttttccactatgacaaagcttaacctctgggtgcagctatcttccatcatgactgcatgccctggtgacttctgcattcgtattgaaacttgactactttgcccactgccctgattgttgtccatgccttatccttgacctcatatttgagatggatgaagcgttcttgtgttcccctgtaggatctgaatccagtttggccctgaggctggtgaatggaggtgacaggtgtcagggccgagtggaggtcctataccgaggctcctggggcaccgtgtgtgatgactactgggacaccaatgatgccaatgtggtttgcaggcagctgggctgtggctgggccacgtcagccccaggaaatgcccggtttggccagggttcaggacccattgtcctggatgatgtgcgctgctcaggacatgagtcctatctgtggagctgcccccacaatggctggctctcccacaactgtggccatcatgaagacgctggtgtcatctgctcaggtgggcctccaagaccttcggctccctctcctaggttggagtttgctcaggaagaaaatcctaattacattatgatctcctctgaactcacagattcttctatgtttcttgtatttatgcagccttgttagctccctgctaagaatctgtatgaattttgctacagcggttggtgttcatgtggtcacttaggacaggggaccaaagtcaaacaacaacccagactttatccccttcctgaggcagtgcaaggaagaggcagaagagaaaactgctggctccccagggctccatttcttccctgctgagtagcagtggttgagggtatcatggacataggacagacagcggggcagaggagggatcctctcactgtgaggaactctgaaccaaagatgcttgtctggaagtgggttctcagctgagacccggtgaggaggtctggaaacagaggctcaagggttaggagtgcaaaatgggtgtccggttctatcaggcctgggttgtgtgaggttggagtccttgacctcaggtcctctcagaacgctgcagagcactgccttgccctgggtctggtgtggggagggcagcccccatgagactggccaggcttggcctcattattgcctgtggtcggggcttgaagatcacacaagggattttggctggagtggcttcctcagccttgctgactcaggaacacctaagatgtgcaagggagtgggttggtttaggtcaaccgggttaccctgcgcagacacaatttgatctcctcagagctggcaatagtggacaggatctgcctcaaccccttacacggtgcatctctgtggggatgtgcatggcaatgtccctccctgtgtgataggaactaggatggactgagtgtcagactcgcccatttctttccctcctcattccagttttgtcgacttctgtgtaacattcctgatctgaccttctcttctctttctcacagcttcccagtcccagccgacacccagcccaggtaagttcccagtgtccttcctcaaaatgtcccttctctttctgcccaatcaccccttccccactccacagagctctcctgtttctctgtgtggatactgtggggcatattatttctaccgccaccaccggctgtatttcacatgggtccttttctattttccctaagtgtcagccggtctgagaaataaagggaaggcatacaaaagagcaaaattttaaagctgggtgttggggggagacatcacatgtcagcaggttccgtgatccctcctgagtagcaaaaccagcaagtttttattggtgattttcaaagggggagggagtgcacaaatagggtgtgggtcacagagatcacatccttcacaaggtaataaaatatcacaaggtaaatggaggcagggcaagatcacaggactggggtgaaattaaaattgctaatgaagtttcgggcacgcattgtcattgaaaacattttatcaggagacagggtttgagagcagacaactggtctgaccaaaatttattaggaggcaatttcctcatcctaataagcctggaagcgctacggggaaccggggcttatttcatcccttatctgtaagcgtaaaagacagacgttcccaaagcggccatttcagaggcctccccttaggaacacattctctttctcagggatgttccttgctgagaaaaggaattcagcgatatttctcctatttgcttttgaaggaagagaaatgtggctctgttctgcctggcccacaggcagccagcctttaaggttatctcccttgttccctgaacaacgctgttatcctgttcttttttcacagtgcccagatttcatattgtttaaacaatttctgcagttaacgcaatcatcacagggtcctgaggtgacattcatcctcagtttatgaagaagatgggattaagagattaaagtaaagacaggcataggaaatcacaagagtattgattggggaagtgataagtgtccatgaaatcttcacaatttatgttcagagattgcagtaaagacaggcgtaagaaattataaaaatattaatttggggaactaataaatgtccatgaaatcttcaaatttatgttcttgtgccatggcctcagccggtccctctgtttggggtccctgacttcccgcaacacagcacagtgctttgaaaacacacataggattcaggaggcctctgtcttcttttcaacccctctcagctttcatgaaacagtttcatactgtcccagtggacagcccttacaggttcaggaagtggtcccatgtttaatgagttttggtccttttatattcaggactcacatatagtttcgaaaattgagggtgtcaccctctgacctgttcaaggcattgtcagggcaggctcgatacccccatccatcactgctggaaaaattctgagattatgatggaccacatttgtatccagaagaggcagggtttgtgcttgggcagggaaagggataataaaggtttgtagtgtctctgcttagccagaaacctgattcctgattgtcccctgggcagcccctggttcccctaacattttatctgccagtgtctgagcctcagcaatggcatctgatgtcctagtcagtccatgcatcagcagatgtgggattgcatggtggggggcatcctctaacagatagaaagataccccaggattagagaaatggagggctcagtctggtctccagcaggacctttgttcatggatgagttcacagcagaggagacctgggaagacacatgggaagcaagtggcaggaacaggaagtggaattgttgccaggtggattccccctcccagagaaccttttgttctgcaccttttcccttcaagtctaattctgtcttttcctttgttgcaatttacagacacttggccaacctcacatgcatcaacagcaggtaaataatcctctcacccctccctagggctcactgtctctggacatattttgtgtttgaaactgataggatgaggctcaaggtgggcccctcttttttcactcccctgtgggttgcgtgggaggaaggtggaatctctgaggagccagtgctgggtctgatgtttgaggatggagggtgctggtgactgtctcccatggaatcctgttccaagtggtcaggaaagatcctcatccaggtgctcaggatgagcactggagggctccttaatcctactgggacctcgttcctggccctcaggccatgggatccagatctctgaagagcaggtgaaagtgccagtctctgcacttgtgtggccaaggtcttgccatcactggcaaattgccagaaggcagagaggaccatgcaggtgccaatgagctcctgaattcggagggggtctgggcttgtcatttgtagctgtgtatctccatcctttgtgtacccagagtggggaatggggtgtccattcctgtcccctcctctggggtcatacatgcttacccatagcttgagcttttatagacttgagtagaatagggcatcactttttccactatgacaaagtttaacctctgggtgcagctatcttccatcatgactgcatgccctggtgacttctgcattcgtattgaaacttgactactttgcccactgccctgattgttgtccatgccttatccttgacctcatatttgagatggatgaagcgttcttgtgttcccctgtaggatctgaatccagtttggccctgaggctggtgaatggaggtgacaggtgtcagggccgagtggaggtcctataccgaggctcctggggcaccgtgtgtgatgactactgggacaccaatgatgccaatgtggtttgcaggcagctgggctgtggctgggccacgtcagccccaggaaatgcccggtttggccagggttcaggacccattgtcctggatgatgtgcgctgctcaggacatgagtcctatctgtggagctgcccccacaatggctggctctcccacaactgtggccatcatgaagacgctggtgtcatctgctcaggtgggcctccaagaccttcggctccctctcctaggttggagtttgctcaggaagaaaatcctaattacattatgatctcctctgaactcacagattcttctatgtttcttgtatttatgcagccttgttagctccctgctaagaatctgtatgaattttgctacagcggttggtgttcatgtggtcacttaggacaggggaccaaagtcaaacaacaacccagactttatccccttcctgaggcagtgcaaggaagaggcagaagagaaaactgctggctccccagggctccatttcttccctgctgagtagcagtggttgagggtatcatggacataggacagacagcggggcagaggagggatcctctcactgtgaggaactctgaaccaaagatgcttgtctggaagtgggttctcagctgagacccagtgaggaggtctggaaacagaggctcaagggttaggagtgcaaaatgggtgtctggttctatcaggcctgggttgtgtgaggttggagtccttgacctcaggtcctctcagaacgctgcagagcactgccttgccctgggtctggtgtggggagggcagcccccatgagactggccaggcttggcctcattattgcctgtggtcggggcttgaagatcacacaagggattttggctggagtggcttcctcagccttgctgactcaggaacacctaagatgtgcaagggagtgggttggtttaggtcaactgggttaccctgcgcagacacaatttgatctcctcagagctggcaatagtggacaggatctgcctcaaccccttacacggtgcatctctgtggggatgtgcatggcaatgtccctccctgtgtgataggaactaggatggactgagtgtcagactcgcccatttctttccctcctcattccagttttgtcgacttctgtgtaacattcctgatctgaccttctcttctctttctcacagcttcccagtcccagccgacacccagcccaggtaagttcccagtgtccttcctcaaaatgtcccttctctttctgcccaatcaccccttccccactccacagagctctcctgtttctctgtgtggatactgtggggcatattatttctaccgccaccaccggctgtatttcacatgggtccttttctattttccctaagtgtcagccggtctgagaaataaagggaaggcatacaaaagagcaaaattttaaagctgggtgttggggggagacatcacatgtcagcaggttccgtgatccctcctgagtagcaaaaccagcaagtttttattggtgattttcaaaaggggagggagtgcacaaatagggtgtgggtcacagagatcacatccttcacaaggtaataaaatatcacaaggtaaatggaggcagggcaagatcacaggactggggtgaaattaaaattgctaatgaagtttcgggcacgcattgtcattgaaaacattttatcaggagacagggtttgagagcagacaactggtctgaccaaaatttattaggaggcaatttcctcatcctaataagcctggaagcgctacgggggaccggggcttatttcatcccttatctgtaagcgtaaaagacagacgttcccaaagcggccatttcagaggcctccccttaggaacacattctctttctcagggatgttccttgctgagaaaaggaattcagcgatatttctcctatttgcttttgaaggaagagaaatgtggctctgttctgcctggcccacaggcagccagcctttaaggttatctcccttgttccctgaacaacgctgttatcctgttcttttttcacagtgcccagatttcatattgtttaaacaatttctgcagttaacgcaatcatcacagggtcctgaggtgacattcatcctcagtttatgaagaagatgggattaagagattaaagtaaagacaggcataggaaatcacaagagtattgattggggaagtgataagtgtccatgaaatcttcacaatttatgttcagagattgcagtaaagacaggcgtaagaaattataaaaatattaatttggggaactaataaatgtccatgaaatcttcaaatttatgttcttgtgccatggcctcagccggtccctctgtttggggtccctgacttcccgcaacacagcacagtgctttgaaaacacacataggattcaggaggcctctgtcttcttttcaacccctctcagctttcatgaaacagtttcatactgtcccagtggacagcccttacaggttcaggaagtggccccatgtttaatgagttttggtccttttatattcaggactcacatatagtttcgaaaattgagggtgtcaccctctgacctgttcaaggcattgtcagggcaggctcgatacccccatccatcactgctggaaaaattctgagattatgatggaccacatttgtatccagaagaggcagggtttgtgcttgggcagggaaagggataataaaggtttgtagtgtctctgcttagccagaaacctgattcctgattgtcccctgggcagcccctggttcccctaacattttatctgccagtgtctgagcctcagcaatggcatctgatgtcctagtcagtccatgcatcagcagatgtgggattgcatggtggggggcatcctctaacagatagaaagataccccaggattagagaaatggagggctcagtctggtctccagcaggacctttgttcatggatgagttcacagcagaggagacctgggaagacacatgggaagcaagtggcaggaacaggaagtggaattgttgccaggttgattccccctcccagagaaccttttgttctgtgccttttcccttcaagtctaattctgtcttttttctttgttgctatttacagacacttggccaacctctcgtgcatcaacagcaggtaaacaatcctctcacccctccctagggctcactatctctggacatattttgtgtttgaaactgataggatgaggctcaaggtgggcccctctcttttcatgtccctgtgggttgggtgggaggaaggtggagtttctagggagtcagccctgggtttgatgtttgaggatggagggtgctggtgactgtctctcatgggaccctgttccaagtgttcaggaacgatcctcatccaggtgctcaggacgagcactggaaggctccctaatcctgctgggacctctttcctggccctctgaccacgcactgcagacctgcaagggtgggtgaaaatttctgtccctgcagctgtctggccaagtccttgccatccctggaaatttgccagaaaccagagaggaccatgtggatgccaccaaactcttaaacatggggccagcatgggcctgctctctggagctgtggagctccatcctgtgtgtgcccagagtagggagtggggcattcattcctgtcacttccagtggggtcacaggtgcttccccaaaatctgagcctccataaacccaggcagcatagtgtatcacctctcctttccctatgataaagctgaacctccggtagcagttgtatgcaattgtgactgcttgcccaggtgactctggccattaggaagtaccctgagtgtggaacttgccttagattgttgacctcctggtggggatggatgaagggttcttgtgttcccctgtaggatctgaatccactttggccctgagactggtgaatggaggtgacaggtgtcgaggccgagtggaggtcctataccaaggctcctggggcaccgtgtgtgatgactactgggacaccaatgatgccaacgtggtctgcaggcagctgggctgtggctgggccatgtcagccccaggaaatgcccagtttggccagggctcaggacccattgtcctggatgatgtgcgctgctcaggacacgagtcttacctgtggagctgcccccacaatggctggctctcccacaactgtggccatcatgaagatgctggtgtcatctgctcaggtgggctttcaagaccttgggctccctctcttaagttgaagtttgctcaggaagaaaatcctaattacattctgatctcctcactcaaagctttttctatgttttctatatttctgaagtcttgttagctctctgctaagaatctttatgaattttgctacagtacctggtgcagctgtggccacttaggccagggctccgaactgaaacaacaacccagactttatccccatcctgaggcagtgcaaggaagaggcagaagagaaaagtgctggctccccacggctccatttcttccctgctgagtagcactggttgagggtatcgtggacacagcacagatagcaggggcagggagggatcctctcactacaaggaactgtgaactaaagatgcttgtctggaagtgggttctcagctgagacccagtgaggaggtctggaaatagaggctcaagggttaggagtgcaaatgcatgtctgtttgtgtcaggcctgcttggagtccttgacctcaggtcctctaagaatgctgcagagcactgcctgtgccccaggtctggtgtggggagggcagcccccatgagtctggccaggcatggccttgttattgcctgtggtcggggctgtaagatcacacaaggcatttgggctggagtggcctcctcagccttgctgactcaggaactgccaaaacatccaagggagagtgttggttttgggtcaacctggtcaccctgggcagacacaaagttactcacctcggagctgacaatagtggccaggatctgcctgcaccccttatatggtgcatctctgtgggaatttacatggcaatgcccctccctctgtgatagggactaggatggactgagtgtcaggcttgcccagttccttctatctttgttccagttttgccattttctgtatagtgcatctgatctgaccttctcttctctttctcacagctgctcagtcccagtcaacgcccaggccaggtgagtccccagcatccttcatcgggatgtcccttctctttctgcccagttacctcttccccactccacagagctctcctgcttttctgtgcggatactgtggggcatattatttttcctcccaccactctgtaactgagaccccagcatagtgcttcaacagacatagggttcaggaggcttctgtcttctgttcaatttatttcaggtttcatgaagcagtttcatactgtacaatggacaagccttacaggttcaggaagtggcctcatgtttaatgagctttagctcatttatattcagagctgatacaacctttctgagaattgagagtgactgccaaagtcacctgggaaggcaatgtcagttcaagccttaaacatgacttctgccatgggcaagcaatgtcagtgcaggcctgatacctccgtccctcactccttcaaataccccagattttgcaaggccatatctgcatccagaaaaggcagaggccatgctcgggcagggagagggataataaatatttctggtgcctccacttatcaggaaacttgatacccctttgggcggctccttggttcccctaacattttagctcgaactgtcagagtctcagcaatggtgtcacatgtgcccatcagtccatgtgtcactggatggggcaggctaacccttcgtagctgagaagaggacatctcacacttcagaggtaggagggatcgaactggtctccagcaaggcctttgttcctggctgtgctcactgagctgaagacttgggtagcacttggagcaagtggcaggaaccagaaattgaatagttttcatgatgcttgcctggttcagagatttttttttgtagctttcctccctcaagtctaattttgtcctttctctttgttgcaatttacagatacttggctgaccaccaacttaccggcattgacagtaggtaaataatcctctcgcccctccctagggctcactctctacctctggacaaacgtttcttttgaaaatgaaagaatgaggctcaagctggcgcctctgtttttcatgtttccgcgagttgcctggggaggtagactccctgggaacctagtcctgggtcagatgttggaggctggagggtgctggtgacctgtctcccctgggattctgttttatgtagtcaggaaagatcctcagccaggtgctcaggacaagccctggagggctccctaatcctactgggaccttgttcctggccctcaggccacaggctgcagacctgcgaatagtggggaaagtgcctgtccccatagctgtctggccaatgtcctaccattcctggcactttgctagaagccagagaggatcatgtgggtgccaccaaactcctgaacgtgaggcaggtcttggcctcctatctggagctgtgcagcttcatcctgtgtgagaatggagctcagaatgaggagtgaggcgtccattcctgtcacctccagtggggtcacaggtgcttccccaatacttgagcttccatagacttgggtggagtaggacatcactgcttcttccactatcatgaagctgaacctctgtctgtattcatattcaaaggtgattacctgcacacgtgactttggccattaggaagtgccctgagtgtggaacattccttaaatccttgacctcataatcagtatggatgaagggttcttgtgttcccctgtaggatctgaatccagtttggctctgaggctggtgaatggaggtgacaggtgtcgaggccgagtggaggtcctgtatcgaggctcctggggaaccgtgtgtgatgacagctgggacaccaatgatgccaatgtggtctgcaggcagctgggctgtggctgggccatgtcggccccaggaaatgcccggtttggccagggctcaggacccattgtcctggatgatgtgcgctgctcagggaatgagtcctacctgtggagctgcccccacaaaggctggctcacccacaactgtggccatcacgaagacgctggtgtcatctgctcaggtgggccttcaagacctggggctccctctcttggggtggagtttgctccagaagaaactcctaattacattctgatctcctcactcaaagcttctcctgtgtttcctgtgtttttgaagacttgttagctctctgctaagaatccatatgaattcactgcctagtgttcctgtggtcacttaggacaggggaccaaactgaaacaacaacccagactttatccccttcctgaggcagtgcaaggaagaggcagaagaaaaaatttctggctccccagggctccatttctcccctactgagtagcactgggtgagggtatggtggacacagcacagacagcggggcagaggagggatcctctccttaggaggaggctcatggtaaggaaaggacatatgttggggtagggaattctcacttgaggccccagtaaggagcatttggattggaggcatatgggctaagagtgcaaacgggtatctgtgcatgtgtgacctgggtcttggtcagtttcagctccttccaaagaactgcagtgcattgtgtgtctagcaagcatggtgttgggagggcagctcccatgagatctgccaggcaaagccttgttattacgtgtggtttgggatggaagatcacacaggggatttttgctggagtggtatcctgagacttgctgacttggtgaattgctaaaacctgcaagggaaagggttggttttggttcaattggacatcacatccagacacagagttaattgccttggagctggaaatggtggacagaatctgcttggatcccttataaggagcgtctttgaatccagccaaagcactagcattcagcaggtctgggtgaaactcctgggtcttgcttgaagcctctggccgctccctacctcaatcaatgtggtatctaccagttgtcaattgatctttaaagaggatctattattagggatgcttttgtttgcacatggcaggaactcaactcaaacactcttaagctagaaaggaattcattgtctcagttatccagaatgtttagtggtggatctggagcttcaggtacagctggttccagaagttccaagtcttttttccccatgctttgcttacatctactcttttatctgtgtgggcttcactatcaacttgctttttgcatgtggctgagagacagcagtgggcagccccaagtctatatcccaccaggagaaggagtcagtctgtcccagtacctctggctgacaaggcctgggaggactttgattgacctgcttgtaaacaggtgctttcttccaaaccatctctattagctctgacggctcagccagagttctatacccatctttgtgttcctttggggcgacgggaaggatgggggcactaggctctacttgaatcttgtaggatgctactttttaaaataggaatgactgtttctattagaataaaaaacaggcaggatgtttgtgacagagatagccatccctcagttggacccttcctttcttttgatactatctgctctttgctggttgacgttacccctctatcctgagatggaaccttccctctccctggctgttgcccatgttcattaccatcatctctatctagttccaggactttttcattatccccaactgaaagctcttaccccttaaccattcataatccatttctctttccctcagcccctggcaaccactaatctgctttctgcctctgtatacagattttactaagaattgtggtcactttctatgaatggaatcatagccttttctgtctggcttcattcacttaacataatgttttcaaggttcattcatattttagcatgtgtcagaactccactacttttaactgccaactaatattccattgtatggctacgccatctttgtctatccatttatcagcttatggacatatgggttgcttccatcttttggctgttgtgaataagtctgctatgagaattagtgtacggttttttgtttgcacttgtgtttccaattttgggagatatatacctaggagtgggattgctcggtaatagggtaattatgtttaatttattgtggaaacactgaacagttgccacagctgctgcaccaaatttgcattcccccaagcaatgcctgagaattctgattcctccgtatcctcaccaacacttgttatgatgtctttttcatcatggccatcctagtgggtgtaaggtggtatttcatggtgttttgatttgcatttccttgatgactaatgatgttgagcatcttttcatgtgttggtgggccctttgtatatattcttgggagaacaggggcttcattttatagatactaagctgaaggccagaggaactagactaatgtcagtatcttagcccaggctcacaggacagggttcaggtacacagagggatcaggatgcctggcccagtgttgtgtctagcatgtgacattccttcatggaggcctaactctgccattttttctccattctcaggcataggcactgctaggtatgcacaactaagtgtcctcatagttgcttctgcccactgtccctgtagctcatggtattcagtaggtccaggttttgtttcagattgaaggcaagctgtgggtttgaaagtgactcaggaataagcctcgggcctgatggggtggtccctgtgagcagagtgagtcagccagaggtggagaggtggactctcccaagaaccaggtcctagggctgcaccttgccaggcagctgggagctggtctcggttgcatcctgctgcaggggcacttgagcccagtggtccctgcagatccatgctgatggctcctgcactttaacctctgaatctgaaggcctggctcagcacttgaattgctggtcactggggtaactccatcagagaacatgcacagctcagtccacacccaagggttctagaaaacaacccttaagttgatgaagaacatcaacttaaaatgatgaagaacaggcttccgtcaatgtctatgctgctggagaacattaactggagacccagaaaccttggccttctggaagaattctgaacttcacttgacctcagatcctcttcctttaggagatacaggagagagttaattttcctgtcttttctagaatccaattctggtttggccctgaggctggtgaatggaggtgaccagtgtcagggccaggtggaggtcctgtaccaagtctcctggggcaccgtgtatgatgacaccaatgacgccaatgtggtctgcaggcagctgggccgtggctgggccgtggcattcccaggaaatgcctggtttgatcagggctcaggacccattgtcctggatgatgtgtgctgctcagggaatgagtcctaactgtggagctgcccgcacaatggctggctctcccacagctgtcagcacagtgaagatgctgtgtcatctgttcagatgggcctccaagaccttgggcctctattttagtgtgtggttttctccatgacaaggcttctctttgcactggcctcttcccagcctgagcttctcttcaagatggccagtttctctgatacctcagcaaggcaataacctcagcaaatgttgttggcgtctttgaattttatgggtaggcactagcttctttcttatgtaggttcctatagcaaacaagggttcaatctactttcaggctgtaagaatgaattcttccaacatctttttttgagactaaccgttaaggtttatatctactattccactctcctggatgactcttggggagcatttctaagtgatgagatggggacaggcactcagcatttctctcgctcatcatcctgggcactgggactgactcatgttttcttcttttccttgcagccacccaaataaattctactacgacaggtgagtctgctacaccccagtccagcaatatttctcttgggaattccaccctctcttgtttccagaagtaggaggagtagggtagactccccctgggggggtaatttctctctgaggactctgatctttgttagggtgacgagctgagttcccactgccatcactctcatgtctggttcaccgtggagggcccctgtggcctcctgctattgcctgctgatagtgctaagtgctggcagagatgctgctgtggaaggaggctttggtcctcccattatttcagatgaaaataactgtctaaattaacccatggaaaattaggaccttcattttagaaacatagccaagtaatacttctgcacgtatttgtcaaataaagaacactttcactttgagggagccatccgcaaagcgtttttgtgccacagtgaaaatatcctgggccaaatatgttgggaggtgctacatactctagaccttactggccatgaacagtgtaaactggaatggtcaaggctctgagaagtcctgtactaaggaaaaggatttaactttgtcagtcaaacaaattactatggaatggaaaaattatctactaaaatcctaaacagcttcatttttttttctagattggtggcatccaacaactacaaccactgcaagtaggtatcacattttctacctgaaccataggtcatacatttcttatccccaagcttggctatccatgagcgaatgctctgccccaccccagccttcctcaatctgcacatagccctggcctgtcccactatacccttcacctcttcatttgaatcaatgagataagtattcttaaaataatagacttaaaggcttttattttggggggtatctccaaagctttaggaggaagaagggagacaaatagtaaatggataattttactacaaattatgcttttccatgtcatttttatttcaccatatggctatgtttcaatagattttcattgcttttaaaaaataatagggatacttttctgtgttattaaatcttttctcacaatcattttaagtccctgtattgtattctattatacagatatgccatgaattatttgacaaatcatcagatgctagatatttgtttgtatttcttcattactgtaaatgattttgtgatgaagaatatttttatagataatttttttgcatacctcactaatttttcctttaggatataaatgggtttactggaccaaagtcaatgtcattgtagtgcctggtacatagaatgtacttcatgcatattaacttttactgtgttaggtattttaagatcttgctgtgtgtatggtcaaactaccatcaagaatggttgtaaaattatggaatgatgtaagagacaaactgatcttcttcctcagagctcacaatattattttgtacacaacaaactagaaaattacagttgtgacaactgtttccaaggaaaagttcagtgtgcaaagaggaagtattagtagagatcttccttgattggggagttaggggaagttccttatggaagtgacatttaagctgggagttaatagaggagcaggttcatttgctgaagtgtcttctaaccagaagggatgctttgaaggccctagggtgggaaggagcttggctctttgaaggagggtggggtgcgggcaaggagggactgcaggaaatctgtcgggtgaggccagatcattcagggccttgtgggtgggttaagactcccatctttatcctaaaggtagggaggctgcagaaagattttaatcttgagaattagctaattggaaatatatttgcaaaagatcatgtttatcttttctgccaaactgcatttcctgaaggcaggggccatgtctgcctttttcataatgtatccttattatctagcattgtgtctgcctttcaagaactgtttattgaaggaataaatgagtgaatgaatgaatggataaattaatgaataaatacataattactgttggcattttggcatacattccatacactgtatacacacacacaaacacacacacacacacagtatggcatgctttatatcccattgtataatccatcattttcatttaagtgtatataatacttttttcatgaccttaaaattagcatttttataacattgaaattatttgtatagaagaaggtttaatgactatatgattttccactgtatagatatatcatcatttagttaaacggttactaattgtggggcaaaaacattgtttccaattatattttataatgttaagtgactatatacaatagcatattttataaccatttatatttaatgattagaaatatgtaactcgtatccttgtctctgaaagtttgactttatccttaattatttcccagtgtagaaatagaaagggagggcaggccacatgatcttcaagaaacactgtcttcccatcaaatgggagaacgtatttctatctcataagggacttgtatctaggatatataagtgactcttgtagtcaatgataaaaagtcaaataacccaactgaacaatgagcaaaagacctgaaagatatttctctacagaagattcacagatagcagagaaggcattggaaagatgctcaatgtcattagccgtcagggacatgcaaatgaaacacccagtaggtgggctgtagtcaaaaagccagataatagcaagtgttgatgaggatgtggagaaattggaaaccttatgcacggctgcagggaatgtaaaatggtacagccactttgagaagcagtttggtggctcctcgaaaggttagacctggagtcaccatatgacccagcagttgtattcctaggcatatacccaggagaaatgaaaacatatgtccatacagaaacttgtatgtgaatgttcaggacagctttattcatagtagccaaatgtgaatgcaatgcaaatgtccatcatggtgaatcgagaaacaaatatgatatgtccatgcagtggagtattatttggcaataaaaatgaatttaatagtggccgggcgcggtggctcatacctgtaatcccagcattttgggaggccaagatgggcggattggctgaggtcaggacttcgagaccagcctggacaacgtggtgaaaccctgtctctactaaaaatacaaaaattagctgggcatagtggtgggcggctgtaatcccagctacttgggaagctggggcaggagaatcgcttgaacccgggaagcggaggttgcagtaagctgagatcgtgccactgcactccagcctgggtgacaagagcgaaactccatctcaaaacaaaacaaaagaaaaaaaagaatttaatattgatttatgctacaacatgatgaactttgaaaacacattgagaagtcagtcaaaaaaactaccatattgtacaatttgttttatatgaaatgtccacaataggcaaatctatagagacagaaaagtagatcagtgggtgccaggaatggagggtgttgagaagaaatggggagtgattgctaatgagtacagggtttctttttggggtgatgaaaataatctaaaattgactgtggtgatttcagagctctcagtatgctaaaaaccatggacttatccccttagaaaaagtaaagaaagagttatgaaaaagaaaaaaaaagacgttttaatttctatcactgagtgtgcacatgtttttaaaaagtttttattactataaaccaaccaacaaaatgtttgaccacttaatatttatccttttctgataaataacaatagctaatattgctgggtgcttatgtgcctggcactctctaagagtttatatagacatagaaacctatcttatgtttatgtataaatgttcatatatacatatcttatttaataccctcatcagacagatgaggcagatgccattaccactctcatttttctgatgaggaaactgaggcagagaggttaagtaactggctccagatcatggagctgatagaggcagagccaagatgcaaacccaggcttcttgttgcagaaaccctgctcctaacccaacgttgtgctacttgtgaattggcagagtcctgtgctcatggaagacgctagggaacacactgtgttatggagtgctctccacgggtcagcactgtgttcagccaggactatcccacgtccctgtctgtagctgattgaacaatgatagctgtcactttgttgctttcttggcatttttgctagaggtgacacatgctccctctgaagcttgggtcacctcctcgcagagggttgctgtccaggcctaacagggaaagcagggacttgaatcaaagcttctaatgttgggccacctagaaccaggcccaagagaggggacttgtttacagggaaagttaagtcttgttataaagtgcagaagatgaaactggatgatacttacacagatgattccttgtcacaaaatacctgaagacctggtacaatggagatgtcccctctctcctctctaggaccctcttcaaattgtggtggcttcttattctatgccagtgggacattctccagcccatcctaccctgcatactaccccaacaatgctaagtgtgtttgggaaatagaagtgaattctggttatcgcataaacctgggcttcagtaatctgaagtaagtaatgcctggtcatctggtgaggggtgagttcctctgcagcacacccactggtttagactgtgtcctgggctgggatgcttttcactctcatgtgccatggacaagcttttggtggctttgattcctaccataaagcatcagggaacactgatgtcctttgacttaattgaggaagagctagaagaaaaacctgtattcaatggcatccctcgtaaagtgcaaactatttataaaatggaggggcaataggaatttcaatgttgacttgaatacattttctccatacagattggaggcacaccataactgcagttttgattatgttgaaatctttgatggatcattgaatagcagtctcctgctggggaaaatctgtaatgataccaggcaaatatttacatcttcttacaaccgaatgaccattcactttcgaagtgacatcagtttccaaaacactggctttttggcttggtataactccttcccaagcggtaagtgcacactagaccatgcctatgaggcttggtggatttacccagctgcctctttgggggcaccatggttccccaaggaaatcaaagaagggcctcagcgatgcacggcccattctctttctcttggcactgactgtgtgggcaggcccttgggaaggcagcaaagggtgcagactgggggttccacctggccttgggtctgccaccaactctccaggggacctggtgactctccttcagagccacccctctccgtctggaggtgaggggatctgagcttggcgatgtctagagcccctttcagctctgcatggagcggtccagtacctccaccccagcttttccacatttctatttggcgactttagaggtgggaaaaggcctgtgggatgcttggcctttgaggtttgttgtgggacatttgttgtgggacatggccatgatctctcagttaatgtgtctttcagatgccaccttgaggttggtcaatttaaattcatcctatggtctatgtgccgggcgtgtagaaatttaccatggtggcacctgggggacagtttgtgatgactcctggaccattcaggaagctgaggtggtctgcagacagctagggtgtggacgtgcagtttcagcccttggaaatgcatattttggctctggctctggccccatcaccctggacgatgtagagtgctcagggacggaatccactctctggcagtgccggaaccgaggctggttctcccacaactgtaatcatcgtgaagatgctggtgtcatctgctcaggtatggcccaatgccatggaaggcccatttcacctgtaacttgctataaagcaagagcttaaggccagtggctgatggtgtctgtggcccaggcaggagctggtcattgtgtcctcgtggcctgcgcactccagaagagcatgcagggggctgctttatctttggccagtttctggacccagggccattatgctgaacactcatctgactaaaggacctccagcaatgattttacttctttatgcttcagtttccttgactgttgagtcggggtggctatgacagtacttgctactggtgacaattgggatggttttagaacaatcatggtcaaggagagagtgatgggtgttatgacctcagctgtaatcctgatgaccacaagtatgacgggacttagggagcatctggggaagctgggaaggcttctcaatagcaattgctgggtggacctggggaccctcgccgaggggggtcaggttatgggccatgtaagtgtatctctgtctcattccggcccctcctccaagccacatgtctgtgacctatgctttttttctattcctttttcaggaaaccatctatcgacacctggtaagtccctccgatttccattccacttccctggtctccaggtctctccattactgctgcctagactgtgcagggcatgttgctcactctccaaggagttcatctgtggtaccatcctctacagcccctgtcccctcccctgccggccaccaggatagtgtgcccctctctgtgcttcagtggcctgacccacctaagattaggatctccagtcagtcccgaggtgaggcccgccacctgtcagatttgactgtcctcacagacaccagaccctgaccagtgttggccaaatggggcccactgcatcgcagagctcctccctgcctgcccctgagctgctctgagtgttcccagcatggccctggcacctctccaacaccccccactgccccgccccctgcttgctttgtcatcccctcctggcctcccatagcagcagcttcaggcctgtgccctcccatccattctacactgtgcagccccttcaagagattcctcagggtcttctggtgatgaccccgctcctcagcacagcatgactgccagggctccccatgatctgctccctatgcttggtgccctctccccatcctctgcctgctccatctacacggaggttcccaaatctattccacccaggtgcagttgcacctgctgttcctctgcctgggacaccccgtttctacctctttgcctgccccctaattactgcccttttttccccactccatctggggcaggggccagacttccaggctcctctccttccccaggctttggtcaatctcatccttttcccagtgtgctgggattcgctctcctccagacctccccaaaggcaagtgagctccccaagggcaaggcctgtgtccagctcctccctgtggactcaggcttggcacagcatctgcacagctcatgagcagtagacagctgtgtcagggatgccagaaaactgatcctgatcttttctttttgtcaacagctccttttctcaacatcacccgtccaaacagtaagttctgagctccctgacaagtctgtggcagagtggcctggaaattccccttcccatttcctcagtgacaatggggctggggaggagatggcttcccccaaagtggtctccctgcaagagtgccctgccagccctcagtggacggtccagatctaggccacctcttgctcttacttggtttctgtcttgggaattattttataaaattttaaagtaatttaaatttaaagtagtccgcaggtagactgtgcagtgtgctctgggggtcaccgacattcccactttttgtcctgacagcagattattcctgcggaggcttcctatcccaaccatcaggggacttttccagcccattctatcccgggaactatccaaacaatgccaagtgtgtgtgggacattgaggtgcaaaacaactaccgtgtgactgtgatcttcagagatgtccagtaagtgtgcgcccagaagaatgccttggggccccacagacctttcaagagggaataaatggtgcttaagtgtgcgcccagaagaatgccttggggccccacagacctttcaagagggaataaatggtgcttagaaagccaggagagaagtttgctgagagacatttttgacctagcccagaggcatcccgtggagagttggggagggggcacgagagccttggagtggacaaaagctctggtttcaagtcctaggtctttcaccaatttgctgtgtgaccacaggaagtcactcaactttcctgagcctcagtcaaaagaggggaataaaatacctgctttcctcacctcactgtttactgggaaggtcacgagaaacagagaggagagagagggagagagatgtgaaaatatttacaaaatgttgtccagtggaaaagatggttgttaagtagtaatgatagacttaggggcaataatagcactaataatcctattaacaaccacactggccaggtatgctgcctcagggttgtaatcccaacactttgggaggccgaggcaggaggatcacctgaatgcaggagttcaagaccagcctgagcaatatagggagaccccctatctctacaaaaaagtacaaaaattagctgggtgtggtggcctgcacctgtagtcccagctactaaggaggctgaggtgggagaatcgctagagccctgggagttgaaggttgtggtgaactatgatagcgccagtgcactccagcttgtggaacaaaacgagaccctgtctcaggaaaacaaaacaaaacaaaaagaacaattgtatctgttttgtggaaccctttttctccacccattcctttcttcatgtgagttccccaggggtcgggcagagatggaggaattgctgctccagagggtagggtatctgctctgcatccaatcataagtagaaatcatcgttttaagcagagaggacattactaaaagcacttttctttctttctttctttctttctttctttctttttctttctttctttctttctttctttctttctttcttttctttctttctctctctctctctctcttctctctctctctctctctctctctctctctctctctttctctctctttctttctttctttttttttccggacatggagtctcgctctgtcacccaggctggaatgtagtggcacggtctcggctcactgcaacctctgcctcccgggttcaagcgattctcctgcctcagcctttcaagtagctgggcttacaggcacacgccacaatgcctggctaatttttgtatttttattagagacggggtttcaccatattggtcaggctggtcttcaactcctggcctcaggttatcctcccacctcggcctcccaaagtgctgggattacaggtgtgagccaccatgcctgatgtcaaaagtacattaatatatgatttatccaaggaggcgggtggcccagctaactgtgaagaggcaccagtgtttgctagtgtcctgaacaaggggctacactaatttcttctctaacagccactgttgaacaaaatagttttccctgttgatttctgtttgcagtgggctttggagtctctgctttagtgattcatttgggattttgcaaaagatacatcattttattctctttgtcattacaatacaaagattgcacttaaagctgatgcagtcctatgggaaaaggttgaccatgactggttctttaaccagcatcttgatagcaatgaccatcaccatttgtgacattttacaaagcccttttctgtatgttgttttatttgagcttcaccatagccctcttcagtgtgcatggatcagattactttgcctttgtaaataggaaaagctttagagagattatttgacttgcccagtatttatttattcaattatttatttctctcactatgaattcatgcatattgattttattctgtgggggcactagggacttttcgatggaagaaaaatggtctaaatcaggatgcgagcccttcctttcctgatgtaaagggctgacaggtgaggggctgtagatttcatatgtgtgattgcaaagggcaggactaagacccaggcatggaggttgagggaagatgagactctcttgatttaaggatacctatgactttcttttgtttaaatttttatttttctttttattttttgagacagggcctcactctgtcgcccaaactggagtgcagtggcacgatctcggctcactgcaacctctgcctccttggttcaagtgattttcctgcctcagcctcctgagtagcctccctcaccctacaggcttgtgccaccacgcccggctaatttttggatttttagtagagacagggtttcaccacgttggccaggctggtctcgaacttatgacctcagatgatccacctgccttggtctcccaaagtgctgggattataagtgtgagctactgcgcccagccaaggagacctatgactttcatcgatgaactttgtcagagtttctggcacagaggtgtgaccccaccctgagatctgaccccctgcgtcaaattctgggaggaaatgaagccaaatggtgtgtcctctctctgcaggcttgaaggtggctgcaactatgattatattgaagttttcgatggcccctaccgcagttcccctctcattgctcgagtttgtgatggggccagaggctccttcacttcttcctccaacttcatgtccattcgcttcatcagtgaccacagcatcacaaggagagggttccgggctgagtactactccagtccctccaatgacagcaccagtaagtccccttgtggaaatgctctgttgggactggggacatcctgagagcatctgtggctcaactgtcctgttgttgtgaaataagaaatgaaggaaccctttcaggtcaccagggcttgattttcagctgaaagggaccaggagcagtgggacttgggactctggctgcccagaaataaagtcagggctagaactggctgatgggtgatgattggtcttactgtggtcagcagagactaagtagagggtccagatgatgctcttcgtggagagtgatgagtcagtgccaaaggcagaggtgacctcttggcttgaaaccttgtgaccttctcagagtgtgggacactgtggccatggcctgagacctaacacatttggtttctatctgaagatggactgagctgggtggctggaagtggctgagataaggtcactcagacacttccagcagagcctgtatggccatgatttgagttgctgtatggactgatatgtagaatggccaagggccaggcaaggtgacatccagggtctcttatgcagtcaggattaaagactgacttgcttcatggctaaaagaccttgtttcatgacattcccacaatttgatcatacagttactttactttatagataaatggtaacttggccaaacataccacttatttaaaaatcctgcctccaattctccatcagagaaatcctgagtccacgtgctctccttgggctttcataaggatggggctgacttgaccctcgggtccttgggggattgcagtgaggtctatgcccacatcctaagtgctgaccctccctgtcagccaccctggtctgtgcactttttaagtggaaacagcctctggccccgtaggacttgtggagtctggggcagtgactgagtgccttatctgtccttgtctatcagacctgctctgtctgccaaatcacatgcaagccagtgtgagcaggagctatctccaatccttgggcttttctgccagtgaccttgtcatttccacctggaatggatactacgagtgtcggccccagataacgccgaacctggtgatattcacaattccctactcaggctgcggcaccttcaagcaggtaagcctggggcttcccattccatttcccagtgcacaagctttcttagagcggtatgtcctgtgcttcttgaattctggggatgaagaaattatgattttgggataatcaggacataattggaataaaggaagataaaaaacctttggtgctatgatatggctgcagctacttccaaataggaagaaggaagctgagcagaaagagtatctcccgctgtgtccagcagagagggcttctggcagaccgccactcccatcagcaataacaacagcagctcctggagcaggtccagattttgcagggcctgaagattatacagttagggttgggggtgagaggcaggtgttgagatgggcaggggcctcattaagtcaaagaatgcaatatctatgaacttttataaactttgcaaaaacgtatggctgtgcaaacacattgctaggccttggaggaggcctgcacattgcagtaggcagggaagagggggcccaaaagcttcagcttcattagctccatagtcagctggcctctgcagctaccatttgttgagctatcaccatctaagatggccccctgcatccaattttgggtgaaagtgaagccaatatggtgtgtcccttctctacaggcttgaaggtggctgcaactatgattatactgaagttttcaacagcccctaccaccgatttctgtggtttgcctgggactttgcagattttagcatagaaagtcccacgttccaggaaacccctcactcccaggcaaatgaggacggttagtcaccctacaagtggcagatgctgtgattggtccttgtcatactcccccagtgaaggcctggccttaattgtgttgggttctggcttgctgtgagtttggtcagtggaagtcagtccactgaaggtgaccattgttcctatgccaagtgagcagcctggagactccctgagcggccccgctgagggcccttcacacccattcacacccattcacactcgttcacacccattcacacccgtttggagcggccagacaactctgtcagccctgtttcttctaacttggctgatcatgaatagcacacgccacattcttattcctccactcatttatttatttttattttattttaattttttaatgacaggttctcattctgttgcccaggctggatgcccaggcaggggtgcatcatagctcacagcagacttgaactcctgggcttaagcgatcttccagcctcagcctccagagtagctgggactataggcatgcaccaccacacccagctaattaacaaatttttttttgtagaggtgggatcttgctatgtgtcccaggctgatctcgaactcctgagctcaagtgatcctcctgccttggcctcccaaatgctgggattatgggcatgaaccactgctcctggcctcctctatttctttaaataaccatattgcctatcacactgagtgcctcaggggcagggccaatgttttgttcatctttgcaacccccagtgcccctggtcctgagcctaagagttgatatagtattattaacagctcatacagatatcagacactgaactaagtgtgctatataacttttaaaattctcaggacaactttattcccacttaattatgaggcaacggaggcttgcagaaggtaagccacttgcccagaaccatatggccatgagctgcgggtctaagacacagaagtagggctgtgccatccatggctggagcttcccacagctccaccaggctggcctgtgatagtgaatttttatctaaaattagaactgcttcttctgaccaagaaataaatctgcactccatgttcattatttggagtggattcagaatttacctccatcgtaggcaccacaggcaaatgtgacatccatgcaaatgatcatgttaatgtacagggttcaatggaaagcacttgagagcatctttgaaagagtaagaagggtcatactgtcatgtgcgtccgtgtgaaaagaccaccaaacaagctttgtgtgagcaataaagctttttaattacctgggtgcaggtgggctgagtccaaaaagagagtcagcgaagagagataggggtggggccgttttataggatttgggtaggtagtggaaaattacagtcaaagggggttgttctctggcgggcaggggcgggggtcacaaggtgctcagtgggggagcttctgagccaggagaaggaatttcacaaggtaacgtcatcagttaaggcaggaaccagccatttttacttgttttgtgattcttcagttacttcaggccatctggatgtatatgtgcaggcttgggctcagaggcctgacaaaagggtttattgcggtcgtatggtttaagtcatacggtttattgtgacaactgttggcactgaaatataaagcaaaaacaaatttttaagacagtttaaagtcagaaaatgtacgctaagagcaggtggacaaggtagaaccccttcctgtgggtcttccccagacctggacccagagtgtaagctctggcaccctgtgctggctcatagccaaaggataggcacgtgccatggccatctctgagtggttctgggaggggtggaagtcttgttgagtcatgtccctctcattcacacccaaatcagctatgggattcccttagcaggtgacatgtgcctgactctgctctcttgcctgcctctcctaggcagacaatgacaccatcgactattccaacttcctcacagcagctgtctcaggtggcatcatcaagaggaggacagacctccgtattcacgtcagctgcagaatgcttcagaacacctgggtcgacaccatgtacattgctaatgacaccatccacgttgctaataacaccatccaggtcgaggaagtccagtatggcaattttgacgtgaacatttccttttatacttcctcatctttcttgtatcctgtgaccagccgcccttactacgtggacctgaaccaggacttgtacgttcaggctgaaatcctccattctgatgctgtactgaccttgtttgtggacacctgcgtggcatcaccatactccaatgacttcacgtctttgacttatgatctaatccggagtgggtaaggagtgtctttatgctatggccttaaacctttacttgataactcaaacatgagtagccccaaaggcttgaagaatgcaaattttgatgaactgcagttcccagtacttccagcttaactggatccctttctacatgtagtgatgtcctgtagctttcacctttgaggtgcttttactctgtgttctgtatcacatccctgatttctcatcaggtaggatgaccatgtatcatctccagttaacatctggggagatgggtgtctggagaatagaacagctcagcagtgttcactcagcaggttagctgtaaactgtgatcagactctaggtgactgaactccagccatacggttaaaaagacctgcgtatagtgggaaaagcattgatttggagcagaccaaggttgaaatgccagctctgccacgtgccagttgcatgattctgggccagtgaaagcacctctatggaccagttgctcgcctgtcaagtggggataatgacacgcacatcataaggctgttgggaggatggaatgagagagagtggatgtggcactgagcacagagagtgtgcggcaggtggtccaccaggaatgtgcactgaagatggcaggagccctgctgccctccttcagcctgggaatagaagctctgggagtccatgggttccagtcaagctcaggaggtgcagaggtcaggccagagatgtcaggctggggccagagggtgtgcaggctgggctgctctaccatagcccagcttccctggatgactgcatgtgggtgaagtggggtttgactcttctgcactcatgatgacaccatgatgtgcaactccagccccctctgaagtctctgttgatggatgtgtaccacacttcttggcttacaatatagacctggacacttcagtagccattgccttccaagagaatttataccaataggataaagagttctactaggaattagaggtgggcagattcaattcgacaccctcttgatatgctaaacgtagcacctctttccaggcacagtgtgaacatatgtcagttcagtaggtaggtgttgaggctcaccttgtttacagtctatgcagcttgctcaattcacagcagcccccttggtggctgagaggaggggagaaagcttaaccagattcccgttgtacaaatagtcataaggtgacttttgaatttgtgtgaattgattgacattaatgaaaatgagtgggtgaccttagttcttccttgccaaaggattctttctggtcaaatcctgccatttctatatgacaatgcaatttgctgggaagacggggatgtgtgtgcaggggtagatgtaccctggctatacctggagcacagggacttattggctacacctggccatcaacaagatcatccacctggaagtccattagaatgacctggggctccaaacacaccctgcccaggccctacccgtacattctctgtttggcctggtggggcttgggcatgttacgtttaaaaaatcttgagtgattctgaggtggagtcatggctgtggcttcgctgtggcattctggtctgcgtggagccctgaatggcagggttttacggcaaatgcaatgactgcccaggggcttctaagtgaccctgacctttttcccaagtgtcccacctctgaacaagcctctggctatttttgcttcctcctttgccactaagggagctactgtgaaaaaaaaaaacaaaaacaaaaaacaaaacttggtatttgagagaatctgggttgcctatggaggaaggaaggaggctctagaagacagaaggaggggagcagatcctggccaggttcccaggctgagccagactgccctggagaccacatccaccacccacgagaaatgcccatcctaggccagtgggccagttttcctggcttttctctttgccatgcccttcaaaatcccaccaatctataataactgggttagtgtgagctgcttcttccatcttaggaaaattcctgtaagcatatccttaggttattttccctctgacccctgctgagaggaggtgccccagggaatgaggagggggtttatatcggtataggggctcctggagggttcgcaggccagtgtggaacgtacagctgcatggggctcagggcaggctgaggagggtcaggaaagagaggccctgggagagggagggtcagggcactgtactcagagtgcagccgaatgagaccttgcctggccctgacaccaggtgagagaagggaaggtcatttacttttctgccctgtctctgggtcccgctcctgggctccaaactccagctacttccctgactcatctggtttacctgggtgcatggagcatgtggtcattgtgggattaggcctcaacccactgtgcagtatgggacctgcttgtctattgggaaagccctcgcaggctttgctgcctaaggatggcggtgaggtaccggagctgccaggatttctctgcaggcccctcagtgagtgtctgatccacacgttctgacagaaggaaggtgaggtgtgcaggaggcaggggcagtgaggacaggctgtggagttcctcacctggtacaactgagtcatgaaggaagaatcgggccttggtgagagctaaggggctactgttctcttccagatgcgtgagggatgacacctacggaccctactcctcgccgtctcttcgcattgcccgcttccggttcagggccttccacttcctgaaccgcttcccctccgtgtacctgcgttgtaaaatggtggtgtgcagagcgtatgacccctcttcccgctgctaccgaggctgtgtgttgaggtcgaagagggatgtgggctcctaccaggaaaaggtggacgtcgtcctgggtcccatccagctgcagacccccccacgccgagaagaggagcctcggtaggtggtcgctctcagaccccactgtccaccagggcgcagacccctgactcggggacttgggatgttcctcttggtgtcatattccaactcagattgagccctacattgtgctgcacctggtcatacggagttgaatcagacctggttcccgcctcccccaaggctcatggtccttggaggacccgttgcagggcgaggtcaagagagttctgacctggatggcccatagacctgacgtcccagaatccatgcttctcatctgcaaaatgaaaatgtcaatacttacttcttagcactgttgagagggttacttacataaaggaattttggtgaaactgcctcagcctgttcctggtgcaagtcattgagtgcttggtaaatggtagtttttgttactcctgttgttgtcacccatgttaacaacaccaatgatgacagtattcctcacaacgataataactataacagcagacgtgttgacatcagggtctagacagggccatggggacgccagctgcatggatttgtcctgatcgctggcaggctctactgggcacaagctatgtcacttttcttctccagaacagggagtgcatctgctgctgtgctgctgtgttgctgtgcggctgtgatgctgcgctgctgtgctgctgtgctgctgtgctgctgtcatgctgtgctgctgtgcggctgtgcggttgtgcggctgtgttgctgtgcggctgtgcggctgtgctgctgtgttgctgtgcggctgtgctgctgtgttgctgtgcggctgtgctgctgtgttgctgtgcggctgtgcggctgtgctgctgtgttgctgtgctgctgtgcggctgtgctgctgtgttgggggcatggacgagggaatgaatgtttgcagagtgatgcccaggatttctggcccagtctggagctaggtcaacagatgtggtggccatggtgttgggggtgggtggggcagcagtagttgtcacaagccctctccttggtcagggcgctgcccatggggcatctttgacagctctttcctcttgattcctattcaggccgtctttatgtccacctgagtccagactctttcctcacttgttcattcattcaatgcatgtttaatgaaggactgttatgcaccaggaggcagataaagtcttggaggaaaagatgcaattcagaataagtctcatgaatggtgcatgcaatggggtcggagtgaggagcaaaggacatcagggcagggcgaaggtgcctgtgggcataggctcacttccctcctctccctcctgttccctgcagctgccgtagtagctcacgtcctgggggcctcttacctgggactcttgtaatcatttcccagctggtctaaaatgcccaactctctcccctcccattcatctggagcctcaggccagatttgttctcccaaagcccagttcccagttcctgctaagaaaaacttccctgactctccttggctgataaacgtgaaatctctctagtctgacagtcagctgcccattggggtctggcctcagtttcccattcagcacttccttctccaagttttttatcctttcccaccaaacagttctgattgcctttactatgcccagggggccatggcctttacttgtcttcctctcctcctctgccaggctctgtcctggtgccctgtctgttattgtggtctcctctccttcccagacgtgttggtggctgatgtggaggagacagccagcacccaggggaggtatcacagcactgccatctcttctggggtcttcctggctgtggttctggttgtggcagccttcaccctggggaggaaggcacacagcaccagtggccggcctctgagctcctagatatgaagcccagagaaggtgtttagatattggctctgccagcccaggcacccgagagaggatggaagaaacaagggtgcagagcttggcgcccagcagcacctgaactccatttagcttggcacaggtgtatggtggggtgggtggaggtggggtgaagaaagatggggtgggtagaggtggggtgaagaaaggtggagcgaggttttccccagatccgaaggctcagtgctgggtcaaaatgtcaaaggtaaacaggtgctaacgtctaaagcctcacctgcaactctaagccaaacattagtaacagcagagctttctctaggtggaatttctgagcctttttttttttttttttttgagacagtgtcttgctttgttgcccaggcttgagtgcagtggcacaatctcaactcactgcaacctccgtctcccgggttcaagcgattcttctgcctcagcctccctagtagctaagattacagacaggctagaccatgcccagctaagttttgtatttttagtagagacggggtttcatcatgttggccaggctggtctcaaactcctgacttcaagtgatctgcctgcctaggcctcccaaagtgccgggattacaggtgtgagccactgcacccggcctcttttctgaccttttataagctcgcttcttaggcctgtagcataaatctcagcctttccttagggtagagccagctgaataaagaacctttttcagagtaagtgtcaatttggccactgttgccttcgtttcccctaagaactagatcctttcaaattaagcagacaggtggggtggttgtcatacagaatgagaaggggcaactcgtgtgtcttcccagtgtccttggagtgttggttcttcccaaagcaggatatgcaggatgcagcctggagaaagacaagaatgctaaatgcattgtaagtttcagtggctgtgattgaaaattaaagatgattgcctccatttctctagggatctgcctcttttggtttttgacacttcatctccagaactatgggctggggcggttcagggaaagaagcaaactccttagggcccttaggaagggagtcctgtttgcatgaggtctccagagagaaggagattgacaggtgacccaaggagctcagaagaaacaaagggatgagctgggttccaaggaagcagtacatttgcctagaaaatcagagagaaatcaggctcagggctcctaggtcaggcttggcaggaatgggagcttttgtgtactgccctggcaatgccagtgtttgccccatgaagccaatctcaggacccctgtcccaagaggggacagctaagacagcctaactctggatgtgtgagttgagctgcatgagaccccagcagggcaatggctacaggggaaaccccaggacaaggggacagagaattccagcagagacttggccatagctgccagctctgactagggctgcccaagagctgcccaccaccggcagctgtggtgagacgccatgagcctccgtgggattcagagtgcgtcctgagccctaccaggagtcagaggagctagggggccccagggactgtctcttgttggtttccattctccttgccatcacccccaacactcacccttaacctcccaggctggggcagttaaggaaagccttaagggttcccctgtgaccatgagtctgccctgaaaagcaatgtcaatgcagtggaatgcaggcaccagcccaggactggatctgagcagatgcagaagcagcaggaagctggagtggtgtgcgggtttgaggtacacatcaatcagagtaacaaagtggcaagtcagacatccgagaattcaaaaaagttcagaggctgggaacccaacatggaatcccaactccatccattcattcgttcgttcattcattcattcattcattcattcattcgttcattcactcattcatgaatgtctaagttgtaccctgtgcttgagaaggagcagtggaggctgtgggtccctgctgtgaggatgagggggaccctggggctgggggctcagcaggcttgccctgagtggtccccatgagcgccagccccaagccaggctctgtacttgaacctgtggatacaaagaggggtcatgcaggggtcaccattataaggggaaatttatttccacaggaaacatttccacctcctgaagtgtcccctctccttaaaaatagccccagtagccagtgcttcttcgcagataaccaccacagtgttagccacttggcagcctctcaaggaaggaggtaatggcccctttatcagcagggcccagccaggagagtggctagtagggacagatgagtttggtagcaagaggcagtgaggtccaggtgaaaggtagagcagaagacagggccaccggtgacaggggctctggactaaagctgtcagagtgtgactgagggtccagtcacaggggacacagagaagtgggcttgcttgggagcagggacccatcctccccatccacaccacatctccacactcagggaggattgggctgacaccaagtggctgtgattcccagcaactgagactgtggtttgaggcaagggtgctcaactctactgcacgtgagaatggcccgggggcttttgaacctgctgctgccaggctgcacccaagccagttagatcagaatctaatcagagggcaggcctggacattggtgacccaccagactcaggttgttccaagattgagagctgctggtttaggactccttaaatccctctgagagagtccaggttgtgccctgtgcttaagaaggagcagtggagactatgggtccctgctgtgaggatgagggggaccctggtgcggggttctcagcaggcttgccctgagtgttcctgaaagatctactttccaagtcccaaaagaccgtatcaaaatcccactgacctaaagtgcctcatttctgctgattcatatttgccccagcctctgccatccataagaacatgccatggaggaaacactgattaagcatcttctgccagcctggcaccttggacataatcctctaatcctccatgtggccaggtattattctcacctggcagggatggaaactgaggctgagagaggcaagtcagcacagaactgcacaggattcaggtagcgagtggcagagttggggtctgagtcggggtcactgacttctggtcctaggttccctcctccctgttccatcatccccaaggcaccaggagcccaggagcccaggaggcctggcctcacattgagtttgcacagagaactgcatcagacacactcctgtctgcagctcctatgtaagatgtggtaccaggtgcaaaaggagggcttaaaggagggttgtgatgtctacaccacacccacaccccagctggccccacgggactactcacttgacctgtggtggctcctccaagttctccgcacctccagtacctgctcatagcccggtgatcctgctccaggctccaccttcagcagagtgactgacaaccaggggccaagagaacacaaggccgggccacatggcacctgttttgagctgtctcctgtgaccttgtagggacagaggctgccctccagccccttcgaaccacagcatctcaccatcctcctgttatcccacctgccagtgccagagggcgctgcagaacaaccttggagctattttattcctgaagaacttgttactgtgtttactgtgagtgcccgtggttgtccattacaggaaggggttccacagttttcagctctaataaaggactcctgtgaaagcctgtcctggctcctttccattactttaaggggacagaatccgatctactgtctgacaacagagtggatggtagctcccctttctgcctggtccctaccacaggctgaaggtggcattcagcagccccttgagatcttgtcccctccagccctgttcctggcatccaaatccctgcagtggctagtaaggggttctgccctgggcaggggctctatcctctgcaggtttgatggcacctgaatggcttctggtgtgtgggaatcagggacagccccagccaatggtcgtttcctgtaggggatgaaactttgacctcagcatctcttcccattgcctgtgttggctggagtacttagtgtcccgagtgcttggcaaggccactcaggtgtgcactgactggagggagaaggtcctctcgggaaacctgtgtctgtgaaatgctgcattttcagaaatcatacaagctggatgttatgtggccattattaaaaattaaattgtagagtcttacaattaaataaatattatattaaaaataaaaatattaaataccaaaactcagcactttctggttatttgactccattttactattacctgtgcccaaggatatttacatcacgttgtgtctgtctgctggaaatactgtcccccgcggagtgactgcccagctctcccagctccacatgcaatggcgtcttattgctggcataaaatggccatggggggaggattcacaccatggaaatcacgctacaaaggaagcttccaccttcccagagcctgttgttaaagatttcacaatgccccactgcctacagctcacccagaaaggggcaaatacactaggagagcttggaaaaaggcttcattggcctgccaccatgttcaagtttccttcattggcattaaatttttttggaaagcgtctgtgttttagcaagtgtggaatccaaagctacctcggcagggagatgccttgggaagctcccacaggctctgatgaaagcagtggttgtggcacctggcctactcttggcccctggggaagggaaagctgtccaggtacaggttaggggcaggccaaagacgggaagccaggtggtggaggctatgggatggcacacgtcagagtcctgcctcatctccctctgcctgagtccagcaccaaattccctctcctgctcctcttagccatgaggacgtctgatatccctcagctccatctttggatatctggcctgagccaaccttcaggtgacagttctgttttccctggaactctatacctataagtgcctgggagcccatatggtttgtccaagcttcgaaatgaggaacagcatccctgctgaatcagagacaaagatttgtttctgtaacagcatcttccaagaggcttaagctccaagattaagtgatggagtcatgtgggggcactgatgactccaagggcttggcctgggacaactgctcaggacaaaggagaagccaaggcagagtgaggccaccatgctgggtaatgactcatctgattgagatctaagatttgtacagagctagcagggaacatagaggagtgaacgctttcaaaatctgctccatcctcattcacagcctgctggggagctctctatggtcaaggaggcttggaatgggtgcacagccacccaggctttcctgtgttctgatgagttagaatctctcctcaaccaacccacctccaccccatgcaccactgcagatttctacatatgggactacaggtggcaaagatggggagtctgcttcttgatacctgtcttctcccaagtatgtaaatactggagggttgagtgttggcctggggtgcctaggcatagtgccaagctcagacttttgtattggaggggtgggtgggggtggaaaattatgaagaaactcacagggaacacaggatcagtaacttctcaggatagagacccacagtgactgtcccagcttgtcaccttctcccagagggatgccttctgtgtgctgtgaggagagcagaagagttggggagggggtatcaggaagctactggaactcttaaatctttgtggaagcctcactggttaagtttggtcaggatgtggttggctcccattgtgtcaggatggctgcctagttaataaaattgctgtctcttcttcctttctctgatcaccggattttcctttaaattacatgcagaattttggtaggggaaacaattcagtactattttcctgggactttggttaataaaatctctgtctcttctcccttcctctgatcactggattttcctttaaattacacccagaactttggtaggggaaccaattcagtactattttcctgggacttttccagttttagcactgaaaatctcaagttctggaacccttcgatcccagacaagccagaatggctggtcactctagagcctctggacaaggctacagggaagaggaggtccagatgctataacaatcatcaaacacagaagactggaaaccctttagcaatgaaatttagactttcacttttttagtctcttttcaattcagtttgaataattccttttagcatttcttgtagggaaggtctagtggttatgaactgatgaactcccttggttatggttagtctgggaaagtctttatatttccttcgtttacaaaggacagttttcctgtctaaagtattcttggttgactgactttttgtcttttagtattttgaatatatcattatcccagtctctcctggcctgcaaagtttccgctgagaagttaactcatagacttaaggggagctcctttgtatatgataagttgcttttcttgtcgctctcaaaattctctcttcgactactgaaaatttaattatattgtgtctcattgtaaaccttttaggattcaacctattgggaacctttgatcttcatgaatctggatgtccatttctctgcctagatatcagaaattttcaattatgattttcttaaatatgtttttctcccttttctgtctcttttctgcatctggaattctcagaatatgtacattggtttacttgatggtatcacgtaaatcccagtcttttccccctatttttcatctttcttctttttgtttatctaaccagatgatttcaaataacctgtttgagttcactgattctttcttctgctaatcaagcttactattgaagatctcttgagtttttcagctcagtcattgtattcttcagctgtaggatttctgcttgtttcttttttatggtttctattttttaaatgaacttataatttttttcattgttgtttcatagatttcatgtagtactaaatctgttcttttcagtgaacttcaagacaattatttgaattatttgtcaagtagttaatggatttccacttctttagagctggttactggagccttattagtttcctttgatggaatcatgtttgcctgattcttcatggtccttgtaatcttgcaatggtgtctgtgcatcagaaggagcagtcgcctcttctgatctttaaagactggatttggtaggaaaagatctactgggtctcaagacagatatgccgcctctgggactgcagtcaagctgggatggcccttggtcatggggcttctttcatgtcttcagttgggtccatggttggcagtcctgttatcctgggtgtgggtgagtatagtttctgtggggtccccagagaaaagagactgcctttaacactacagaaaccagggctagagttgactatgcaggctggttttcagtctggggctgagtctatggtagctgacctgttcctgggacacaggcataccttctagaagcagatttctatgctcttatgtttcagtggtgtgtcacaacctcctacctgggtcctgaagcttccataaaggtatatgtgtctgtggatggttgccaaattgttgttttgtggagaagtgagagctggggattcctattctgccatcttgctcacatcacccttccctctgccttggacattttttctttaaccaaataaattcatcagttggcatatagccttgaactgtataagcctggataattgtaataaaagtttcttgggcctacatttgtgggtgtacacaatcaccttcgatataaggagcaaggtgaaagtaggttgatgttgatccttccttctttccttcctttcttcctttcttttcttttcttttcttttcttttcttttctttctttctttcttttttctttcttttttctattggagacatagttactaaggtcataatgtttatcgtttggtagctatgaaccagttactcattaggatgtaaatataactggctaacatttaacccccaccttacaagcaataaatactaccgtgacagtaatgctttctaactccttaaaagtcatggtatttctctttgaaagcatttcatgtttaaatagaaaaaactcccctataagcaggaaagaatattttatgctctccatgtcaaaaatggctgaaacaacctctgatatgtgagatgaattggatggtcaaaagcagtgaatgaaaaggatttccagataatggctgacttgaaagctaaaaactatacaactccttaataagagcagttaccgaatgacaagtgataggccaatttggaatggagtgaaattcagtgatgcatttggtatttttgtagactttaagtcctaagtgcttcatctctctgatggctattaccacagaattaaaaaaaaaaaaagagagagaggttaaacaaaagcatcaattaatctatataggaatttggatattttcattgaaaatgaagtcttttgaaatttctgggtctgtttaatttaaagcattctgagtctgtaccaaagatgagcaataattgctcacaagggtactggggttctctgttgcattgtgaatatggaattgtagtggtagttagcaacatatagtccactggttctagctatgtcctcgttttccatggtttaatttttgcaagccctgtcaatatattttaagattaggaaagtcattaagaatcattttgtgtaagctgtcaggataggtgttttccaagcatagtatttttcatatttctatctgattatttttgatatttatttggttgtattctagaacagctttgacaggattttggagattggggtgaagcactgaaccaaagtcacagatatgcacatatccctctaagaaggtgaagttaacatttgtcagagggacctggaagatttctttgtaaccacctgtccaaggagtttggtatctctaaaagtgaacaggcagagcatgtctggttagttttggaaggggcgtgactaacaggtgatggagtgttgttcttactgttgaaagattttcttaaggggcaagtgttttattttctggtattcatgggacattgtaggggttaggatattttcagcttcatatgaaagaaacccactcaagttggcttaaacagcaaggacaaatacagtagttcccccttatccacaaagtatacatttcaagaccctaatgaatatctgaaattgcagatagtgttttttcctattcatacatacctatgacaaactttatttcataaattagatggtaagaaattaacaatgataataaaatagaacaattataaaaatatgctataataaaagttatgtaaatgtggtctgcctttgtttctcaaaacatcttattgtactgtagatc

SEQ ID NO: 23923 - DNA, 1793 bp, Homo Sapiens
tcagcattcatcctccttgggtggcttgagccacagtgaggagattccaaatactaccaccacacaacacagcagcacgttatctacgcagcagaataccctttcatcatcaacatcttctgggcgcacttcgacatccactcttttgcacacaagtgtggagagtgaggcgaatctccattcttcctccagcactttttccaccacatccagcacagtctctgcacctcccccagtggtcagtgtctcctccagtctcaatagtggcagtagcctgggcctcagcctaggcagcaactccactgtcacagcctcgactcgaagctcagttgctacgacttcaggaaaagctcctcccaacctccctcctggggtcccgccgttgttgcctaatccgtatattatggctccagggctgttacatgcctacccgccacaagtatatggttatgatgacttgcagatgcttcagacaagatttccattggattactacagcatcccatttcccacacccactactccgctgactgggagggatggtagcctggccagcaacccttattctggtgacctcacaaagttcggccgtggggatgcctcctccccagccccggccacaaccttggcccaaccccaacagaaccagacgcagactcaccataccacgcagcagacattcctgaacccggcgctgcctcctggctacagttacaccagcctgccatactatacaggggtcccgggcctccccagcaccttccagtatgggcctgctgtgttccctgtggctcctacctcttccaagcagcatggtgtgaatgtcagtgtgaatgcatcggccacccctttccaacagccgagtggatatgggtctcatggatacaacactggtgtttcagtcacctccagtaacacgggcgtgccagatatctcgggttctgtgtactccaaaacccagcagtcctttgagaaacaaggttttcattccggtactcctgctgcttccttcaacttgccttcagccctaggaagtgggggccccatcaatccggccacagctgctgcctacccacctgccccctttatgcacattctgaccccccatcagcagccgcattctcagatccttcaccatcacctgcagcaggatggccaggacatcctcaatttcgtcgatgaccagcttggtgaataagtattactgtaccaactgggcctcctctagcaggcccctgaaggcagtggaataaaatgaaatcttcgccctttaagaactcctgaccttaatgtggtagtagtatcttgtccttgaggggatttccttcccctcacccctaagactttcacaacctggtgactggaaagaaccaccacaaatcttcatttcctccagaaactgctacatctacagccgatttcaggcagtaaagggagagggatagaggagattgggtggaaaatggagaggatcaagaaggagctgagaccatttcaaagaaaaaaaatgctttatagagttttaagtatgacttagatgggtccaggcaaataaactaaaaagaagtgaaggcaacatgtatcgtctggcagaactaaatcttggagtggggtgagggatgaaagactacatattgggtacagtgtacactgctcgggtgatgggtgcgctaaagtcgcagaaatcactaaagaactcatccatgtaaccaaacaccacctgtaccccaaaaacgaaataaaaaaacaaaaccttggggcccattccccctaggaatggactactgtaaaaa

SEQ ID NO: 23924 - DNA, 1793 bp, Homo Sapiens; identical to SEQ ID NO: 23923

SEQ ID NO: 23925 - DNA, 1467 bp, Homo Sapiens
cacatgtgtatggcggtgaggcgggcgggtacatggcgggctctgtgggactggcgttgtgcgggcagacgttggtggtgcggggcggcagccgattcctggccacctccatagcaagcagtgatgatgacagcctcttcatctatgactgcagtgctgcagaaaagaagtcacaagaaaataaaggggaggacgcgcccttggaccaggggagcggtgcgattctggcgtccaccttctccaagtctggcagctattttgctttaaccgatgacagtaagcgtctgattcttttccgtacaaaaccatggcaatgtctgagtgtcaggaccgtggcaaggaggtgtacagccctgactttcatagcctcggaggagaaggtcttggtggccgacaagtctggagacgtctactccttttcggtgctggagccacacgggtgtggccgtctaaagctgggacacctgtctatgctggtagatgtggctgtgagtcctgatgaccgcttcatcctcactgccgaccgggacgagaagatccgagtcagctgggccgcggcgccccatagcatcgagtccttctgcttggggcacacagagtttgtgagccgtatctccgtggtgccaactcagcccgggctgcttctgtcctcctctggggacggcaccctgaggctctgggagtacaggagcggccgccagctgcactgctgtcacctggccagtctgcaggagctggtggacccccaggccccccagaagtttgccgcgtccaggattgcattctggtgccaggagaactgcgtggcgctcctgtgcgacggcactcctgtggtctacatcttccagctggacgcccgcagacagcagttggtgtacaggcagcagctggcgttccagcaccaagtgtgggacgtggctttcgaggagacccaggggctgtgggtgctccaggactgccaggaagcccccctggtgctctacaggcctgtgggcgaccagtggcagtctgttcctgagagcaccgtgttaaagaaagtctctggtgttcttcgtgggaactgggccatgctggaaggctctgccggcgcagacgccagcttcagcagtctctacaaggccacgttcgacaacgtgacctcctacctgaagaagaaagaggagagactgcagcagcagctagagaagaagcagcggcgccggagtcccccgcctgggcccgacgggcatgccaagaagatgagaccgggggaggcgacgctaagttgctgatcgtggcggtctgtttctgtcgactgtggaccacttatgtgcgatccgtggaccacttgcgtgcgatctgtcggccgacgatgagcttgttcggatgtagctccatcgtaagtcgaggagcatctgtgatttgtcctctgcttatgggatatgtttttccgctactgagtctgtgtagtaaatttttgactaggaa

SEQ ID NO: 23926 - DNA, 752 bp, Homo Sapiens
cttttttttttttttgcgaagtgggctcgtgggttggcagtatgagagttgtaatggcccgactgttgagtgagggggagcaggggatcccaacggcttgcgctgcctttgcgcagcagccggcgggcgagccacgtcgcggcctggctggggtaggagagggcggtccccagtgcagttgggtgaactaccgttgcacactggagtttctggtgtctttgcttggaactgacctagctcgtggcagggggaactcggctagcggccccacagcccctgctgactcaaaacaactgagttgtaagacgttcatcgccgtgttatccttgagtaaagaatgaactctggaagcccagccagggacaatgcaccttcacagagattctgcactaatctgagtgaaggtctaaggtttggaatctccccctcatggagagaagctttgtatggctgtcatgcttagacagtgattcctgcaacttgaccttcaggctgggagaggtggagagccatgcctgttctccttccttgctatggaatttgctgacacaatatcttccgcctggtgctgggcatatcctaagaacttacaactttcctgtattatcctgtgtgagcagctgtcaccttattgggggaaaaatgcctgaaaattagggggcacttcaagtagatagcttctatttcctatatttgtcttatatacaagtatttgcttttatcaaaataattccaataaagcattttaaagt

SEQ ID NO: 23927 - DNA, 3669 bp, Homo Sapiens
gcctgctgccgcctgggccccgccgagcggagctagcgccgcgcgcagagcacacgctcgcgctccagctcccctcctgcgcggttcatgactgtgtcccctgaccgcagcctctgcgagcccccgccgcaggaccacggcccgctccccgccgccgcgagggccccgagcgaaggaaggaagggaggcgcgctgtgcgccccgcggagcccgcgaaccccgctcgctgccggctgcccagcctggctggcaccatgctgcccgcgcgctgcgcccgcctgctcacgccccacttgctgctggtgttggtgcagctgtcccctgctcgcggccaccgcaccacaggccccaggtttctaataagtgaccgtgacccacagtgcaacctccactgctccaggactcaacccaaacccatctgtgcctctgatggcaggtcctacgagtccatgtgtgagtaccagcgagccaagtgccgagacccgaccctgggcgtggtgcatcgaggtagatgcaaagatgctggccagagcaagtgtcgcctggagcgggctcaagccctggagcaagccaagaagcctcaggaagctgtgtttgtcccagagtgtggcgaggatggctcctttacccaggtgcagtgccatacttacactgggtactgctggtgtgtcaccccggatgggaagcccatcagtggctcttctgtgcagaataaaactcctgtatgttcaggttcagtcaccgacaagcccttgagccagggtaactcaggaaggaaagatgacgggtctaagccgacacccacgatggagacccagccggtgttcgatggagatgaaatcacagccccaactctatggattaaacacttggtgatcaaggactccaaactgaacaacaccaacataagaaattcagagaaagtctattcgtgtgaccaggagaggcagagtgccctggaagaggcccagcagaatccccgtgagggtattgtcatccctgaatgtgcccctgggggactctataagccagtgcaatgccaccagtccactggctactgctggtgtgtgctggtggacacagggcgcccgctgcctgggacctccacacgctacgtgatgcccagttgtgagagcgacgccagggccaagactacagaggcggatgaccccttcaaggacagggagctaccaggctgtccagaagggaagaaaatggagtttatcaccagcctactggatgctctcaccactgacatggttcaggccattaactcagcagcgcccactggaggtgggaggttctcagagccagaccccagccacaccctggaggagcgggtagtgcactggtatttcagccagctggacagcaatagcagcaacgacattaacaagcgggagatgaagcccttcaagcgctacgtgaagaagaaagccaagcccaagaaatgtgcccggcgtttcaccgactactgtgacctgaacaaagacaaggtcatttcactgcctgagctgaagggctgcctgggtgttagcaaagaaggacgcctcgtctaaggagcagaaaacccaagggcaggtggagagtccagggaggcaggatggatcaccagacacctaaccttcagcgttgcccatggccctgccacatcccgtgtaacataagtggtgcccaccatgtttgcacttttaataactcttacttgcgtgttttgtttttggtttcattttaaaacaccaatatctaataccacagtgggaaaaggaaagggaagaaagactttattctctctcttattgtaagtttttggatctgctactgacaacttttagagggttttgggggggtgggggagggtgttgttggggcctgagaagaaagagatttatatgctgtatataaatatatatgtaaattgtatagttcttttgtacaggcattggcattgctgtttgtttatttctctccctctgcctgctgtgggtggtgggcactctggacacatagtccagctttctaaaatccaggactctatcctgggcctactaaacttctgtttggagactgacccttgtgtataaagacgggagtcctgcaattgtactgcggactccacgagttcttttctggtgggaggactatattgccccatgccattagttgtcaaaattgataagtcacttggctctcggccttgtccagggaggttgggctaaggagagatggaaactgccctgggagaggaagggagtccagatcccatgaatagcccacacaggtaccggctctcagagggtccgtgcattcctgctctccggacccccaaagggcccagcattggtgggtgcaccagtatcttagtgaccctcggagcaaattatccacaaaggatttgcattacgtcactcgaaacgttttcatccatgcttagcatctactctgtataacgcatgagaggggaggcaaagaagaaaaggacacacggaagggcctttaaaaaagtagatatttaatatctaagcaggggaggggacaggacagaaagcctgcactgaggggtgcggtgccaacagggaaactcttcacctccctgcaaacctaccagtgaggctcccagagacgcagctgtctcagtgcccaggggcagattgggtgtgacctctccactcctccatctcctgctgttgtcctagtggctatcacaggcctgggtgggtgggttgggggaagtgtcagtcaccttgttggtaacactaaagttgttttgttggttttttaaaaacccaatactgaggttcttcctgttccctcaagttttcttatgggcttccaggctttaagctaattccagaagtaaaactgatcttgggtttcctattctgcctcccctagaagggcaggggtgataacccagctacagggaaatcccggcccagctttccacaggcatcacaggcatcttccgcggattctagggtgggctgcccagccttctggtctgaggcgcagctccctctgcccaggtgctgtgcctattcaagtggccttcaggcagagcagcaagtggcccttagcgccccttcccataagcagctgtggtggcagtgagggaggttgggtagccctggactggtcccctcctcagatcacccttgcaaatctggcctcatcttgtattccaacccgacatccctaaaagtacctccacccgttccgggtctggaaggcgttggcaccacaagcactgtccctgtgggaggagcacaaccttctcgggacaggatctgatggggtcttgggctaaaggaggtccctgctgtcctggagaaagtcctagaggttatctcaggaatgactggtggccctgccccaacgtggaaaggtgggaaggaagccttctcccattagccccaatgagagaactcaacgtgccggagctgagtgggccttgcacgagacactggccccactttcaggcctggaggaagcatgcacacatggagacggcgcctgcctgtagatgtttggatcttcgagatctccccaggcatcttgtctcccacaggatcgtgtgtgtaggtggtgttgtgtggttttcctttgtgaaggagagagggaaactatttgtagcttgttttataaaaaataaaaaatgggtaaatcttg

SEQ ID NO: 23928 - DNA, 2062 bp, Homo Sapiens
gcggctccagtccgaaggcagcggccgggggagggaaggaggggaccgaacccccgaggagtttcgcagaatcaacttctggttagagttatgggaagcgcggttatggacaccaagaagaaaaaagatgtttccagccccggcgggagcggcggcaagaaaaatgccagccagaagaggcgttcgctgcgcgtgcacattccggacctgagctccttcgccatgccgctcctggacggagacctggagggttccggaaagcattcctctcgaaaggtggacagccccttcggcccgggcagcccctccaaagggttcttctccagaggcccccagccccggccctccagccccatgtctgcacctgtgaggcccaagaccagccccggctctcccaaaaccgtgttcccgttctcctaccaggagtccccgccacgctcccctcgacgcatgagcttcagtgggatcttccgctcctcctccaaagagtcttcccccaactccaaccctgctacctcgcccgggggcatcaggtttttctcccgctccagaaaaacctccggcctctcctcctctccgtcaacacccacccaagtgaccaagcagcacacgtttcccctggaatcctataagcacgagcctgaacggttagagaatcgcatctatgcctcgtcttcccccccggacacagggcagaggttctgcccgtcttccttccagagcccgaccaggcctccactggcatcaccgacacactatgctccctccaaagccgcggcgctggcggcggccctgggacccgcggaagccggcatgctggagaagctggagttcgaggacgaagcagtagaagactcagaaagtggtgtttacatgcgattcatgaggtcacacaagtgttatgacatcgttccaaccagttcaaagcttgttgtctttgatactacattacaagttaaaaaggccttctttgctttggtagccaacggtgtccgagcagcgccactgtgggagagtaaaaaacaaagttttgtaggaatgctaacaattacagatttcataaatatactacatagatactataaatcacctatggtacagatttatgaattagaggaacataaaattgaaacatggagggagctttatttacaagaaacatttaagcctttagtgaatatatctccagatgcaagcctcttcgatgctgtatactccttgatcaaaaataaaatccacagattgcccgttattgaccctatcagtgggaatgcactttatatacttacccacaaaagaatcctcaagttcctccagctttttatgtctgatatgccaaagcctgctttcatgaagcagaacctggatgagcttggaataggaacgtaccacaacattgccttcatacatccagacactcccatcatcaaagccttgaacatatttgtggaaagacgaatatcagctctgcctgttgtggatgagtcaggaaaagttgtagatatttattccaaatttgatgtaattaatcttgctgctgagaaaacatacaataacctagatatcacggtgacccaggcccttcagcaccgttcacagtattttgaaggtgttgtgaagtgcaataagctggaaatactggagaccatcgtggacagaatagtaagagctgaggtccatcggttggtggtggtaaatgaagcagatagtattgtgggtattatttccctgtcggacattctgcaagccctgatcctcacaccagcaggtgccaaacaaaaggagacagaaacggagtgaccgccgtgaatgtagacgccctaggaggagaacttgaacaaagtctctgggtcacgttttgcctcatgaacactggctgcaagtggttaagaatgtatatcagggtttaacgataggtatttcttccagtgatgttgaaattaagcttaaaaaagaaagattttatgtgcttgaaaattcaggcttgcattaaaaaactgttttcagaccttgtctgaaggattttaaatgctgtatgtcattaaagtgcactgtgtccctg

SEQ ID NO: 23929 - DNA, 1968 bp, Homo Sapiens
atggttttgtacacgaccccctttcctaacagctgtctgtccgccctgcactgtgtgtcctgggcccttatctttccatgctactggctggtggaccggctcgctgcctccttcatacccaccacctacgagaagcgccagcgggcagacgacccgtgctgcctgcagctgctctgcactgccctcttcacgcccatctacctggccctcctggtggcctcgctgccctttgcgtttctcggctttctcttctggtccccactgcagtcggcccgccggccctacatctattcacggctggaagacaagggcctggccggtggggcagccctgctcagtgaatggaagggcacggggcctggcaaaagcttctgctttgccactgccaacgtctgcctcctgcccgactcactcgccagggtcaacaacctttttaacacccaagcgcgggccaaggagatcgggcagagaatccgcaatggggccgcccggccccagatcaaaatttacatcgactcccccaccaatacctccatcagcgccgctagcttcagcagcctggtgtcaccacagggcggcgatggggtggcccgggccgtccccgggagcattaagaggacagcctctgtggagtacaagggtgacggtgggcggcaccccggtgacgaggctgccaacggcccagcctctggggaccctgtcgacagcagcagcccggaggatgcctgcatcgtgcgcatcggtggcgaggagggcggccggccacctgaagctgacgaccctgtgcctgggggccaggccaggaacggagctggcgggggcccaaggggccagacgcccaaccataatcagcaggacggggattcagggagcctgggcagcccctcggcctcccgggagtccctggtgaaggggcgagctgggccagacaccagtgccagcggggagccaggtgccaacagcaagctcctgtacaaggcctcggtggtgaagaaggcggctgcacgcaggaggcggcaccccgacgaggccttcgaccatgaggtctccgccttcttccccgccaacctggacttcctgtgcctgcaggaggtgtttgacaagcgagcagccaccaaattgaaagagcagctgcacggctacttcgagtacatcctgtacgacgtcggggtctacggctgccagggctgctgcagcttcaagtgtctcaacagcggcctcctctttgccagccgctaccccatcatggacgtggcctatcactgttaccccaacaagtgtaacgacgatgccctggcctctaagggagctctgtttctcaaggtgcaggtgggaagcacacctcaggaccaaagaatcgtcgggtacatcgcctgcacacacctgcatgccccacaagaggacagcgccatccggtgtgggcagctggacctgcttcaggactggctggctgatttccgaaaatctacctcctcgtccagcgcagccaaccccgaggagctggtggcatttgacgtcgtctgtggagatttcaactttgataactgctcctctgacgacaagctggagcagcaacactccctgttcacccactacagggacccctgccgcctggggcctggtgaggagaagccgtgggccatcggtactctgctggacacgaacggcctgtacgatgaggatgtgtgcacccccgacaacctgcagaaggtcctggagagtgaggagggccgcagggagtacctggcgtttcccaccagcaagagctcgggccagaaggggcggaaggagctgctgaagggcaacggccggcgcatcgactacatgctgcatgcagaggaggggctgtgcccagactggaaggccgaggtggaagaattcagttttatcacccagctgtccggcctgacggaccacctgccagtagccatgcgactgatggtgtcttcgggggaggaggaggcatag

SEQ ID NO: 23930 - DNA, 2213 bp, Homo Sapiens
agactgggctgggcaggtctgagagttagggaaagtccgttcccactgccctcggggagagaagaaaggagggggcaagggagaagctgctggtcggactcacaatgaaaacgctccttcttttgctgctggtgctcctggagctgggagaggcccaaggatcccttcacagggtgcccctcaggaggcatccgtccctcaagaagaagctgcgggcacggagccagctctctgagttctggaaatcccataatttggacatgatccagttcaccgagtcctgctcaatggaccagagtgccaaggaacccctcatcaactacttggatatggaatacttcggcactatctccattggctccccaccacagaacttcactgtcatcttcgacactggctcctccaacctctgggtcccctctgtgtactgcactagcccagcctgcaagacgcacagcaggttccagccttcccagtccagcacatacagccagccaggtcaatctttctccattcagtatggaaccgggagcttgtccgggatcattggagccgaccaagtctctgtggaaggactaaccgtggttggccagcagtttggagaaagtgtcacagagccaggccagacctttgtggatgcagagtttgatggaattctgggcctgggatacccctccttggctgtgggaggagtgactccagtatttgacaacatgatggctcagaacctggtggacttgccgatgttttctgtctacatgagcagtaacccagaaggtggtgcggggagcgagctgatttttggaggctacgaccactcccatttctctgggagcctgaattgggtcccagtcaccaagcaagcttactggcagattgcactggataacatccaggtgggaggcactgttatgttctgctccgagggctgccaggccattgtggacacagggacttccctcatcactggcccttccgacaagattaagcagctgcaaaacgccattggggcagcccccgtggatggagaatatgctgtggagtgtgccaaccttaacgtcatgccggatgtcaccttcaccattaacggagtcccctataccctcagcccaactgcctacaccctactggacttcgtggatggaatgcagttctgcagcagtggctttcaaggacttgacatccaccctccagctgggcccctctggatcctgggggatgtcttcattcgacagttttactcagtctttgaccgtgggaataaccgtgtgggactggccccagcagtcccctaaggaggggccttgtgtctgtgcctgcctgtctgacagaccttgaatatgttaggctggggcattctttacacctacaaaaagttattttccagagaatgtagctgtttccagggttgcaacttgaattaagaccaaacagaacatgagaatacacacacacacacacatatacacacacacacacttcacacatacacaccactcccaccaccgtcatgatggaggaattacgttatacattcatattttgtattgatttttgattatgaaaatcaaaaattttcacatttgattatgaaaatctccaaacatatgcacaagcagagatcatggtataataaatccctttgcaactccactcagccctgacaacccatccacacacggccaggcctgtttatctacactgctgcccactcctctctccagctccacatgctgtacctggatcattctgaagcaaattccgagcattacatcattttgtccataaatatttctaacatccttaaatatacaatcggaattcaagcatctcccattgtcccacaaatgtttggctgtttttgtagttggattgtttgtattaggattcaagcaaggcccatatattgcatttatttgaaatgtctgtaagtctctttccatctacagagtttagcacatttgaacgttgctggttgaaatcccgaggtgtcatttgacatggttctctgaacttatctttcctataaaatggtagttagatctggaggtctgattttgtggcaaaaatacttcctaggtggtgctgggtacttcttgttgcatcctgtcaggaggcagataatgctggtgcctctctattggtaatgttaagactgctgggtgggtttggagttcttggctttaatcattcattacaaagttcagcatttt

SEQ ID NO: 23931 - DNA, 2714 bp, Homo Sapiens
gagtggctgttgagcggcgccgcgggagttccgcaggtttcccgtgttcgcagcggagccggaggccagctgaacccggccgtgggatcccggataggaggaggaggggacccataggacgcgttaacatggacctggaaaacaaagtgaagaagatgggcttaggtcacgagcaaggatttggagccccttgtttaaaatgcaaagaaaaatgtgaaggattcgaactgcacttctggagaaaaatatgtcgtaactgcaagtgtggccaagaagagcatgatgtcctcttgagcaatgaagaggatcgaaaagtgggaaaactttttgaagacaccaagtataccactctgattgcaaaactaaagtcagatggaattcccatgtataaacgcaatgttatgatattgacgaatccagttgctgccaagaagaatgtctccatcaatacagttacctatgagtgggctcctcctgtccagaatcaagcattggccaggcagtacatgcagatgctacccaaggaaaagcagccagtagcaggctcagagggggcacagtaccggaagaagcagctggcaaagcagctccctgcacatgaccaggacccttcaaagtgccatgagttgtctcccagagaggtgaaggagatggagcagtttgtgaagaaatataagagcgaagctctgggagtaggagatgtcaaacttccctgtgagatggatgcccaaggccccaaacaaatgaacattcctggaggggatagaagcaccccagcagcagtgggggccatggaggacaaatctgctgagcacaaaagaactcaatattcctgctattgctgcaaactgagtatgaaagaaggtgacccagccatctatgccgaaagggctggctatgataaactgtggcacccagcttgttttgtctgcagcacctgccatgaactcctggttgacatgatttatttttggaagaatgagaagctatactgtggcagacattactgtgacagcgagaaaccccgatgtgctggctgtgacgagctgatattcagcaatgagtatacccaggcagaaaaccagaattggcacctgaaacacttctgctgctttgactgtgatagcattctagctggggagatatacgtgatggtcaatgacaagcccgtgtgcaagccctgctatgtgaagaatcacgctgtggtgtgtcaaggatgccacaatgccatcgacccagaagtgcagcgggtgacctataacaatttcagctggcatgcatccacagagtgctttctgtgctcttgctgcagcaaatgcctcattgggcagaagttcatgccagtagaagggatggttttctgttcagtggaatgtaagaagaggatgtcttaggaggagggcacccagaagtatcgagccatagctatccaaagtggtctgcatttctactgtaaaatgcaatttgaaaaaaataaaacgcaaaaaaagaaactgtaaaggaaaccaagagattttgtttaatttttttggccattttttcttcatcaattttttttcggtctcaacttttaaacttggtttaagcatttgatttgtaaaacagtaaataattgtatctttccatagcttttcaaatgtgaaatcatttttggaagcttggatctcattaaacttcatgtctctattccatttgtgccacacacttaaaagttagtgtactgaatggaaagatgagcattcctagttctacacttcttttttccccctcatgtgtaaaatgaaaagaaaactaaatttgccctaataccaagggcgctacgtttattgcctcgtcttattcactgacctttgtaatgatacacagtgaattctttttgacaaagagaaatgcagtgtagtatgcagagctgctgttttaatgccctatgcatttactctttcctgatttaggcagaggtggcattttctttattgcatttctctatttttttaatgtaccctaccttcagtattctctttgtaagttggtgacttgcatctgtggccttgaatattttattatcacatgtggcataacagtatccacactttttagttctttattttttttttttattttgagcaattctcctgcctcagcctcccaaatagctgggattacaggtgcatgccaccacacccagctaatttttgtatttttagtagagacaggttttcaccatgttagccaggctggtctcaaactcctgacctcagatgatccgcctgccttggcctcccaaagtgctgggattacaggtgtgggagccaccatgcctgacccacacactttttacttgtatagatgatttttggcttggacataaaagccaagccacccatttgcttttaatccaaagaacatgtatagtttttgtacccagagactatgatttatattgattgcacttgcctgccatgatttagataagattttttttgcatggtttttattctttcctaatggatcctgttttataatacttccaagcctgtccatggatatatcaaatgtcttcacttgtatgttttcatggctaggtatttctaatgtttattcttccctgtgtacttctacacatagctatgcactatgaaaattaaatggaatgaatgatatgtatattactcaaaataaagtttctttcactttaaaaaaaaaaaaaaaaaaaa

SEQ ID NO: 23932 - DNA, 16986 bp, Homo Sapiens
aaactagaaaaccctaaaatcatcttaaaataactaaagattaaccactcatttacatatttttatttggaagtgtttatatcagtacaaggaaacaattttggagacactggatgtcattagttatcattagtttattataaaagagaaatatggaaattatttacatgacgaaagatttcagaacttcagtggaatgggcagcatcatgttgatgccatttcaatagtgacttatttcagtctacgtactttccaagaatgtcaccatctctaaataggaaataatcctgcaagtgaaaaaaaccattagttaagacaactaattgcaaatatctgacttctttttagaattattaagtttacacaccttgtcatctagaactactttggtgcctccatattctgggagaagaactttatctccaactttcacgctaactggttgaatctctccacccttaaaaaaggaaggatgtttattagcaaagatatctagttcacccaacataaacagttaacttttaaatcactacaactaatgaaacatggtcactcaaatccaattatattaaaaatatatttcgtggctaagtgatacgactcatactagaattacagatcttcactcaaaaataccactgtagttacactttgaaataatacacagtggcttaaactaaaacctgactccaacgtaaaagttcaagaaaatattctggaaaagctaactttagttaactaaagctaactttataactgttaaatattaacataacttatcaactatatgaaataaacctgcaacagtagccagcacccagaaaatgccatatacaaatggtcatattttccttctttcaacatacaaaaatttaaagtttttttggatttagaacatactcttgtgattgttttgttccctccaaagaacagatttggggaaagggactgcagctaagtgtccactccccaaagtcttcctattcctaactccatgacagctcctcagtagagctttcctcctcagaagcaactagaacaatgcagttaacattatttggccccaacggcgtttactgtgtattttggctgagatctttagaagcccgaggcctaaacaattaactgaggaacatctaaaacagaggtgtgcaatcttttggcttccctgggccacactggaagaactgtgttgggccacacataaaatacactaacattagcagtagctggtaagcttaaaaaaaattgcaaaagaaatatcaggttttaagaaagtttagggatttgcgttaggcggcattcagagctgtcccaggctgcagattggacaagactgaccaacctgttcctctggtaggtatacaaccaggtataccaactggttaagattagggcaatttcaatgtgttaggggttaaacgaacagtccaagtttcctctcaattcttaaatgccccctcattaaccttgaagcacatcttttgtatttatttattttgtagacaggaggtctcattatgttgcccagactgattttgaactcctgattttgaatcctgagctcaaacgatcctctgctttggcctcccaaaatgcaaggattacagggtgtgagccaccacgcacagcctcttttgcttattaaaaatttagaatgtaaggcaaacactgatcacactagctaccaaatgctattgaggggattttttttttttttttttgagacagaatctcgccctgtcccccatactggaatgcaggggcgccttgcaacctcggctccttgcaacctccgcctccagggttcaaatgattctcctgcctcagcctccccagtagctgggattacaggcgcatgccaccacacccggctaatttttgtatctttagtagagacggggtttcaccatgttggtcaggctggtcttgaactcctgaccttgtgatccgcacacctcggcctcccaaagtgctgagattacaggcgagagccaccgcacccggcctattgaggacaatttttaatactctgaaactatcacataaaataagcatcatagcattggtcatataaaataagcaactttatattagtcatttccctttaagaaacagattagaaccaaagcagttaatgatcttgaaaacgacataaactctacttaataagcgacttttaatactccagaattacttcttttccctccactgcacactataaaaaatagttccactgcagctcccatttacctttcctttagaacccgatccaacagcgactactgttgcttgcaatacttttccttgagatttttctggaagcataatgcctcctttggttacagtttcagcagcactcctttcaaccaatactcggtcaaagagtggaagaaactttctaaacgcttgtcctgcctgtaggaagagaaatgttttgaaacaaaaactaaatgtaatcacattatcaacaggcaacgccaccgtgctatacatctcaacacgttttggctttgaaagttaacaccaaacctcagcttattcgttaaggaagcgcatttgaatgtactaaccaatattccaagtttaattcccgattccttacgtctgttaggggtcgttgtcgctcctccggtgagcaaccagaccagctttaaggtcaaccttagtttattccaaggtcaaatgttttccttcttcaggtttttccagaaattttcaggaaacgctgggtcaagctccctgcctggcaccatgatttttacccaagatattacacattcacaaaggccctgcagaagcaggtgagacgctgcgcgtgcgcccgggttctcgcccccctgccttacacaccggcagcacacgcgcgtgcaaagagccctgggggagaaaagggtcgggcgggccttgccgctccaaggtgccatcgggcgctggtcactgagtggccaccaatccctcccgcccagcccaacaaaagaggggcgtcagggatccccgtacgcctcagacaggcccgggcctgcaggcctcggggccacgcgggactcaccattactccctccgcctcagactcgtactctgctctagtgtagcgccgcaaagagactcgcagtccggccctggcgacacgtgaaaaaatcacccagcgcgcaggcgcgctcgccccagcggtcgccgctagccccctcgcccctcccagggagggagggcggtcgccccgacgcgcaccgcgattcgccccaagggccctgcgcaggacgctgacgcgaagactcggaggcggaagaaaaaaggagctgtttctaggcttttctaggcgcccagccgaggtgaaagaactaccccttcgtcccctcccggaaatgacgcgatttgacccttgagccgtagggagcgcggcattttctggaaagttctggaaccgagcgaggcccgggaactagactaagccggccggagagggctgagcgcgctagcacaccctgcgcgggtagggaggggcggggctcgcgcgcagggtgtgcagattgcagggcccgggctgacgggaagtgggtgggagctgcctgcacacgcggtgccgcggggcgggagtagaggcggagggaggggacacgggctcattgcggtgtgcgccctgcactctgtccctcactcgccgccgacgacctgtctcgccgagcgcacgccttgccgccgccccgcaggtacgcggccttcccgcaccacctccccccggctcctgcgacccccgagtgggccttcctcctctgcggtccagctggagggtgcgggcggcgacaacctggagttccgcaccgcgccgcaccgcaggcccaggcctgcgggtccaggcctcgcgggtccatgcgggttccatcacgtgcgacgcggatcctggacctcggctgggcgcgggagggacaactcgtggggtttgaatttgggggattgtaaccacttaggcccgctggtgcaacctgcgcctggccgacttcagggaaccggggagggtggtgtacgtgagggaaccgcttttttcccccgcaggcagctgggataccgcgcctccagtcttgaccttgctgggggcgttcggaaagaaggacacgtgggctcgcgccgagtgggccgggccgccgcccccagcatcgcggccttgctggttgctctgatacagtagccttgggtggatccatggagacactttgctgagcggctatttgcaccgtcaggaatacttttaacttccctggtcacttggatttgtaacttgcctctctccggctgacttggtttctcaggggccacagttggagtgggtctgcccacaaggccgttttcgcggtgaaagattaactcgtttttggcggcagggataggtggccgtggggaaggagccgcatgtgctttgtgctggtgctataggtcaggcgccggccggggcggcctctttagcttgcgctagtggctgatgttccgaagctgcggcgccttccgtcattcaggcgtagtggctggcggaggtcagccaggctcagcatctcacgttgcttgctctgttgcacaggtgggcatgtttgttctgcagcgcaccacgggtggtagttctgatgatctttttgcttccatccccagaaatgcttcggttacccacagtctttcgccagatgagaccggtgtccagggtactggctcctcatctcactcgggcttatgccaaagatgtaaaatttggtgcagatgcccgagccttaatgcttcaaggtgtagaccttttagccgatgctgtggccgttacaatggggccaaaggtaccagtatttttattttattgtaattacggtattattaatagcattttactcacaaatagtcgcactgaactattcaacagtactttcatctccatttttgagagaactcagtttacatgtaagaattctgaagtattggttagcctttttttcttagacatgatcttaaagcttaaactgcttcagccagattttcgaaactattttgttcaatgtgtgatgtaatcaggtagtaacttacagctcaaggtggattcttaaactcgaggtagaatttcgctggcttaagttaaaatttggatcctttcccagtagttcatgccaagtgtagagagaagagtttaacttatcttccataattccttagggtatgtgccttgtagaatgctaaatttttttttggtttattgtagtaaaatgtacacaacataaaattaccattaagtgtgcactttggggacatcaattacatttatgttgtgcagtcatcaccaccatccatctccaaaactttttatatggaaaaattgtaactttgtactcattatacagtagcttcccattctctcctccaccccaagatgctagttttacccatcggttttctgctgttctcttgttccaaagcatatttaaaataagtctcatttaataggggtaatgttttgaggaggcctttgaaggtggtgtgcagtcaagtggtgcttcatttcagtttgaagacagttcagatatcaagtgatccaacaactgcctaaaatacaacatttgcacacctcacaaatagaaagtagcagctttagttcaaatccaaaggatggccaataattgtgccatggttgaagttttatgttgcgtgaacctggaagagcacgctacttgccttgatggttaatattttagttaaacggattttaaaacaagtcacattactttaaaagataacaggcactaactaaagtataagtgataggaagattgttttattctttgtcttgtgttcttgttcattttataagatgacaagttttagtccctaggattttaatctcctaaattacctagttcaaaattatgctcttggcagagaatcaggtcattttgtctgtagacaaagaatgtcgataaacttgcccttgaggttcatgctgcaagactgataaaaatgacacaacttacgttgagactttgaagtagttgctttattatgaagactgctcatttttaaaaatgtaaatcatccttagggtatgtctgatcctgttacatttttttcttctagggaagaacagtgattattgagcagagttggggaagtcccaaagtaacaaaagatggtgtgactgttgcaaagtcaattgacttaaaagataaatacaagaacattggagctaaacttgttcaagatgttgccaataacacaaatgaagaagctggggatggcactaccactgctactgtactggcacgctctatagccaaggaaggcttcgagaagattagcaaaggtgctaatccagtggaaatcaggagaggtaggaatgtctgttgtcaccacagtgttctaaacttcagtgtgctttaaggcattgattccttggacctaaggaaagtgttaacttgaggaaattaatccttctctcattcctcctcttggcctggagaaatcttaaactgggttttcctttagcaagcttggctgtatggtgggtaggtactgttaggtaattttgatattttacttagttggtttcttttgtttttagagacagggtcttgctctgtagcccaggctggactgcactggaacttcctgggctcaagcaatcctcctgcctcagccctccaagtagctgggactactacaggcactcaccaccattcctggctaatttttagtttagttttgtagaaagtaagactaaatacactggatcattcagaatgtcagaaagtaatgttttcctcagtttattttttcttaatagcacacaccatgttattggtttgtgttttgttagtgcttgtaactagagtgcaacttaattaacaatttgctcctcctcatgaggttcatggcagtatagacttaaattctagtcccatgtttgtcatttattagctgtgtgctaagacttggttttcctatcagcagaattgctatgtatatctagggtatgttagggttcaaaccaggaaccctcttgtaagtgaaggtggggggagctattggtaattttttgtcagaattggcatactaatttattactacattactaatgtatcattacctcatctatttcagtgtttatgggccaagtgaatatacttcactaaaagcagttttactgtaaatcactaacaagtattaattaagggtatgaagaggacttaccagcaccttgcattggattttttttgaagtaacagttctcaaacaagagagctagcactattcccaattgagcaaaatgggactattaagactgatgtaaaacaaaaatattttgttagttcataatacgtactaaattgaggggatttcagataattgacacctgcagaggcatagtcacaacagattcctatcatttaagaactgtacttcttgttgaaaataagggagtgttagccattttggtccttttttgcatcatctaatggacatgagaagtgtcgtggaccctattggaaacagcatgattgggttaggaatttgcataggatgagttcagtggtgagacttttgaaactacacacatctaccttgttttagtcctattttcaaaattttggcattgtgagattttatttactgtgtgaacctaaagttactgtttaagtacatgccacgcaactctgtgttattaagaagcactgtctcagaagctgtgtgtaaatttaatattaaggcactaaagaccaagcataggtacatgcctgtagtcccagctacatgggaagctgaggtgggaggattgcttgagcccaggagttcaagaccaccttgggcaacatagtgagaccttgtctacaaaaataaaagaagctgagcatggtggcttgagcctgtggtctcagctactcccttgagcccaggatgtcagggctgcakcgagccatgatctgtgctactgcactctascctgggcaccagaacaagaccctgtctcaaaaaaaaaaaaaattttttttttttaagttaaggcattaaaatatttgtcacaaatctcaagatttctacttgacatagaagccatgagagaaataaacattgtaatgacatatatcgttgaactaggtgtgatgttagctgttgatgctgtaattgctgaacttaaaaagcagtctaaacctgtgaccacccctgaagaaattgcacaggtaaggacttaacatgttacacgttttttaaaaaaaatttaatggcatgtgtgattttttttttcccttgatcacaccaatgtcagaataacaatactacccaatcatcaatattagaatcattgtttcttactgctaaaacctttgaaaagaattatgaccataatggttgtcatttagttctacatgtggttgtcattttagttctacatggctgtaaaatggattcatatgattgtgaaaatgttcttagccattgtcaaaggtgcataagttttgtcagtttgtaatgaagtcagcatttttaaactttttgttacaagaatagttttatgtatcatattcttcaaaacaatgtagtcaaataatgaatcggaaaagagcaaagaaccagtacttcatgaaaactaccataacgtaaattccccttctctcccctggatggaagtatcaatttggaagttactaggaaaaggtaagggaactgactgaggacactaggcttaccttttaatttcgaagagtaactggattatttcaggttgctacgatttctgcaaacggagacaaagaaattggcaatatcatctctgatgcaatgaaaaaagttggaagaaagggtgtcatcacagtaaaggcaagtgtgtttgtatttttaaagataattttgagttatcttatgatcaaaagtttgagttatctgatgatcaaaactgaatttttcaaacagaaaaattctgttttaaaaacagtgctttttttattccttcatatgtagtctcagcacatgtatagaataaagtacttactgtgttttatgtgaattagcctttgctgcatgaaatgaatccatcctaacttaaatgattattcaaataagcacttttgggattttttgcagaagtgtaattggatgtcctgggctgtttcatactctaccctgcatctcttatggccagaggggtctgtttttattaatctggcctgtaattccatgttttgtgttcaatgaaatccatatacctaattctttgacttttcataggatggaaaaacactgaatgatgaattagaaattattgaaggcatgaagtttgatcgaggctatatttctccatactttattaatacatcaaaaggtaagaacaaatcaataactgaattattattatttttattattttagacagagtctcattctctgttgccccggctggagtgcagtggcatgatgcggtggcgcgttgctcactgcaacctccgccttccgggttcaagtgattctcttgcctcagtctcccaagtagctgggattacagtcacacgccaccatgccaggctgatttttgtatttttagtagagatggggtttcaccatgttggccaggctggtctcttaactcctgacctcaggtgatccacccaccttggcctcccaaagtgctgggattataggtatgaggctctgtgcctggccaatttttgaattttttaatagagacaaggtttagccatgttggccaggctggttttgaattcctggcctcaagtcatctgcctgctttggcctcctgaagtttttaaaatatactttctaatatgtgtcaaactataggtattagttggtgtcatcctctaaaaaataaatgtatatattccaaaagttaatgcatatgagaaatgaaggaggaaaaccaactcactggtgaattttaaagtgtattggaaccttggtttcgcttttcatttaaatgtattgcagtcattttttgtatatttttgaaatcttcattatttttacaggtcagaaatgtgaattccaggatgcctatgttctgttgagtgaaaagaaaatttctagtatccagtccattgtacctgctcttgaaattgccaatgctcaccgtaagcctttggtcataatcgctgaagatgttgatggagaagctctaagtacactcgtcttgaataggtaataagcagtggtatttgttgatttatatttctcggtgaaagacagaattatttgtattgctgtttgcagtttccatcatgtgtacctccacatttgatccagttgggtttgtatctagaattgtaattgtgtaaatcaggtgtgctctaatgtatccttatggttgtgtttttgaaggaaccccaaagtctttactattttgatcagctttctcatagaatagactaatttagcacatgggtacctttctgtattttgcaagtgtttacagttgttttgaaggcacatgactgaatcttgtatttttttttttttgagacagagtctcactccctggcccaggctggagtgcagtggcataatcttggctcactgcaatctccatctcctaggttcaaacagttctgcctcagcctcccaagcagctgggactacaggtgcgtgccaccacacctgactaatttttgtatttttagtagagacagggtttcaccatattggccaggctggtctcaaactcctgacctcgtgatccgcccgcctcagcctcccaaagtgctgggattacaggtgtgagccactgcgcccggccttgtaatttttttattttttatttttatttttggagacagagtctctgtcacccaggctggagtgcagtagtgcagtggctcaatctcagctcaagcctccggggttcaagtgtcaatcttgttttttgttttgttctgttttgtttttttaaggcttttctggttaaaaatatgtaaattttcagaatattattttgcatagaacagggaagtaaacatctaacttccaaataactcagagccaggcatggtggctcacagctataatcccagcacttggggaaggacaggcgggtggatcacctgagatcaggagttccagaccagcctggccaacatagtgaaaccccgtctctactaaaaatataaaaattagcagagcatggtggcgtgtgcctgtaatcccagctactcagaggctgaggcaggagaatcacttgaatctgggaggcggaagttgcagtgatccgagattgtgctgctgcaccccagcctgggcaacaaagcgagactctgtctctaaataaataactcagatgtaagtgtatttcaccatcgaatatttttatttattttgagagacagactctgtcacccaggctggcctgcggcggcacgatcatagctcactgcagccttgaactcttggggtcaagcaatcctcctgcctcagcctcccaagtagctgggactacacacttgcacaagcacacttggctgatcttttaatttttttgtagagacgaggtctcaatatgttgcctcaatatgttgcctaggctagtcttaaactgttggtgaatcttaagtgattctcccacctcagcctcccaaagtgctgggattacaggcatgagccactacccttggctgtgatcaagtatttagtctgttgttaaatgtttactaaatagtctgaagtagagaaaatagcacccaatctaaaataaggtgaggtctagtcacttatttaaatctacattttaagctatagtttactattagtttaaactttaagacaggtaatgttcatgctgcagacaatctaagggcattattaaaatgtttgttcttccttatctcagaattgaagtatgtcagaagcaagacttttctttccattttgttatagtagaaatgcatacattaacaggtacgttttagacattacacgtgctcatctgacccaaaagctctaatgagctgccttaccctggaatgtttttcttagcttggatttgcttttttggagggattaagaaaagacttggctgggcgtggtgactcatgcctgtaatcccagcagtttgggaagccgaggcgggtggatcatgaggtcaggagatggagaccatcctggctaatacggtgaaaccccgtctctactaaaaatacaaaaaattagctgggcgtggtggcgggctgaggcaggagaatggcgtaaacccaggaggcggaggttgcagtgagccgagatctcgccactgcactccagcctgggcgacagagcaagactctgtctcaaaaaaaaaaaaaacacacaaaaaaaagacttgaggccagaaaaaaacaagcctacagagttttcattaagccattttactgctagttgaaaagtgggatatcccagtttaccatagcatatagcttattcctctgatttttatttgggtccttaataaaatagaccagctgtcttgaagtttgaacgttgcttctgtttcacaatctgctctcaaatggacatttgattacacattccaagtattcatttacctggtaaaaatttcaggtgagcttaacaatactgtcagctttttgtataacatttataaaagaagtgaattcagaacattgctcattcaaaactcagcattaatatatggagatgtttattaaatgaccctcaaatgtaatatttagtaattactgtttttctaccattcataatagttatcactgtatcctataacttactgtgatgtgatttttgctgctcggcctcctgagtagtggggattacaggtgctgctaccacatttggctgatttttgttattttcagtagagacagggtttcaccatcttggccaggctggtctcgaactcctgacctcgtgatccacctgcctgggccttgcaaagtgccgggattacaggcctgagtcaccacgcccggccaggccaacagtttattaagaaggtaaacggatatggacaagtataattaatagaaaatagcctaaactgtctcagatacttcctgtcttaatttgatcaaaaattgctaggaagcaaaaaaaaaacaaaaaaacacaaaaaccaaaccagattacttagggagtcctaagtaatctagtaacagcttgaggggaattaaacagataggcatttttatttcatttaaatcttactatcaactattcttaacaggctaaaggttggtcttcaggttgtggcagtcaaggctccagggtttggtgacaatagaaagaaccagcttaaagatatggctattgctactggtggtgcagtaagtaaaataaatgtgataatggtttgctgaatgtttatacttgtctggaatttatagatagtttaacatttcacaattagatactacaactatctgtttcttttggctctttggaaggtaggggttggattaaattcccgttaatttgccacaagtctggcctaagaatgagcttactgactattctatattgactaaatcttattgactgaataagggggtttccttttttttgttttttttggagacagtgtcttgatctgtcttgactattcttgacttgatctatattgactattcttattgacttaaatctgtggggtttctttttttttttgagacagggtgtcttgatctgtcacccaggctggaatgcagtggcacgatcttggcttactgcaacctccaccttctgggtccaagcaatcctcccgtctcagcctcccaagtagctgggactacaggtgcagtcccatgcccagctaatttttttacttttagtaatgacgggtctcactgtattgcctaggcttctcaaacttctggactcaagcaatatgcctgcctccgcctcccaaagtcctgggattacaggcatgagctaccgagctcagttttgaaaggtagaagtgtatgctacaagggatgtaggacttgagagtcaaggcctatggtcttgtcctggctctaccagtaagtgtgaccttcgatgtttttttctcaagtaaggctggtaataattaccacagttgtgagaattgagaatttggaaatgcagtgaaagagactatactcaagtcttgttctggactaacagtgatcttaaaatctctcatttcaaagaaataaagtattttgatgattctcttgcatggtgtattaataaacttggtataatggcagaaactgtaacctacaacaggtttacgtttaactctttttgtaggtgtttggagaagagggattgaccctgaatcttgaagacgttcagcctcatgacttaggaaaagttggagaggtcattgtgaccaaagacgatgccatgctcttaaaaggaaaaggtgacaaggctcaaattgaaaaacgtattcaagaaatcattgagcagttagatgtcacaactagtgaatatgaaaaggaaaaactgaatgaacggcttgcaaaactttcagatggagtggctgtgctgaaggtaacattcattattatgaataagtttcttgggttctgagtccaagaatgattttgcttctgtagtattccccagtagtaccatagaactaaacgaatacttgaggaattaacttcatagtggaattttgtttgttttgttttgagctcttcgtcacccaggctgggatgcagtggtgcgatctcggcgcactgcaacctccgcctcttgggttcaagcgaatctcctgccttggcctcccgagtagctgggattacaggcacttgccaccatgcctggctaattttgtatttttagtggagacagggcttcaccatgttggtcaggctggtctcaaactcctgacctcaagtgatccactcacctcagcctcccaaagtgctaggattacaggtgtgagccaccacgcccacctcaggattgctttttaagtaaactgcttttaaatgacttggcaattagcatcttgaatgaagaggccatactaactggaattcttttcgtctttaggttggtgggacaagtgatgttgaagtgaatgaaaagaaagacagagttacagatgcccttaatgctacaagagctgctgttgaagaaggcattgttttgggagggggttgtgccctccttcgatgcattccagccttggactcattgactccagctaatgaagatcaaaaaattggtaaaaagttaccttttaaatgagtttgtggcctgattttagtttttcttagaataataatgttgcagtcccctaaatggaatagcacattcatttcctgaataacagaagtagaatagtgctaatgtcagagctaaacatgcatcacatctttttcagaggaaatgatttgatctgtagtaggattgggatttccctacatcaatatcctcacaacttataaatgtgttacaatatttacaaatgaaagtattaaaattttgctgaaatttctctgtaggtatagaaattattaaaagaacactcaaaattccagcaatgaccattgctaagaatgcaggtgttgaaggatctttgatagttgagaaaattatgcaaagttcctcagaagttggttatgatgctatggctggagattttgtgaatatggtggaaaaaggaatcattgacccaacaaaggtaaatggttgaacactttctaaaaattcttttgttgttcattttgttaatgtatcctcacatcccaaatctttgattttgtcaccagaaaaatagtctaatagcagtagcaacagcaatagctcttgtgcccatcaacaattctcatgtacatttccagcacctagatatttaatactccactaaaaggaagcaggatcccttgagtagcagttgagtccatgcctggaggcaggaaaaaatcaggatggatctggaacaccctgttcctgcctggcagtaagaatactttccaagatacgcagaacagggttttgttttgttttgaagacagagtcgctgtgtcgcccaggctggagtgcaggcagtgacaacctccacctcctgggttcaagcgattctcctgcctcaggctcctgagtagctgggattacaggcatgcaccaccatgcctggctaatttttgtatttttagtagagacggggtctcatcatgttggccaggctggtcttgaactcctaacctcaagtcatctacctgcctcagcctcccaaagtgctggattacaggtgtgagccaccatgcccagacagaaattttcaataagtcttgctcatattttactaagggaaaactaattaattaaatttttttctaggttgtgagaactgctttattggatgctgctggtgtggcctctctgttaactacagcagaagttgtagtcacagaaattcctaaagaagagaaggaccctggaatgggtgcaatgggtggaatgggaggtggtatgggaggtggcatgttctaactcctagactagtgctttacctttattaatgaactgtgacaggaagcccaaggcagtgttcctcaccaataacttcagagaagtcagttggagaaaatgaagaaaaaggctggctgaaaatcactataaccatcagttactggtttcagttgacaaaatatataatggtttactgctgtcattgtccatgcctacagataatttattttgtatttttgaataaaaaacatttgtacattcctgatactgggtacaagagccatgtaccagtgtactgctttcaacttaaatcactgaggcatttttactactattctgttaaaatcaggattttagtgcttgccaccaccagatgagaagttaagcagcctttctgtggagagtgagaataattgtgtacaaagtagagaagtatccaattatgtgacaacctttgtgtaataaaaatttgtttaaagttaataattgtgttagcatttccatgattagaagatactgaaaattgaaagccagttgaagggcaggctgc

SEQ ID NO: 23933 - DNA, 1350 bp, Homo Sapiens
cctgcaggtaccggtccggaattcccgggtcgacccacgcgtccggaaacggggaagttgtcttgtgtggagaggttagtagagcagcgcgcgcgtcaccagagtcgtttctcttcggagtcttaggtgatcgagggtgtgcccagggggcggacttgtttgcgcctcccgttccctcccaatttccaaacgtgtcacyccggcgccgacggccctgtgcaggggaagcagatggagttcaagctggaggctcatcgcatcgtcagcatctctctgggcaagatctacaactcgcgggtccagcgcggcggcatcaagctgcataagaacctcctggtctcgctggtgctgcgcagcgcccgccaagtctacctgagcgacccgtgccccggcctctacctggccggtcccgctgggaccccggcgccgccaccgcagcagcagcccggggagccggcggccgggccacccgccggctggggagagccgcccccgcccgccgctcgtgcctcttggccggagaccgagccgcagccggagcgctcctccgtctcagacgcgccgcgggtaggggacgaggtgccggtggccacggtgactggagtcggggacgtttttcagggcggagaggcggacgcgacggaagctgcctggagccgcgtggaggggccgcgccaggcggcggccagagaagccgagggtaccgccggagcgtggggcgtcttccccgaggtatctcgtgccgcgcgccgcccctgcggctgccccctaggcggggaggacccgccgggtacaccggccgcgaccccccgcgctgcctgctgctgcgcgccgcgaccagcggaggacgagccccccgcgccgcccgcggtgtgccccaggaagcgctgcgcggcgggggtgggcggcggcccagcgggctgcccggcgcccggctcgaccccgctcaagaagccccgccggaacttagagcagccgccgagtggaggagaggacgacgacgcggaggagatggagaccgggaacgtggctaacctcatcagcatcttcggttccagtttctcgggactcctacggaaaagccccgggggcggcagagaggaagaggagggagaggagagcggtccggaagccgccgagcccgggcagatctgctgcgataagccggtgctgagagacatgaacccctggagcacagccatcgtggccttctgagcccttggcccccctgcggggaggaggtggagcagcgggcgtccccgaagtgagggccaggcccttcccggctgcgaggacgcccagagaccgcgggcgctgagcgcgttgggcagactggttgcctctgggcat

SEQ ID NO: 23934 - DNA, 1890 bp, Homo Sapiens
ccgctccgctccgctcggccccgcgccgcccgtcaacatgatccgctgcggcctggcctgcgagcgctgccgctggatcctgcccctgctcctactcagcgccatcgccttcgacatcatcgcgctggccggccgcggctggttgcagtctagcgaccacggccagacgtcctcgctgtggtggaaatgctcccaagagggcggcggcagcgggtcctacgaggagggctgtcagagcctcatggagtacgcgtggggtagagcagcggctgccatgctcttctgtggcttcatcatcctggtgatctgtttcatcctctccttcttcgccctctgtggaccccagatgcttgtcttcctgagagtgattggaggtctccttgccttggctgctgtgttccagatcatctccctggtaatttaccccgtgaagtacacccagaccttcacccttcatgccaaccstgctgtcacttacatctataactgggcctacggctttgggtgggcagccacgattatcctgatyggctgtgccttcttcttctgctgcctccccaactacgaagatgaccttctgggcaatgccaagcccaggtacttctacacatctgcctaacttgggaatgaatgtgggagaaaatcgctgctgctgagatggactccagaagaagaaactgtttctccaggcgactttgaacccattttttggcagtgttcatattattaaactagtcaaaaatgctaaaataatttgggagaaaatattttttaagtagtgttatagtttcatgtttatcttttattatgttttgtgaagttgtgtcttttcactaattacctatactatgccaatatttccttatatctatccataacatttatactacatttgtaagagaatatgcacgtgaaacttaacactttataaggtaaaaatgaggtttccaagatttaataatctgatcaagttcttgttatttccaaatagaatggactcggtctgttaagggctaaggagaagaggaagataaggttaaaagttgttaatgaccaaacattctaaaagaaatgcaaaaaaaaagtttattttcaagccttcgaactatttaaggaaagcaaaatcatttcctaaatgcatatcatttgtgagaatttctcattaatatcctgaatcattcatttcagctaaggcttcatgttgactcgatatgtcatctaggaaagtactatttcatggtccaaacctgttgccatagttggtaaggctttcctttaagtgtgaaatatttagatgaaattttctcttttaaagttctttatagggttagggtgtgggaaaatgctatattaataaatctgtagtgttttgtgtttatatgttcagaaccagagtagactggattgaaagatggactgggtctaatttatcatgactgatagatctggttaagttgtgtagtaaagcattaggagggtcattcttgtcacaaaagtgccactaaaacagcctcaggagaataaatgacttgcttttctaaatctcaggtttatctgggctctatcatatagacaggcttctgatagtttgcaactgtaagcagaaacctacatatagttaaaatcctggtctttcttggtaaacagattttaaatgtctgatataaaacatgccacaggagaattcggggatttgagtttctctgaatagcatatatatgatgcatcggataggtcattatgattttttaccatttcgacttacataatgaaaaccaattcattttaaatatcagattattattttgtaagttgtggaaaaagctaattgtagttttcattatgaagttttcccaataaaccaggtattctaaaaaaaaaaaaaaaaaa

SEQ ID NO: 23935 - DNA, 5279 bp, Homo Sapiens
aaaagtgcatacgtgatttaaactaagacttcaactgattttgtggaatttgataaaatgtaaaggttgtgtggaagaaaaagagtccaagaatagtcaaggaaattttggagaggacaaggtgaggggagaggaaaggtgggatttgtcttattagatattaccagattcagtaggacagaatgaaggctcagaaacagatggaagcaggggcaggaacctaatttaggagacaggcaatagtgtaagtcaagaagaagttcagttaagtggcatctgggcaagtggttgtccattcgaaagaaataagtaaagttagatcccaccattctctgcacaaaaataactccagagatattaaacctcaatttgaaaaataagatttaataagaatatatagaagaaagtacttaagatctcacactagagcaggatttttagaacaagtctaaaaaagcagaagctatgaaggaggatgatcagttttactatacgacaatttaaaatttgtgtagcatccaagatgctaaaagttaaaagacaatccccagactgagaagattgtatatatacagctggcagagaagcagaatacacaaatatgcaaataatttcccaaaaatccaataagaaaaaaaaccgccacaaataacaaagagagcataagcagatgataggaagaagcactcacagaagagaaacctgaatgatgaataaatatgtaaatgtgttagtcacatccctgactagatcagaacaatggggccacatttttcatccatagtatctgctagcgtggttgagtctacaagaccaagtgttggtatggacgtgaagcactcatgtgttgctggtgggatgtcagttgaggacagccattgacagcaatgtctagtaaagttcaacatgcacacttatggttcatctagtctacttctaggcatttatcttgaccaattcttgcataaatacataaagaaatatgcacaatatgttcactgcagcacaatttgtaattgtgaaaaattttaaatgagctaaatgttccccagtaggggaatggaaaagtcataggatgacctttcaatagaaagacacaagaagttagagtaaacgagccccatctctatatatcaaggctaacaggtctcaaaaatatattgtagagtaaaaaaaaggagggacagaaagctacatagagtatggtaccatttatgtaaaattttcaaagcactctaaatactatctactgtttcgttgcaatacctgtgtgttaaaggcttcaaacagataagaatcatagcttcctgcgaattacatctgggcaagagaggcctggggccttgcgggtgcccactcaggccctactcctgacctcctcaaggggcaagaggttgcgctcacctcaagccaatcaccctcactccccaacccacttccaaccacactctgagagctgggaccctgggattccctgcccggtagctctgagccccatgtcccaaagaaaagacctaatggctgccccaaggaggaagggaggagacagaggataggatctgaagcaacaggaaggagactccagtcgtgtctgtgatatgtcaggactttataacaatatatccaaagcaaacataagatgatgtttgctaattctgggggtgggtggtggttttatcgctctttttattattagctgactcttacctagcacttatgtttcaagccctgttctaagtgatttgcattaaaaatgagagggttctattattactcagtttcacagaagaggctaaataacttgcccaatatcactcagctataaggaggagagggggatttgaatccagtgggtctggctcccaggtccaccatgtagctagcaactatactggatctatctgtccataggctgagatgacttcctttaaaaaaaaaaagtaattaaaattaaaataccctgacaaccacaatacaaaaaaaatatagtgaacttccatgaaaattttcttagatatgttaggagcactgatggggactgcattgctgagggaggaaggccgtggtggtggttgcggaagactttaaagaggggctgttgacatttgaaccaggccttgctgggtgatgggcagggaggaatagggggatgaaattctaagaaaaggaaactttgtgtgtacaggcatagattttaaaaatttcaagaagaatgtgaagattggcaagtagttctgtttggctgtccacagggaacaatttgaggagaaatacaggttaggagctagaaagggagagtgagaaaggaggattttagaaaacaaggcaaactgctgaaggtggcacccccaagctgcactgtgggaagatgatcccaagtgcaggctggaccagaggacaggtgctgcaggacagaaccctgagggagcccaaggcaatcacatagctgagatgagggacatgtgagtgtgtatgagtgtgtgtgagtgtgtgtggtgggggagtcaagaagcatctgtttattcacaaatatttactgagcacctacaatgcaccaagcactgttccagaaggtatcgatagaagaaaatactaaactgtctgccctcatgaaacttgagttgtaatggagagacacagataagataaataaataaaatgaataagtataaatataaatatatgataaatgaataaaaacatatctatgacaatatatggtgatgataagtgctttggagacaaagcaggaaaggggggaatgtgctagtgtatgcagaggttggggtgggttgttgactggtcccagttccctgaaaattcactgacaagaggcagatggctagaagaaaaggtgtacttatttatttaaggtgtacatgggggccttcagaaggaaggcccaaagatacaggggaaattgcctagttttatgcttaggttcaacaaaacatggagagccctgtcgaaataggattggaccaaaagggtgtgatctgatgctgatactgagtgaggaaacccagcgaggccggtggctctagattcttcttggcctctctgagcagcctttttttccttctgggtaaggggcaggttcttctgtggaatgggaggtcttaggactgcaatcaacaaggtagaacagttgatttctttatggccagtttttacacagacaagtgagggaaaatcacagtgatatttttgttttatgactggctttggggaaaagcgttctggtttcgatggctagcctgggggagaatgggaccgagagacaggagggcagaagatgacacagagactgcttctgaggccttcattttggcgtattgttttctgagctccaacattggcaaaaggggttccaagccgagatgacctaagagtacaggcctgaggagtgagtggtgtccccgccatactgaggttctgagtctgggcccaggacatggttgcaccgaaaggcagggcaggaaaggggagctgggttggagggggacagactgagtctggggtccagcgggcagttgaaactgctggtgaggacatgaggccagtttgaatccaagcagcctggcttcaaactccttgttccggaggaggaaccgcaagtcctcccaaggccttggagaaaagtgagctaaaggcagaacgtgggccgataacgtgggggcgtggggggaccgcgacccagcccggggaaggcgtcccagcatggacccagcagcctgggcagcctgggcgggaagttctgatcgcgctctgccgaattggcaggcgcaataagtaagcggaaaaaccaggattcaaaccaaccaccaacacccttccctggcgttcagaccgaaggtgggtgggaaggccctggcgaaggaggtctgcatcaggcctggccttgaggcgatcccttctcaccccaaacctcctggacgctgagcaagccccttcgcctgtgtgggttgcccggctgccctctggggaaagttgggtgatcaaatcccaagttgtagctctcgatgggtcgagggcgatggccagcgctgtgctgggaacgggcagccctgccctgccctgccctgccctgccctgccctgccctgccctgccccacatgggcgcaggaggcctccgcacgcgcaagggccaagggctggagggggctctcccgggcacaggcaccggacccggggcgcgcgcgcgcgtccttagtccccgggctgcactccgggccgctgagagatcgggtcccagaagttccgggagtggtcgggtgaccctggaactttcttcttctggagcccgacctggggctgactgcagagcaggctgctggcagggaccaaaaggagctccgcgccaggccggagctgcgcccgtcactcgcggtcccggccgggtccctggcgcgtagtcaggccgcaccgcccgagccccaccgcgcgcccaccccggccgggtgcgtccggctcgcggccgtccctcccgcgacctgtggcccggggctgctgcgggcgcccgggggaagagaggcgggggccgcggggggcaggaggagcggctgcggccggcacagcgccagggcgagtgaggcgggtggcgcgggggaggcggcggagtaaagagaggccgccggctgggtccgcgggtcactccgaggcgcgggctgcgggcggcgggcggcgggcgcaccatgccctccttcgacgaggcgctgcagcgggtgggcgagttcgggcgcttccagaggcgcgtgtttttgctgctgtgcctgacgggcgtcaccttcgccttcctcttcgtcggcgtggtcttcctgggcacgcagcccgaccactactggtgccgcgggccaagtgccgcggcgctggccgagcgctgcggctggagcccggaggaggagtggaaccgcacggcgcccgcctcccgcggcccagagccccccgagcgccgcggccgctgccagcgctacctcctggaggcggccaacgacagcgcctccgccactagcgctctcagctgcgcggacccactcgccgccttccccaaccgttcggctccccttgtgccgtgccgcggcggctggcgctacgcccaggcccactccaccatcgtcagcgaggtaagggcgccccggccctttggaagccggcgggagaggacgatgctggctcccaggcggacaagccgcgtgtgagacgctggccgccaggggaggtcggtggagacggggaccggtcggctacctctggggacagacaggattcagcgcaccct

SEQ ID NO: 23936 - DNA, 200033 bp, Homo Sapiens
aagctttgcaggcaggcagatctggttgggatccgattctctttggaccgtaaattcctggccagaagtggtggctcacacttgtaatcccaacactttgtgaggccaaggcaggagaatcacatcagccaaagagtttgagatcagcctgggcaacatagcaagacccccgtctctacaagaaatttaaaaaattagccaggcatggtagtgtgtccctgtagccctaactactcaggaggctggagtgggaagatctcttgagtcccagaggttgaggctgcggtgagccatgctagcaccactgcactccagcctgggtgacagagcaagactgtgtctcaaaaaagaaagaaagaagaaaggaaagaaggagggagggagggaggaagaaaggaaggaaggaaggcaggcaggcaggcaggcaggcatcctcggccctggcacagggtctggctcattgtagatggtcagtttgtaggtgtgaaaggaatagttcagtctcacctcctccactttgtagcagtgtggctttaacttttctcacctttagcgtccttacctattacaggggaatggggccaggcacggtagctcacgcctgtaatcccagcactttgggaggccgaggcgggcagatcacttgaggtcaggtgttcgagaccagcctgggcaacatggcgaaaccccgtctctactaaaaatacaaaaattagctgggtgtggtgacacacacctgtagtcccagctatttgggaggctgaggcaagaaaattgcttgaacccttgaacccaggaggcagaggttgcagtgagccaagattgtgccactgtactccagcatgggcaacagagtgagactctgtctcaaataaataaataaataggaattgattggttttctaggctgctgtaacaaatgaccacaagcttagtgtcttaacacagatttatcttacagttctgtacagcagaagtctgacagggtgtcactgggctaattccaaagtgtcagcagggctgtgttcctacctggaggatccaggggagaatctgtttccttgccttttccagctcctggaggccaccctcaatctttggtgtgtggcccctttttccatcttcaaagtcagcaacagcaggtcaggtccttctcatgctgccatctcgctgcttctctgcagctaggaaaggttctctgcttttaaggactcatgtgattagatggacccatttgcataatccaagataccctacccattccagggtccttaatcttaatcacatctgtgaagatccttttgccacttacggtaacaactgcaacttctgaataaaagggaatgggcatctttggggtccgttattctgcctaccacagagaacactaatggttcctatcatactggattgttggcaggaataaacatatgttttaaaaaaggtaataaatgtaaggtgactggcacatactaagtgctcattaaatatttagctactgctatcatcattactacataaaccatgtggtgccttataaatgctagttattgatgccaattttctaaataagaaagtacagggcctggtttcttctgggctcattgtcagtctcccttcctgtgcctcggtttcctccgccatcagaagagaaactgaccctgctcttggcagctcacactccaggccgaggaggcacacaaagtttcccttgtgctatgtgagggcggctgccagcagcgggcatggggcccggcccatggctatcccagggacgtggtattcactgagatcacaagggaacagaagggccccttctttggagggcagagaggttccaagtggatccctgcaggaactgagccccctctgtgggaaagaattgcctccgttgtgaggcagtatcgctatttgcaaagcgttttgcaatcatttttattagcagagcccctgagacttgaggataatagaagggctgtcacccaccccctgcctctctgggggaaactgaggcccacacagttgaaggtgggaccccaggccacatgatgaggtggatttgacctcccaggggccttgtggcttcaggccagcattttatccctggaggcgccagacattcccccaatccctagtcactgaactgaaccaaaaattaacacccaaatgcccttcagcgcctccctctcagacttttctttaaaagaccaatttgaaatgcagccaccctcttccatgtcaaggctggcgctggtcctttctttcagatcctggctgctcctccttccctgccagcactgagctctccccatcacttccagactccttcctgtgggctccaggggcctcccccacactctgccccatctcccagtttcctcccgacacatacaccattctgatggtgacgcttgcccacctctttcagagagaggcaggccacttctcctgggcatttctcttgcaggctctgagaaccactccccagacccccatgaaatgccggcagctccagccacaccccagctcactttggaggcctgctcgaggctcaccgcctccaggaaggcttccccctgagcccaccactgtcacccacccctggtgccctctccgcttggctccaccagtacctagtgatattgctcagggtgcacaccctcagccgttacaggcctttctcccctccctcagcacttaggttgtgttccccaggcaggggctttgtctctcccatcaggcgagagctccctcgggaatactccagaacacagcccctcgagttctagggctgtatcagaagtcagtactttctctccctgcccactcacaacacacacagaactcttcttcccttgggatgacgctgttggatcacagagggcacaggtgccccatccatggttcctttttctccctaaattttaactagtgttgtttttttcttcctgattaacaaagcttatcatagaaaaatagaaaaacttgaagtagccataatcccccactccagaagcaaacactgttaacatttccttctaggttgtttttttttttaaaggcaggtttgtctacctgagatcatactcggcctaccattttgtatttttgcttttttgcttaatattatctcagatgtttttctgtatcgatcaaatctctgtacacatcattttaaatattatttcatatgtatgtactgtaatttgctcaactatctgtgattccctcctcacttataatccccaaaccacagggtgctgacttccttaggcggtgttttggaatagtttgtcccctcccaccccccatccccagccaccggaagacaaaaaaaatgaccagctgctcttcacaggactctgattaggatcttgaactgggtggcggttggaaatcagtatcacaacctccccacaccctgtcccttcctgcctgacaagatgggaaagccatcagctgcaggggggagtggacaaacatccccaccctcttcatggggaacaggcttctgttggttcagggggttgcctctgttgttttttctgatggggctgtccacaggtacgagggcattggctgggccagaggggccttgtcctgtcaagttaccggggttggagcccgcgctgtaggagctgggccactgggtgaagtgctcaagaggcttgagagctgcactgggatggagtctgcacaacacccagctggaggactgaggcgaagcgagccagagctcagccacccctcttggttctactgaaaatattgctcagggaggcatctcagggatccatatggtctaactgaatcagtaatgagactctactgtgtgtgtagacaatattgatgtgcccaaggctgtcagaggcacagggagatggaactcacagtgccctggggtctctgttccaatccagtgtggccagggtctacctgccgctgctttgtggaggaaggtggagactgtctctccaacagcacagacatgtctacccatgagagactatggctttctcccaagccataggtacctgcctccccagttgtgtcggtacccaaaaccccaaagccttgtgtgtattatatttgtgagacccctgcctgcacatcgagaatgtcctttctctatgtggcacggagcaagggtaactgacccaattgaagatcaaccctaggagacagagcctcatgggtgctttaaccagctgtgtgtccagctgtgtgccatcatctccccttcgccaagaccctgccatgcaaattgagtacataaaccacctgtgagtgcctaggaccacgtaagcataggctgcctgggctgtgtacctaaggagtaattggagtgcgggcatcctgggctgacaataaaaggaggctgtgggctggggtgaaaaggcagtggggggcagctgtggagcacttcccactgctcctccagcttggtgatggactggcatcagagcaagccccttgcccagttttagtcttgtgggcagctcttcttgtccctagctggcagtttcctgtgggtagatctgggttgccaatcccagaatcctggaaccctggcttgtctgtttcctgtaacacccaaagcctatttgttaatggagtgtcagcactccattgccactgccatcaccgcttcccggggctgcgtcctgaattcttgttgggtgctgtatctgttccctctgagttttgggtggtggtatgtctggccacagctgggcccactgcagttcctgtgaggggtggctgcatgtacacacatgaccccaaacatgctggctgcctagtgcccccaggcagacgtgagtttgataccgactgtggcaattaggcgtgttgttttacctccttgggcctcagtttcctcatctgtaaaatgaaaatgttaagcactcctacctcatgaagttgttgtaaggattcaataacataatataatataatatataaacaatgcgtgtttgcacagcgcctgtcccacagtatgtgctcgggaaagagggctccattgcaagggtctctcggtcttcaggctgctcaccgactccctcttctttcccagggtgtctgtttagtctaaaagttcagatgtgcctcatgcatgcgcagaagtttgcgggggtcctctaggtcagtgggcttgaatggcaggtcctagggaggaaggtcagactgggaaggtcagactgtgtggtccaggagcctgaacctctgtgcaaggtggggccttctcagctccccactcctcccggctgcttcctgttagcaggacacccagggagaagcgtgtttccttcctgctctgggcaaacccaggccactcccccagcccctagaacttctgttcagaaccaccagcagccctgaggacagtacagagctgaccaaagtctcatccaggtgtgaaaagccacccccctccagaggtgctcaggcccatgaaggtctgggctgatcttgggctggatcctgtggcagcttcactccagtgcaagtcagcctggccacctcctggtaggcaaccagcagctgcagcagttcacggctatagcatgaactcccctgatgccagggcagcccagagctagcttcgatttatgaatgattttaatgtccgaaattaacatcatcttcagctcttgaaacaaatgactccagggatgtcaaagcacactggtttacccagcaccagggacactggaaaggtgtcatggaccctgaggctgatccttgcatccttcatctcttcactttagaggttctcaaagccatctttctgccatccttcccagctgacatcatataagatgctccaggttgtcaagggtatgtctgcctttaaaaaatgatctagggaaggtacagtgattctgggagtgcccatctctctgcatcactttgctggggctgcacacagagaggggccctgtgatcatgggactgcaggagctcaggaggaagcagttagtaaccccctcatgaggaagcccctcgcagtatccgctggtccagttctctccctttgctcacctggacaccttcttctaaggccacagaggagtgggaaggacaaaggctctggaagcagacatccagctcttaggcttctgactagtgtgtgatcgttgacaagtcaatttacttctcagttgctgttttacttgtgaaataatgagaaagacaacacctgccctgtccagctcctggggttattgtgaggatcaaatgagatgacggatgtggaaatattttaactgtaaaataccattttcattttatttattatgattaagaagaggcactatagtcatccggggtgagcgcttctctggcctcttgtgtgccctgattaggctgacctgaaaaacaccaaacaaaaaaatcagagcaggtggaaggaagcagactctctccccacctggttggagcccatggcccacatgtaggctgtgcccagggctgctcttccttcccttctagggcagactcagcagacccaaagatcaagcaactgccagggtcaggcgcctccttacagccgtcaggagaatgcttggcaagacagccctgaattctgttcctctctagttccaggggcatctggtcaccacccccaacccttgcctcttgccctgcaggcccagccaatgagaagtacaggtctgcagatgggaaagggctctccagccagccagcaagcaggcctgccctgggagtacctgtccttatgcgagaatagaggataataggtcctcagggctgggtgtggtgaaacaaccagagaggccaaggagatgcttgcctggtgtcccaccagtgagaaaaaaaagctttttctccctgttacagcctggcctatactgaagggtcttcctgagctggctgagggctacgaccagggccagggccagggtatgggggaagcccagcaggcagtctcccttttctgctcagaagaggcaccaagcacattgagtcttcctcacttgggatctattctctcaatggaggaggcctgttcccagaagtccaggtctaggaagaaggctgcctccacacattctccatctctggaacctcaggcctgacaacatggcctattttctaccattggccctgcagctgcctctgctctgccgctgaccctggtcgctcattgctaaggcaacaaagctatctcatttcctgagcttcatcgaatctcagcacccatttccgctgtgtccgcatccacccctgccagggtcgaggtgtcctgtgattgcttttgtccctgccaagggctgtatcagccccgccaggtctggtggccattgattttgaaagagcagagtagtcagcatccactgtgagctgtgtggactcgcaggccctggctcctggatctctgggctagccagtgggactaagcacaattgccatcatggtgtgatgaaggagaagtcagactgacctctctgagtctcattttcatcagaaaggggaggtagtgctgggagttgctgtgagaatgacatgagataatggatgtgatcatgtgtgcagggttcctagaacagtgcgtgacacataattggtgcccagtgaataaatgacagctccctttcctacatagtcatggcttaatacgccttcaggccagggtagaagatatatattgagcaccttccatgtttgttccaggtactgccaggctccaggcactggggaatgcagtccctgctgtcagggagtttgtcacacagctgggaaaccagtcccccaccatgatgagatcacagacaaaggggaccacagagtgagcactctggggctgtccctaggtctctggctatgggtgcccagcagaactgcaagggccccttcaattatccacagtcaagaactggaagcctggctaggcgttctgttttgcctagaattgcttattatgacctttttttcttttgcagcaaatttcccttcctaatttggttctgtttatcccattattaaagtgggattacataggaatttaactgaagtaaatgatcatcaatgtgtacaaagatctagctgcaagaatgttcttggcaaaattgtttatcacaggggaagggcacaaacaatttgagtgggtaaaagtaccacatatgttaatgatactctggtataaccatctattaatagcggaaaggggaatacctaatgtgcctaatgcacccataaggaattattaacacttcactcactcagtcattcactcatctgatcgctcattccactcacagtcactgagcaccttccagacaaaaggtcctatatgagagagtgttttactcaggttcctcagagatgaggatgtgatcacagattaagggagaagttatgggattcatcatgggatagcgaggaaactgggcagcggggtttttggtcctccaggctgaggcatgtgacaagcatggtgggcttctgcaggggccacagcatctccaggctacagaaccctggatcctaagctggcttccatagttccctgagagcagcattgtgtggtaggccaagttcaagatttggagtcaggagacttggattctaatttcttttctttctttctttcttttttttttttttttgagacagagtcttgctctgtcacccaggctggagtgcagtggtgcaatcttggctcactgcaacctccacctccccggttcaagcaattcttctgcctcagcctcccgagtagctgggactacaggcacgcaccaccatgcccggctaatttttgtatttttaggagagacgggggtttcaccatattggccaggctggtctcaaactcctgacctcatgatccacccgcctcagcctcccaaagtgctgggattacaggcgtgagccaccgcgcctggccagattctaatttcttttagcctttatcaccatcaatgaaatggggataggaatgactgtcttataccttaccagcaagtcatcacaagactcaaaggaggcagctaagtggcctgctctaaactgtgcaggtgttgacaacagagattaatcctcattgctcaagtagatgccctggggtagggggtggtttccagctgtgctcttcttgggaattacttttctttctgtccccatagccatctcctcccatgctgtccaaccctgctccttcctactccatcttgcccctgcccatctcaccttctagaagcctgagcccagcagcccaaggtcagctccatctgaaactagtgtcatcactggaaaggttgcatggaagagccctccttcaaaagtaaataatcaaactttgtttaaaggcctgacaatgttcatttgtgttgatcaagctcagactgaattatgcataggcacatggcctgtgcctgaggaatttaccatgtaggccagacaccctgactgattcaaaggatgtacagacagcaggacatcaagtcgaggcaggccacagggagctgaccctggagtgctgatttcacagaacgtggctgctaagtccagataatgtttcatctcctgatatgtgtgtgtgtatgcgtgtgtgtgtgtgtgcacacctgtaccgtattcacactttttcaaggggaaagaagaaaggaaggaaggaagggaggggaataaaaacaaatctttttgaagtggagccatgtgaccccaggtaaaccctcagggagcccctgccctgccctgcctctgcaccagttcttcctgacagagagctttgtcccctcccctacatgtctgtcacacaccccctccctgcctcctgttttgcagtcaggaccctccatcatgacagagggaggcccaaattgtcttctgctccaggcctgcctgctgtacctatctcccagggatcttgtgatgattaagagagctaatacatgaaaaatatataaaatggtgccaggtacctagtaaacactcaacaaatattatctattactaattggtttggggtcatggaccctttttgggaatctgatgaaagctgtgggcattgtgtccaaaaaatgcattacattcagctcagcgggtgcctggaccccaagttaagaatgcctagtcccaacctgggcaacatagaaaggtcccatctctaaaacaattttaaaaattagccaggcacggtggcacgtgcctgtagtcccagctacttgggaggttgaggtgggaggatcgcttgagcccacgagtttgaggctacagtgagctatgatagtggcggcactgcactctagcctggacatcagagtgcagccctgtctctaagaaaaaaaaaaaagaacgagtctaaataaactgaagagttctatttataagcatttactgagcactcttcagtgtagaggactgggctgggtacaagggagaaaacaagaagtgacctcagcctcaggacactcaccatgtagtaagggagaaaagtaatacacaactttctataatctaaagtaggaagtgttaaatccccacagagagagtcaggtaaaatgctggggagtgttgacgagagagacattcattctctggagagatccaagattgctccgtggagcaggtggcatgagaattggactttacaggatgatgggtttgggtcgagtggttgttagctgtgggaaagcaccaggcagaaggagcagcatgaacccagcactcggagtcaggatgggccacccagagcctgtggtggtcagtcccaccctggacctcaggtttcctgtgagcaagcaaaggaactcagccctgctcaacctcatagaaaaagagcttgttggatatcccagtagcttactgagcaagtgggaaggctgcagaaccaggcttgggaaacctgcagcttccaaggaaagctggtagccagaaccacagcccaattcgtggcacaagaagcctgctcagatcaattctgttgccactgccagaaactagctggagccaccattgcgcctcctaccaccaccgtcaccagcgttgggagccctgaccctccctgcctctgtttatcctctgcacagacagattcagtgtctcaggtggaaggaaggagagctgcggggcttgttgcccccgccacacattgctcggcctctgctcagactggggtgctcatggcacttggctagggaggcatggaagacagacagtgccagaggccccacactctctaacatggggagaggaaagctgcaaagtgcccaggccattgtctaatccttgcctggaaaagccaaagactttccagcagctgacacaaagggcccatcttcaacctagatggtgctttctcctttgaagtcctgatgcagagtggaatggctgaaagtgacttaacttttctttgttctgatgtgtttctaacccctgggactctcagtgcttcccttttcctgggaattagtttgggaagcagctggggagaggaccagagacagagacctagagagagagagatgtgtcttcttcagggttcctggtggaccccccaacctggtccttactatctttctacccttcttgcccttctttctccttgatcctttgtctcttagtctactggcctatgaactgctgagctataggatctagtcctgtgcatgagggaatttatagcatgtccagttcaactcagccagtatttattgacatctatctttgggaacacctaaattcactggagttggcagatcttgtattgaattctgttgcagtattcagaactgcgtatctacatcagggaggcgtgtccaatgggatgatgaaggtgtttgcccttaggctgcccccagtctgttggaggaaatgttcaggggccccttaaattggaaggaaaatccaaatccaaacaaggacaaatacctaatgtcaaaaatgaacatgagtcctggaggagcacggagtggtgacgtaacaacatctgaggccaattaaggacagtttctttgataaagtgtttctcgagtttattatgaaggaaggagggaagggacaaattatgaagagagagagactgtaggctagagcatttatttgcatcttggtccttgatcaccaggcatggggtatttcttccctgatttcctgtgttctttcacttactcaattatttattcgtgcatgctttccacaattgttgacttttattaaacttttaattctgagacattgtagatttgcatgcaattgtaagaaacaccacaaagggatcctggataccctttacccagcttcccccagtgttaacatcttgcaaaactgtagtacaatatcactaccaggatattggcccggctgctgtaaagacacagaacagtcctgtcaccacagggatccctcatgtcgcccttttaaaggcacgcccacttctctcctgcctccaccctttctttgactcctggcaactactaatatgtttgccatttctatacttttgccatttcaagaatgttatatgaatggaatcatagagcatattccttttgggaacagttatttttcacttagcataattctgtggagattcatccaggtgtgtgtatcaatagttcagttgtttctgttgctgagtaatattctatgatatggatgtaccatagtttgtttaatcattcattattgaaagacatgggttgtctccagtttggggctattaagaataagctgataagctggggatggtggcatgtgcctgtaatctcaactaatcaggaggctgatggaggaggatcccttgagcccaggagttcaagaccagtctgggcaacacagcgagaccctctccaaaaaaaaaaataataaagctaatatattcattcgtgtagaggtttttgtgtgaacataactcttcatttctctgagatgtacagttgttgggtcacgtgttagttgcaagttaatttttttaagaaactgccaaatcactttccaaagtgggtgtaccattttacatttctaccagcaatgtatgaatgatccagtttctctgcatctcaccaacatttggtgttgtcattgctttaaaattgtagccattctaatatgtatgtagtaatatctcctcatggttttaatttgcatttctctaattgctaatgattttgaatttcttttcacgtgcttatttagacatctctttggtgctatatctcttcatgtcttttgcctatttcctaattgaattgtttggtttttggtgagttttgttttgttttgttttgagacagagttttgctctgtcatctaggctggagtgcagtggtgccatcacagctcacaacctcaacctcctggcctcaagcaatcctcccatcttagcctcccaagtgctgggattacaggagtgaaccactatgcctggcctgactgttgagttttgattgctctttctgtattataagtgctggttctttgctggatatgtggttgacaaatattttctcctactctgtatgtcttttgtaacattgtaacagggtcttttacagaatgaaacattttaattttgaggaagtctaatttatcaatttttccttttatggattgtgcttttgttatcaagtctaagaactctttgccaaagatttttaaaatattttttcctcaaagttttatatttttatgtttcgcatttaaacacacaatccatttgggttaactttggcataaggcctgagacttagattttttttttttttttttttttttggctatggatgtccaatcactccagcaccatttgttggaaaagctgtttttcctttattaaattacttttgcacctttgtcaaaaatcagttgggcatatttgtgtgggtctgtttctggattctctattctgttcctttctgtttggagaacttcctttagctattcttttagagtagtccttctggcaacaaagtctcttagtttctcttcatctgagaatgttcttgatttcccctttattcctgaagaatatttttactgggtataggattatgagttgacagttctttttattttccccccagcacttgaaaaatattgtgccacttccttctgtcctccgtggtttccaatgagaaatctactgtcatttgaaccctttccacctgtagattaaggtttcctgtttctcttcctgctttcaagattgtttctttgtctttaactcgcagatgcttaatttgtgatttctttaggtctatcttgtttggcatttgctcagattcttgaatctgtgggtttatgtctcttgccaactttgcaaagttttcaactattttttcttggagtactttttcagcaccatcctctttcttttctcttaccagaacttcaataacacgaaagttagatcttttgttatagtcccacaggcccctaagaatctgctctgctttttgttttggtctattttctttctgttgttcatattggttaatttctattgttctatcttccagttctctgattgttctccttaattctactgttgatcccatccactgagatcaacacttcagttactgtatttttcagtttaaaattttccatttggttcttctttatagcttctgttctttgttcttcattacccctgggctaggggtaggagttccagctccctgcttggtttccaggggaactgagctgagggtggcttatctctgggtaatgatgaaagttctgtctctccactaggcctcctcttataccacactgtgggaagcaggaagggtgccttattactgctaggtgggggtggaagtccaggctccgcatatgggctccactgataatgaatggcctcattaccaggaggaggggatggaactttgggcttgctactcagccttctctgacaccaccctagtggggttgttgggcacttcatcatggcctggtgaaggtgaactctaggctccccacttgcccttcgctgccctggatgaaagtgggagcacaatttttcctatggcgtttggctggagtgaactatctatcatctaaaagtttgaacaactatcatcattcaaactttatcattgaacaactatcatctaaaagttttctggtccgggcatggtggctcacacttctaatcccagcactttgggaggccgaggtgagtggatcacctgaggtcaggagctcgagaccagcctggccaacatggtgaaaccccatctctactaataatataaaaattagccaagcatgatggcacacacctgtaatcccagctactcgggaggctgaggcagcagaatcgctcgaacctgggaggcggaggttgcagtgagccaagatcacaccgttgcactctagcctgagcggcaagagcaaaactcagtctcaaaaaaaaaaaaatgttctgtctttctgggctgccactttcctggcctttggctggagaaagcaggcttttgttgaggcttcttttgtttgcacccattggcatttctgggttgatgacttcttcagctccaagtctggaatttatgaagaaaaaaacaaacaaatgaactcagagacctcatcgccatgttgttccttgagtcccaaggtccctacttcatccaccctttttttattttgagacagagtcttactctatcacccaagctggagtgcagtggcacaatcatggctcactgcaacctctgcctcctgggttcaagcaattctcatgcctcagcctcccgagtagctgggattacaggcatgcaccaccacgcctggataatttttgtatttttagtagagatggagtttcaccatgttggccaggctggtcttgagctcctggtgtcaagtgatccacccacctcggcctctcaaaacgctgggattacagacatgagccactgtgcttggcctcagtctacctttttatctccacctttcagagtcttcttatgtttgctttatatataatgtccagggtttttagttgtaagtacaactattgggaggaataaggaaaagtacttgtattagggttcttcagagaaacagaccgataagatataaaaatagatacacgagaggggatttactatgggaattggctcatgtgattttggaggctgagaagtcccatgataggctgtctgtaggctgaagaaccagggaagccagtagcatggctcagtccaagtctaaaggcctcagacccaggcaagccaatgatgtagttctcagcccaaggccaaaggcctgagaaactggggggaagggtggtctctggcgcaaatcccagaatccaaaagccagagaacctggagttcttgatgtccaagggcaagaggagaaaactgtcccagctccaggagagagagagcaaattcacttttttgttctgcctttttgttcagcctggacccttagcagattagatggtggctgcccacattgggtgaagacagatcttccttactcagtccactgactcaaatgccaatctcttctggaaacaccatcacagacatacccagaaataatgtttactagctacctgggtatccgttaatccaatcaagctgacagctaaaattaacaatcacagtactccagcttccagaatttttcttgaacacctgttctgtgccagcccataaagacaaataaaatttttttttggttctcaaagagttcaaagcctagcaaacaaatagatcaataccatccaagtatttagaacatgaggttttcagccaggagtgatggctcatgcctgtaatcccaccactttgggaggctgaggcgggtggatcacttgacgtcaggagttcgagaccagcctggccaacatggtgaaaccccgtctctgctaaaaatacaaaaaatagctgggcgtggtggcgcacgcctgtaatcctagctattcaggatgctgaggcaggagattgcttgaacccaggaagcagagattgcagtgagccgagatcccaccactgcactccagcctaggtgacagagcaagactgtcttaaaaaagaaaaaaaaaagaatatgagatattctggaggcttaaaggaggtgggagtcatcgccctacttgggatggggttgggggaagaatggtttcttagaggaggtaggttatgcttgagctaaactttgaaagataaatggatttctggatggacacgatggtaaagggcatcccaccaggcaacacagcagctacaaaggcatagaggcatcagacaacaggaggggcagagtactcactgcaggttgttcgtgggggccggtgcatggcatagggaaaggaagacaaaacaggagaagttagcagaggtagggaatggggtagagactggatcatagaaggagttgtttgccatgcttacccttaaaggctttctgagcagtcatcctgggatggacagggcagggagtggagagaccagcgagcaggtttttgttacggttcgagtgagggttgaacacaggcagtggtggtggagatgggttgcagggataatcttgagagagatttaggagacaagattcacaggttggaatggatgtgggagaaaggaggagcttaacgccttggcttagtagccccatctgagaaaatgagcatcagattttgagagggaaagaaagaaacggagtttagctgtgttgactgtgcggagtctgtgagcatcccagtaaggatgtcaggtggacaagtgtctcagtggagaagttaaggccagagagaggcagatttgagagtcattacatagaatcagtagttaaaaacagagctccggccgggcgcggtggctcatgcctataatcccagcactttgggaggctgaggtgagcggatcacctgaggtcaggagttccagaccagcctggtcaacatggcgaaaccctgtctgtactaaaaatacaaaaattagccgggtgtcgtggtgggcgcctgttatcccagctactctggaggctgaggcacaagaatcacttgaactccggaggcagaggttgcagtgagctgagattgcaccactacactcgagcctggacgatatagccaggctctgtatcaaaaaagaaaaaaataataaagctccctgataaggttctaagaatttttttaaaaatgaccagaaacaccatcctggctaacacggtgaaaccccgtctctactaaaaatacaaaaaattagctggggatggtggcgggcgcctgtagtcccagctactcgagaggctgaggcaggagaatggcgtgaacctgggaggcggagcttgcagtgagctgagatcgcgccactgcactccagactgggtgacagagtgagactccgtctcaaacaaacaaacagaccaggaacagagctgccatgtttcacaagtggtcagcaaaagaggagccatgcaggacaccacaaatgagactgagaagggcaaggaaaggccagtcatgagtttgtatcagtcattcttaccagaaaccacttttcatatttgcaagagaggaaatttagtgctgagaactggctacatgagagagagaagagctgacgagtcaaacaggggaggaagcagctgccactcccaggcagaggcaaccaagatcctgggaatctggaagcacacaggaccagtatgggaagggctgggcctccaaagggacttggatattgctatgacacctcctgaggtagaggggaagagagaggaatcccctggcttctcctttcctccagtgcctcctgtgggcagaagccagccagaaaccagctgactcaggaccctgggacagtcagcctacaggaatcagccagccagctcccccacacagagaagagctggggaatggtgaggaatggatgggaaggaaaggtccaggacaggcccagaggccaaggggtgaggaaatccaacaagggagcatgattctgcagtgtctggtatctcagagaggtgggcttacgtgaggaagcctgtcctcgggaatgggagagtgggagagcactggggacctagtgaaagaaaagtgctaaggtccagtcccagcctggtcaacagcccctgcctgctgattgcaaagctgctggctaggagccaggtctattacacccttcaacaagctagacaggatcccaagcagactgctctccttctgagatccaatcacaccccactctctgatcttaactgtcatccttgctgctccctgttcccctagtctttggagaggctacaggaggctactgtgtatacgggatccctcagcatccgctgccatagccctgagggctggacccaaggcctggcattgtgcagctcagcccatcttctgactgtccaggtgtctgagtggggccaaccatggcggctctacaccctctggggcttggcccatttggtgatttcttagcctcctccctgcctggctgatttctttgtgtgcctcggctgggctcacgctgcgtcaggctcgcccgtgttggtataatagccctgatcgctgtgcttgtcggagaggagacagcaggggcaaggccccatccagggctcatcaggccctgtaccccagctgtgttaattgtccaagccctccaacaagccaaccctttttcccatctgcaattaagacaaaaagctcgttatctctcccgctcccattatctgtagactctgctaaggggctctttctcaagagcagcacctgcagaggccaacagaggttggcattaactccttccctgctggagataggaatctctgagtgggtgaaggaggcagctgaagctggtaggaatggctctgggacagagggtggcacttggggccctggaatggttctgttacaagcttgctgggtgtccttgggcaaacaattgaccttttttgagcctttgaaatcctctttctcctttcttcccaaggaagccatggaaataaataaggagctgttgaagttgccagctccctggagtaactgtgtaaacctccggtcttctattctcatggccaatagtgcttccactggtcaaaactcaagcctcaagataaagcatgtaaatagcttaagaagagcagtgctggtgcctgggggagaggagccagtcaggaccttcagcttcccagggaaacttggattgagtagaatgtagcaatctcactttgcagcgtgtccttcagcaagtcacttactctctctgtactccaacttcgtcctctgaaaaattaaagaatccaactggatcatctccaagatcctttccaattgagaaattccatcacctgtgatgatttttctgtacaatgcaatttgggaaggacactagcatttatggaaccactgatatgtgccagatctttcacatgtgttgttatttccactttaagtgtaagaacaatatcaagttcagagatgtgaaagaagtggtccaaggtcaatcatccagtacctggaggactctagattcaaacccacatttatgagactgtaaaaccattgctctttttcatgataccatgtttttagggactgcccatctaatggttccttacaagacagagctgcatatagagggggaaatgtaacctactctatatgcagctataaaaacaaagaatctggattctaaccacttagattctccagagtcataatgtgttaggaaggagtgaatgagaaataatttttttgcccctctggtctcccatgtgactgagattgcctgagatgtgtgtgcagactctcaaagaaaaagttgtataattgtcaggcattggatcttgttttcatcttggtaaaccaaatcctggagatggaatacagctgctatctcagcagctggttccagcttgtgatgtgcctgtgtccagcagagcccacggcagccttatgaaagccctcctcagtctgtttctagaatctcctctgaatccataagaaaccgcccagagcttagcccatcagccctgctgacaggctgggccagtccagatgctccaccaaggcctggattctggctctttcactcagttcactcatctgcccctgagtcatccagagaaaggggtttggggagagtccggagcagacagcaaagcagggaatcaaggaagctcttgaccaactggcaggcagcccaagtcctggcatcccacgggagaggagaagggcccctgcctttccaaaccaaaggctcacatgagtgaaggatgggcctgaaatcctcactctggaagcaactgaccaaggtcctcccacccagccccaaccccatgcacaactaataagacaaatgcttcctgtcttgagttccccattcgggtagttttcgcaggggcctgatcttctccccagtctcccaagctttgggcaggtcattgggccctcatccctgaagtcaggcactgggctggatctattctggttttagggttctgaacgtgtgatgactcatcttctgctgaagggtttttcatggagtactgaaaacccttaaagcagaacatttcagagtgtgttctgtgacttgcaaattattctgtgagaatacgatgatgggggaggcacagaactaggtttctgtggtcagctaagttgtggaaatgcagtaagatcatctgtcttttggaatcttgatctacatgaacataggaaaggctctgagaagctcttcattcacagacacacacacacacacaaatagacaaatcggacttcaacaaaattaaaaacatttgtgcctcaaaggaaaatattgagaaagtgaaaagacaacccacagattaggaaaaaaaatttgcaaatcttatatctgataagggtctagtatgtggaaaatataaaaaacttctacaatttaacaatgacaaaaaaaactgattttttaaatgggaaaatgacttgaatagacatttcttcaaagaatatatataaatggaccacaagcatatgaaaagatgcttaacatcactagttattaagaaatgcaaatcaaaaccaaaaggagatactacctcacacccaataggatggctgctatcaaaagcacagaaagtaacaagcattggcgatgatatggagaaattggaacagaatctgtgtgcaatattgataggaatgtaaattggtgcaacagctatagaaagcagtatgacagttcttcaaaatattaaaaatagaattgccatatgattcagcaattccacgtctcagtagacacccaaaagaatttgcaagcagaatctcaaagagatatttgtacactcatgttcatggcaacattattcaccatagccaaaggtagaagcaacccatgtatctgttgacagatgaatagataaacaaaatgtggtatgcaatgaaatattattcagccttacagaggaaggaaattctcatatatgctacaacatgggtgaaccttgatgaaatgctaagtgaaataaaccagccacagaaagagacagtctgtgatttacttctctgggttacctagggtagtcagattactagagacaaaaagtaaaacggggattgccagggccgggggagggagaaatggagagttattttttaatgggtacagtttaagttttgcaacatgataagagttctgaagctagatggtagtgacagttgcacaaaactttgactatacttaatcaataccacctgtattagcctgcttgggctgccataacaaagtgccacagactaggtggcttaaacaacagaaatttattttcacacagttctggagtctggaagtccaaaatcaaggggctcaggttggtgcctggtgaggtctgtcttcctggctcacaggtggctgccttctccctgggtcctcacacagccttttctcagtgggcaggcacacatgggggtgggagaggaagggaagacagagagcagggagagaaggagagagggagagggggagagagagagatctttggtatctttttctcttttcaccctattgaattagggccccactgatatgatctcatttaaccttaattacctcttaagaccctatctccaaatataaccacactataggttatgtgggttagaccttcaaaacacaaatttggagggtgtgagatatacatttcagttcatagcacctctgaactgtgcatctaaaacagttaagatggtaagttttaggctgggcacagtagctcacgcctgtaaccccagcactttgggaggccaaggctcacttgagcccaggaatctgagaccaactctggcaatatagcaagacccgccccctcatctctacaaaaaatacaaaaattagccaggcgtggtggtgcgcacctgtagtcccagctacacaggaagctgaggtgggaagaaggcttgagcatgggaaattgaggctgcagtgagccacggttgtgccactgcactcctgcctgggcaacagagcaaaaccctgtctcaaagaaagaaaaacaaagatgataagctttatgttatgtgtagtttaccacattaaaaaaaaaaaacagaaaccttttatttttcaaatgatactgtcaagaaagtgaataactcaactcaaataatgagaaaacatatttgtaaatcacatatctgacaagggtctagtatctagaatacatgaagaatgattgctggacatggtggctcatgtctgtaattccaacactttaagaggccaaggggggtgggttgtttgagtccaggaggttgagactatcctgggaaacacggcaaaacctcatctttacaaaagatgcaaaaattagccaggcatggtggtgtgcctgtagtcctggctacttgggaggttgatgtgggaggatagcttgagcccaggaggcacaggttgcagtgagccaagatctcaccattgcactccagcctgggcaacacagggagaccctacctcaaacaaacaaacgaatgaacaaaaaagaatgcttaaaattcaacaataaactcaaattaaaagtaggcaaaatatttgaatagatatttatccaaagacaatacacaaatggaaaatatgcacatgaaaatatgctcaacatcaataatcatcaggaaaaatgcaaattggaacatgagataccacttccccacaactaggatggctaaaataaaaaagacaggcagtaacaagtgttgacaaggatgtggggaaattggaactctcagagattgttagtggaaatgtaaaatggcgcagcagctttggaaaacagtttggcaatttctcaaaaagttaaacatggagatgagatacacttgagccagcaattccacttctaggtatgtactcaagagatatactcaagagagttgaagacatatgtacacaaatgttcatagcagcaaaattcataatagccaaaaaagtggaaataagctaatgagtgataaatggatgaacaaaaatgtgatatatcatacagtggaatcttattcggctgtaaaaaggaatgaggtgctgacacatgctccaacatggataaatcttgaaaacatcttgctaagtgaaaaaagccatacacaaaagcccacgtattgtatgattttattcatatgagtttttgtttgtttgtttttaagagatagggtcttgctctgctgcccaggctggagtgcagtgacacaatcatagctcactgcagcctcaaactcctgggctcaagcgatcctcccacctcagcttcctgagtagctaggactacaggtaggtgccaccacacccagctgattaattttttttttttttttgtagagacagagtcttgctatgttgcccgggctggtctgaactcctagcctcaagtgatcctcccacctcagcctcccaaagtgctgggattacaggtgtgagccacacacccaggtatgagttttggctaatccacagggacagaaagtaaattaggggttggtagggctggggacaggaaaaatagggagtgacaactattagttatgggtttcttttgttgatggtgaaaatgttttgagattagtagtgatggttgcatacttagtgagtatactaaaaacaaatcaattgtacaatttaaaagattggattttttttttcttttttgaaatggagtctcgctctatcacccaggctggagtgcagtggcatgatcttggttcactgcaacctctgcctcctgggttcaagcaattctcttgtctcagcctcctgagtagctgggactacaggcacacaccaccacgcccagctcatttttgtatttttagtaaagacagtgtttcatcatatcggtcaggctggtctcaaactcctgacctcaggtgatccacccaccttggcctcccaaagtgctgggattacaggcatgagccactgcacccggcccaaaagtttggattttattatatttgaatcatatctccattttttagaaagaaatctattcagccccacacttctctaacttatttgaatatggagcctttttaccccagagcacccattaacatgcagcagaaacagagttaaaaatagagaacggttgaaaattcccatgttacagatagggaaaggagaagcaaattgtcatctttgcctcaatttcctcatccataaaatggggatagtaatatttagtaccgtgtagggaaatgttaaattaagttaatatgtgtaaagcacttaagctaatgcctgctcagtaaatgttgaataaagtgtttttttgttttgtttttcgtttttttgagaagaggccttactcagtctcctaggctgaagtgaagtggcatgatcttggctcactgcagcctctgcctcctgaacttgattgatcctcccacctcagcctcctgtgtagctgggaccacaggcgcacaccaccactcctggttatttcttgtatttttagtagagacagagttttgccatgttgatcaggcttatctcgaactcctgggctcatgtgatctgcctgccttggcctcccgaagagctgggattacaggcgtgagccaccgtgcccggcctgttatttgttattgtctgagcacatattatgggatgaccccaaagttatgttatgtagcttgattctcacaaccatcccatggggaagacatttttcttttttctttcttttgtttttgagatggattctcgctttgtcaccctggttggagtgcagtggcacgatctcagctcactgcaaccttcggctcccaggttcaagcaattctcctgcctcagcctccagagtggctgggattacaggtgcgcaccatcatacccagccaatttttgtatttttagtggagatgggatttcaccctattggccaggctgttctcaaactcctgacctcaagtggtccatctgcctcggcctcccaaagtactgggattacaggcatgagccaccatgcccgcccagggaagacagtatctccatttcacagaagcagaaagtgaggtaatcaggtgaatggtaagcacccaaggccatgccactagtaagcgatggggtaggaaatgtaaccagggccctctgatctcagcctatccccttccagggtcccacccgcctctcagttccattccaaaatctccccagctaggtagttcctgccttacttttttcctttttttggcagctttatctaggtataatttacatgaaatgaaattcaatgagttttgacacatgtatacagtcgtttaactaccatcacaattatgatttagaacatttcctctctccagaaagtttccatcaatcctctgcttcctggtccctggcaacccctggctttctttttcggacacaggtgttaatgactgcatgctgcgaggtgcccaggcccagctgaggaagggctgcaggggaagctgctgtttgggtgggtgaggcttgcgcgcggggccaggagtcagagcatctaggccaggagccagtgggctggcttagccgagtcggccaggcctcttgcccgtctgagaactctttttgccccattttccagcccagaaaagcagatgggaaggagtggctgtgtggaatggggtgggataggtgttagaagggcggactgtacctctggtcctgttaaccagcttgtcgatgactgaggatcgcagacagtgagatgtctttctaatggccatgtcaccccaacctggtgctccttgcctcttctctcattttatcgttcagcatacttagcaccatctaaccttctacctttcttttttcttcatggcccctctctccaacacatgcagtcaagctgttagaggatgacttggggctattctgtcccctgctgaattcctggcctttagagtggtgtctgtcccaaaggaggcaacacggaaagattgactgaattaactgagtattcagccctttcctttgcctctcctgtaaaacaacggtattggagtcaaagatccctaaggcgtctctccagctccacacagattttcttctcatccttaatgtgcgatggggtcacctgggggagacgaggcaagggagggaggctgcagtcattgtcaccccttagcagtgacaggttggcaccataggagatctgtgctcagagggcctctttgtcaagaggtgaggagaggaagggctgttcacacaacctccccgagtcagggcccctcccagggctcagttgcctttgagtagccccaggtgctcccagccaggtattgtcctgcctgggctgcaggggctgagcaggcctggcatatagaaggagggtgtgaggagctaggttggcactgggacagaaaataagtgtgtgtaaatgtatgcagatgtatgcaaatctctgcagttctgcagcctgctggctggctctctgggtaggagacccatcgctccaccctgggccccaccccagctgcaacatctccttctggcctgtgaattgctgctgcttgcatctccctctcaagagcatcttctccctctcagcggcattgtccctcttctgtgccccccaagaggtctgggaaggtgagaaagctgaatcgtgagacagggaaaggaagggacatggactcaaactgaggaggacagcacccgaaatgacagaagagggccaccaaacccggagctcttgattgcagcccctactcagccttagatatcaaaattgccacctggatagagcaaccctgctcagggtctggaacaatctaaggaagggcttagcgatgtctttgatgaggcagcctgtgcaggctgcaggctagacaatgcgaggacagtctgcagaggtgtcttctctccctcccctctcaagcccccactctcctctcttcctgaagcagggcttctgtggtgtgggaagctgccccacctgcatgggaagcaccagccacacctgcatgggccattagcattttaaaaagctgcctgtctctcctctcactgcctcccgctagcacacacatccacccatttgccatcagcaagtctttgtggaatcagcaacagcagacacaatcctgaagcagagagggaaagacagtccctgccctgggaaagctcatagtctgctggcaaagggtggggtgggacaacagctgacagaacaagcagaactccatcacccacaggctcctagcaccacccctcattttgttgaagaaacagattcagagcatgcaggtgatttctctagagtcacacagccaaggtggcagtgctgcggccctaaccagggtttcccgacttccaggctggtgctctgtaggcagcactttgcccacttattccatgtaaggtggagagagtgtcagtcagtaaatcggggtcattaattgaagaatgggggccctggcacagaaggcttcctggggggaggtggtctttggattgtgctctaaagactgagatacatagagagtggcaaggaggagataatcaattgtacccagcagggaatgggagaaaagcacaggtcttggggtccaggtggcaagatgatagcaccttgcagaaaggggtggagggcctcatagccaactgggaggggacccagtctttacctcccagctcagagccctacccgtcagaccaggagcgagtccagggaggattgggatgcggttcgtggccctctcctatcactctcagatactaccattctcaatttggggctacgtcctctcccagtcacatctcactccctgttcctgattactgggggcctctgtggacgttgttcagtctgcatgaggctcctatcaccaaagatgttgccaagccctgccttagattgccccagacaccaagcagtgttgccccatctggcaggtggaagttttgatatctggggctgagtaggggctgcaactgtgaggttgggatgtggggtgggaataggggtattcaatcatggctgccgccactagcttcataaagccttaggtaactgatgccttttccagccccatcgtctccagcttcaggccctattcatctatcaaccccacaagcctgtcagcaagtggggctacttgggtcctcgggcctcaatccactcctggccagagacaacttcctctcccatgggaaaggctaacgcatgcccataaattaagacatttgctctccctccaagccctggaaacctgggactctctaacatctacctctgttttctttggctgcattcaactttcctgcaattagtctggccctggggcagcagttagacgacagatgagtcagaggattgcagaatctaatccagaaggaagagtttatccaaatgttggtggcctttctcttttggcgcattctcttctggttctgtcttttctcaggagtcctctgagcttccatgtactgggcccgcacgatatgtgcagtcatttgtatgttgcaatgattgcaacattgtcatgggggaagggaagggggcagtttagcatgtgtctgagtacatattctttttcctctcccaccatcaaactgtggctcctattggcctcagcacaggcttcttcccaactctgagccactccccactttcagtactatcccttctgcttttgctctagttgcagctgcagggaggatggatgagcctggggccattggaggctcaccaggatggggatgaatcaagagcaggtgttaagactctgccttcaggccctgaggggtcagggtagtgggaccaccatcagtgcaggtgggaagaggctgaatgtagcaagccatcctgagaatagcaccagccatgagctgagagccaagaagtctggcagcaggcaagggagtggcactttttttttttttttgagtggtagcaaggtttattgtgaagagtgaaagaacaaagcttccacagcgtggaaggggacccgagcgggttgcccgggagtggtacttctttgcccattggtagatcaaaaggccattttgggcccaagcaacccctatacctgggctaagggagtgcatcatgtgggcagggccttattttggcctcacttgttcatttcatagcctcttggtcaaggcagggttggggctcagcatgacccaggagaaagggaggggaggaggtggttgctggaatggaaagcttgtggagctcccaggctgcatggggtctgcaggaacctgcgggagggagccttaggagccagcttgaagagagccctgtaatcagaggtctgtggactttgagtagccagaggcgaagccgggttagtctttggtggcagagctccccatgcaggccccataaactctctatcagcatagttgaggactggctttgctgggttactctaaaaggatggggagaggaggacaggcaggcagcaaagtagcattatcccttgaggcagaatcggaaataggttatctctgtgatacatgggtcgtgaggtgaagtgagtgaggggctgtggggtttacggggagctggcctttctctggacagccttgtctgtgtagagccctggggcagaacagcaggaagggcaggctccaccctgaaactggggctctgggagctgtccagcacgggaacctgctgaagccccctcgctgctccaggattcagagaccagtttagagggtcaggcctgagaaagggagcactgagcagggaatatttgaaccttctctatgcaggagggcatctgggctaagcattaggcaagggcaaggtgctttgctcttgtgcctagcacagcgaggaggccgttgaggggagggatgtgaaagcagctgaggattgcttcatgtctctagtgtggacctgccacgcctgaggactgtatccaagcacacctccaaggctgagagtctgggctggtcctgaggcactcccaccaccagtgggaccccagtccttagtactgataacccagggaatctcaggccgagctaaggtgtctgcctctgctgcaaagcctgcttatttgggttcaattttgtcagctcttctgtgggccctgacagtgtgctaggcacaaggatgtgtaagggtagtagtaggcacctcaccctgactcatgcttagaactgaagactgctttgcttctcttccttcattcaacaaatcccttcctttcaactaaagctttctcaataagccagatcttcagaggctccagccagctctctctttcccattctctggctcagtggctatcctttcttcaagtgcttcctggaagcctcctccctcccccaagtgccaaggggcgccgagtctgtttctcacctctgctcaccaggtccctcctctccaggccataccaggtttctgatcaatccgaggcagggactgggggcatagtggggccagggtaggggcaggcaggcacagcagtgtgcactgtcacagcaagtgggctgggtctgggaatttcagttgggtttagaagctggcctccaacatggccactgtcttccagccaagggaagggagaagaaattccatctctctgcctcctggccgagttgaaagcagattttcctgtgctgtctcagtcatcacttacgtgtcccctgcaaccaaggtgcccttcttctgcctcttccaccaagccatgtccttcctgatgcagcattctcctcctctaggatgctcattaactaactgtggttaacttcgcttcgggactgcgtcctcttcagttatgtgcatcactcataccagagatgctgtggagtcatggtttagaatatcagctctggagccagcagcctgggcttaaatcttagcgaccccacgtcttgattgtgtgattaaggcaagcgccttaacctcactgcatctcagttttctcaccataaaatgataacaacaacattatctacccaatggggttttgtgaaaatgaaatgagttgatacacataaaatgctggaagcaatgcctggcatgtggtacgtgtccatcagtgtttgctgttattatttctctcttgagcctctgtccacctgtagaccccatctctcccatcaggctgggaaattgccaagggcaccttcgtgtatctctcattagtccaagggcttcctgatgacagggactctcttcccttctttggggtaccctaaccccagccctgaggttagctcaagttagcccagggttttggatgcactgaagagggagcttggtcaagccagtcctgttactggctgggctcatgtgaaagaaccacagcagctcatgggctggactttcaaagaactcctcaggactttttgtttgtttgtttgtttatggatcaggaaagggcagacactgtcactctctggctctgtctttggcccagacttagtgcctggtcatgagattcccatttccatcattctccagttacttcctgtggccacttattccaccatatttattgaacatctactatatttacaggactgcactaggtgtgggagatagagtggtgaacgaaatatggtccctgccccaacagagtttccagcccaatgggaagatgttggacaagcagggcgggttgtttttttagtttgtttgttttttgtttgtttgtttgtttgtttgtttctgagatggagttttgctcttgttgcccaggctggagtgcaatggcgaaatctcggctcactgcaacctccgcctcctgggttcaaacaattctcctgcctcagcctcctgagtagctaagatcacaggtgcccaccaccacacccagctaatttttgtatttttagtagagatggagtttcatcatgttggccaggctggtctcaaactcctaacctcaagtgatcctcctgcctcggcctcccaaagtgctgggattacagacgtgagccaccgtgcctggcctggcagggtgggttttaacaagggagaagcaacgagaacattggtctagtctaggaggttagggaaatggtcactgaggaagcgatcttgtgatgagaagttaaggacgaagaggagaatcagtgaagggggttgaggagagggagcattctaggtcttctgcagtcccatctggcttcccagccttcacccagctaaggcacccagcatttctcaggattcacacacattggccttggccaaatacccccctacactctccttcttcccctccggcctcactctgaagacagctaagctgtcttcctgggggcttcctggtcaaggctcactgtgcaaactacagactatcacataatctcctaacatgcccctggggcccgctggttaaagcctgagaagaggatctgcaaagatcccttcccacaggctgcagagcccgtgctccaccgggctgagggccaagctgggagtccataaggaccccttcccacaggctgcagagcccctgctccaccaggctgagggccaagctgggaggacctgaggcacaggagccgggtttcctccctcacactcctgcggaagctcagcccccatgctccacctgcttcctgttccgcggggaagatttcctggtctgtttccttggcagctgtgtctcatttcctcctgctgtgcccgtgatgtcctggcccagtgtgacgaggtgaggcaggcccctcccctgtgaggtgtgccatctcctgcccaactccattgccccagattccagagagcagagtcggggaagtaggccccacccaccttggccagggagcaaggggagggagttcagctgcaggatgcctgggcgtcaagatgtcgtcaatgcctccaatatatactgagtgtctactacgtgccaggcatgataccaggcgccaggtggccaaagctaagtgttcttcaagaaggcagctttggagatgagccaggtatacctggtgactgagcagccaacgctatgtacacagtgctctggcagctcagggccacttacagaaggtcagagaggccttcctggaagggatgacgtctgagctgagcttggaggatgaatagaaattagctaaggataagcttgaaacctcgtggtgtgtggataaatgataaactattcagtaaaacttgaagataaagaatgaggcagggcagagagatgagtctgggaaatagggaggaatcaagtgctggaggatcttagaggacccccaagaaacttgattttaccccgtaggagggtcgttatcagaaccacaattcgatcaggtctttttggcctcagggtggaaatggtgtgagtgggccatgcggcgtggggccgggagaacaaagtgtgtgtcctggtgaggaatcggaactgcctgagttagggtggtaagaccagagagcaagggccaagaaaactggcaggaccacaggaccaactggatgtgcttcgcctggaataggagcagggggtggagctgtgaccttggacaatctctcacactctccaaacctcaagttcatcatctgtcaattgccttcccccgactagaaggagctgagctaatggatgcagtaaaagcagtgggtgagggcagtcatcgtgttgccattttaaaaaggctgtgaaactacaagctggtagggtcccggccatgaggaacccgagtcttcagtttggggacagaagtaagtgggaggggggtgttattgttttctgtggcttaccctggagctgataggctatacagaggccatgacatccctccccctgcctctggacagatgatcattatcaggtggggcattggcatcaggaaggagctgcctgtcattcagaaaacatttctggagcctctagtggggacaggacttttgttggccccacttagcatatggggaggcataaggccagatctctgcctgctgacagtcacccaccctgacagcctccccacttgggcttagctggccaggttgggccccccaggaggcaaaaccctgcaaggagaaccctctgggacaatgaggtcacactctctttggatcacgtgattcaaggttcccagctcctcctcatgtcattttcttgtatccaaccccaatctttatggctagaggaggacttccttttgcagggcctgttttcagtgggaacagagaacaaaggcattatatctgcaaggtccatgagccagcctccctttgaccttcactctggaatcagccaccctagtccattaacctctccttggacggccccttccatccctttttcccagatgcaattccagttccctgtgcgccttgtaagcacagagcacaaaatgaatttgttaagggtttcatgaggtcctgacccacaggtggtacagaagaatggattctctggcagttcagagtctgtggcaggcagccagcgaaatccaggacttagggcccacttcgatgctcaagtcatgggagcttctctccatgaattttgcgtctgtcatgagcccctcttactaggagggggaaccatcaggcaggcttccgagcgcctgctctgattctcttcagcgccactcacgcaattgctataaaagagaccaggctcagggacagggggagggagggatggcgtctgtgtcataaacaaggagagatatttagtggtttttaagcaccataggcatctccagggagagtttgagggggaaaaaacaacactttatttggaaacaattctgctgagatacaatcttgtctcagcttcactttctctgctatttattatgaagtgctatgtgctcaaaaataggggctgagttttaaagtcacaggccaagctctgggctctgaaccgaggagacagcttgggcccggttatctgccctagagaggaagggtcttaagcaaagcggctcatctgtgactcgggatacctcattcttccaactcctgggacgtaggccccagtcatccctgaaagcctttgtacagtgaatgacctctgtaccagaggggtccccaaggctggagcagagaaaagccccaaaggagagactctccaggtctctccaggttgctgagtgagcctcctcccttgacttgctttctctgtttctctgtgactttctcttccttttactcctgccccatgccctgtgtggtgctatcctgctctgaaccaaaagtggacaataaccccaacgacttctccttttcccctgaagcatggtggagacaggctggagttttcaaaaagtttgtgtctcttcaaacatggatcctggaacagaaaaagaacattagtggaagaactggtggactccaaatacagtctatactttagttaatagtaatgtgccagtgttgatttcttagttttagcaaatgtaccgtggttatgtaaattctaaaattaggggaaactgggtgaagcgtagatgggaactctgtactatctttgcaacttttctgtaaatctaaaattacttcaaaataaaaactcaaaaaaataggtgagggagtgacaaaaaaaaaatggaccaagatgagtcagaaatttcaagcctggggaggcttacaacactaaggtacctgatccctcagtcctagtaaaagagcaaaggactctcctgagccgaaaagccctcaagatcaagtttgtcctgggatcacaatcctctagcacttgagagattccctacctgaagtctggctctggaagtttcatttccttagttctaggagccatctcctggggaggtttgcccttccctgggtctctgccaaagctgttcagtaaacctgctgttctcttttcctcttcccaagctcttggatactccaggttgtctcctgctctggcttctggtcagagacagacttatggcagccatagcagtcacccgtctcatctagctccagggagctactcagctggaggagtcttcagacttatttcagctggggaccacataatttacctcagctctaacatggatagctgctgttgtctgcatgtttgtgtctcttcaacaatcatgttggaatcctggctgggtgtagtggctcatgcctgtaatcccagcactttgggaggctgaggcaggaggatcacttgagtccaggagttcaaaaccagcttgagcaacacagtgagatcctgactctatcacacacacaaaaaattagctgggcttggtggcatgcacctgtagtcccagttacttgggagactaaggtgggaggatcgcttgagcctgggaggttgaggctgcagtgagctgtgatcacaccactgtaccccagcctcggtgagggagtgagaccttgtctaaaaaaaatattctaacctccagggtgatggtattagacagtgggacctttaggggtgatttggtcatgagggcagagccttctttgtgaatgggattagggcccttataaaagagaccttagagagactcttcactctttccaacgtgtgaggacagggcaggaaggtgccatatatgaaccagaaagcaggtgctcaccagacactgcatctcctggcaccttgaatttgggcttccaccctgtggaactttgtgagaagtatatttctattgttaaaagccacccagtctgcaaaattttgttaaagcagctagaacagactaagagaagggccaatatttaaaagagttgaacttgaagctagataaagcaggagagtcccctagcccagcatccctttctactccctcatggcagcctcagtggtggtgtcgaggaggggatccacaggccctttggaaacctctgagttccagccagctcaggttatcagctgccccctctctggagcacctcaggatgggttccgcaggtatatttcccatacccacccttccactgacccaccagagagaatggtttttcaaaagtccaccttttaagggtctaaaatgaaaaaaaacaccaatccaattagaacatgccaccagcatcagaggacttctttctccaccaaatcactgtcaaggccacctcctaaagtctttcctaagtctttcttgctgctgcagtttcaagctcttttctttatgtttcttcccagggcaggagaaaaagaattggaccccactgggcctaaaaaactccttgttcttaaagttgcaattcggttcttctctaagtttttttgtttttgtttttgttttttcttttttgagatggagtctcgttctgtcacccaggcgggagtacagtggcgcggtctcggctcactggaacctctgcctcccaagttcaacaattctcatacctcaccctcctgagtagctgagattacaggtgtgtgccaccaggctggctaatttgttttgtgtttttagtagagacagggttccaccgtgttggccaggctggcctcaaactcctgaccatctcagcctcccaaagtgctgggtttacaggcttgagccactgcacctagacttaagctatgttttttttttttggttttttttttttttggttttttttttaccatgagctcatccagagttcttcagccttgggccacagagccaggccttctgcaccccttgagagctgctcttggctggggcatgctccagggggacagggctggaaaccagctacccctcagctcctactcacactcctgctgactttcaccagtccccctcagccccctcacccagcctccccatcctgacaagcctggctcaggccaagcagaaatggtagcagcattcctctgatgctgttggtattattggaaaagtcggcttcaaaaccacagagggatttagagtactgggggcgagagctcgggaaggagtgtagacagtgagacagctgaattaaacagtgtcggtgtgagtcactgctctcctgcctgccgccccagtcctggcgtgaacctagaagctggtgagacagttatcttctcagtgagttaaattgctctctgagtacagaaccagggagactggactgaaaattacagcaggaaaggtttaggctagacatcaaaaataattctctgaacttcatgggtcccaaaagattttacggtttcctgggaggcatccagtattttgccaaagctccacctgcctgcagtaactcaagtcaatcctgccaccttaagtatctcttctatgacttggtgactctcatgttctgaaaggacctcatatagtctcaacatggaattgctgcatcactgtaaaatttacaggaatggttgttgtacgttttcatctgtaactagggtcaggacaccctactgccctttgcttctggtaacagaagtcatgactttggcaaaattaatttgcctgaaaattagcctggaggatgtccctttgctttgtcttccacatgcctgcattttctttcactgtcttctacatggtcacgtagaattggggtgcttggaagggcatccaggtatcactgaacccttcccttccttgaaggtggaaagtagccccactccagacagtaggccaggcagggagttgggatgggagtattcagcatttaggacatctaccgggtcagtgagggagagattgttatccccattttacagatgagcaactgagacttaggttaatcatttgcccatggctcatagagagtaggtgcattactctggatggaagccaggtctttgggcatcgggaacaaggttctttccatttcatcgcatagcctttcaattctagtcataataatggtgattaagataaaaacaaatggttggtcacagaaggccaacaaaaataaccgtgtgattgagcacttcctgagctcccactctgtgcctgagctcatcacttcatctcatttttccttgaaacaaccctgtaagatacatgctgctattctcattttgtttatttattttgagatagggtctcgctttgtcaccaggctggagtgcagtggcacgatcactgctcactgcagccctgacttcccaggctcaaggatcctctcacctcagcctcccgagtagctgtgactaaaggcatgtggcaccacgcctagctaatttttaatttttttgtagaggtggtgatcttgttatgttgcccaggctggtctcgaattcctggactcaagtcatcctcctgcattggcctcctaaagtgctgggattacaggtgtgagccaccgtgcctggctactattcctattttatagataagaaaactgaagctcatgggccgggtgtacaacggctcacgcctgtaatcctaacactttgggaggccgaggtggatagtagatcatttgaagtcaggagttcgagacaagcctagccaacatggtgaaaccccatctctactaaaaatacaaaaattagccgggcatgctagcacgcacctataatcccagctactcgggaggctgaggtggtagaatcgcttgaacctgggaggcggaggttgcagtgagccgagatcgtgccactgcactccagcctgggtgaagagcaagactctgtcagaaaaaaaaaaaaaagaagaagaaagaaagagaaaggaaagaaagagaaagaaagaaagaaagaaagagagagagagagaaataaaggaaaagaaagaaaagaaaagaaggaaagaaggaaggaaggaagccaaagctcaaagaaattataccacttgactgggtcacccatcgaggaaggggtggagtgaaggttcaaacccaagtttttgacactaaagcccacgctctttcccctgtatgtagtattttcttgcagaatttttctgccctgatatttaagaacttctttttgtctaaatatttattcatcctgctacaatgtaaacacagctatgcaaatatattaatggatatttgttttgctttgttgtttttactgagggcaccctagcacatacacaaacgatgacccagcaccagggaggttgcttgttttctggcttctgctttttttttttttttccttccccctgatcctgtcttctgcttctctcccatgcctttgtgttgcccctagggtgtttctctactttccaccttccctctccatcctctctgctcctttagaccttggcagccaatcctgtacctccagcatctcgttgcctagcaaccggcttcctacctgccccattgtgttagaatctccatgacaacaagtattgccaaaagagagaaaaaaaagttaggtggtagcaggaggtgatgagaccctttattttaggacatttgtgcagttttgccagcaataatttgctcactctcaggattccccagagggtgtcacaaatggactgaacccagacctcatgagataacaagtcacgagactgacagtctgtctgtgtgtggggatataaactctagcatagaggcattcatgtgaggggcaagaatgagagccacgggcattttttgtttagacagatgggactgggtcacatgatcccctttctgtgggtcagttcaggaaggcagcctgaatgagggaggattttttaatagttgcacaagtaaggtaaaggagaatactttccaataagccataggtgtgggtgcatctgaattgggccatgcctggccagctgcatctaggggagggctaaggagagggggaatgggagataccataaacaagatttggggcaacacagtctcctgcctaagcactgtgggggggtgtgagccccgtgagatccctgctctgtccatctccaggctgtggttggcctcagcagcctctgcatcccttctgctttgcctagagggagactgcagggaaaaagagggaaagaggaagtgggaaagaagtccagaccatgttagatttccaggtgcgtgggcttgtgttcacaatggggaccctggctctttcattcacagcctctgaaggcctgacatatattcaccacatggctatgggatccacctagaaaggggaagtcaggtgatgtcttagaaaggggaggcactgagaagaaaggtgagacagctggagcaggtcagagcacttaggcactgcctttctggacatgtggccagggatcgaccaggacccttgtgaaggcaaggacttgcacattgcgaaacctcctctcctgtgggcaaaacagggggctacctggtctgtctttattgttcaaggtagacagtgcatggaagacctgtccccaagccagtatctggcacttatagccactcaacctacccacccaaccatgctattttgctggcactttcctcactactactgccatgtgaactgtgaggctgtcctaaggccacgggtcatcttgtcatcctgtccatgcacctggcccttgaacttcacaggcagaagagcatctttgcgtctccaaactccaaacagaaggactagaaagactgcagtcctggtattctgtatttctgtcctcttcatggacagaaagttctttgtaacctctaacttaaatccctgaagtagagcagttcacttgttattatctgtgttcgttggggaagaacagaacaagatctgctggctatggggccaccccacacacacattttctccagctttgctcccctacttggcctgactgttcaaggcccccagcaaaggctacattcccactgctgagcaaggccatttagatgcaagatactaattgctaaaacagatgtaatgagtcaaatacccttagacactattggaggacaaacaactcggttaatctttttgacaagcaatctgcaatttgtaaccaagaatctttataagattctcctcttggacccagtaattctccttcaaagaatttagcctgtggaaataatcagagtcccaagcaaaactattttggatgtttgtcgcactgttatacataatagtggaaaattggaaacaacctcaatggctagtggtggtaaagtggtcaaataatttttttcttttttttttttttttttgagatggagtctccctctgtcacccaggctggagtgcagtggcaggatctcagctcactgcaaccttcacctcccaggtttaagcgattctcctgccttagacttccaagcagctgagactacaggcgtccaccaccacacccagctaatttttgtatttttgtagagatggggtttcaccatgttggccaggctggtctctaactcctgacctcaagtaatccacccacctcggcctcccaaaatgctgggattacaggtgtgagctgccatgccaggccaaataatttttgtgtaatgcattcacataattgtttactatctactaacaagtatgtttttaataatttttgaagactttatttttattatttttgagatggagtctcgctctgtctccaaggctggagttcagtggcacgatctcggctcactgcaacctctgcctcccaggttcaagcaattctcccacctcagtctccccagtagctgggattagaggcatgcaccaccatacccagctaatttttgtatttttagtagagacagggtttcaccatgttggccaggctggtctcgaactcctgacttcaagtgatccacccacctcggcctcccaaagtgctgggattatagatgtgagtcactgcacctggcctgaagactttaaaatgaaaagtaaaaatgcttaatatatagtgaaaagatataaatatatagtataatgataactttattgtgtgtgtgtgtgtgtgtgtgtgtgtgtgtgtgtgtgtgtgtgttatgaacagtaaaaaccctggaagaacccaaaacctacaaatgctaataattgacttagtggggtgataacttgataggtgatagacattttcttttttatgttttgagattttccaagttttttctaatgcacatgttatttttataagtaataagaactaccctttttaaaggacttaccatgtgctactgtactaaacattctccacacattatttttttccacctctacagcaattcagtgatgtaggtattctcgtttttcagatgaaacaacgaaagcttagagaggttaagtaactttcccaaaactgcacagcttataagtagaaccggattctgaacagaactcccccaaaacttataaaaagtgaatgctgtcattcagtgtggcgatgagagctgataagtggtattgatctgcacggcctgcgagtttctgatccaagtctgcgaatgccagtggaccccacctcagatgcccctcttgctgtagctctacttgctgggcagcctcggtctaacctcctgatcagcccttcaaggcagaggcgaccccgttcagagatgttgtgtggggacttacaggtcagtgaggcaccgagtacaggcagaacggaggcagttgctctcctgggtctgcccagcatgacagggaaacagaggaggcacttttccagctttgctgacagaagtctcccataagctcacctgtcagcctcctggtgtctggcaggatgctgggccttgggcagctacgccctggagcctcacagctcatgggactttttttctgagattggggtcagctgggggaggagggtttctctcctgcagcctggcgctgggaccttgggcagtggccagacctggcctctccctccgtgcgtgactaccacacgaatgtgctgctgccgagatcagggagtcaccctggcttggcagcgctgtgctggcaggaatgggggctcaagcacagttttagcttggctctgagggaggctgctggagccagcaggacaggggaactcagctttgctggagaacagaaacacataagcagcctatggaacaagagagggcaatgggactggaatgatcttcagtgctggaattgcttgccccgcttttcagatggcaaagctaaggcctagggactgagtaactcgggaagatgcttagcgctggagtcctgtccagtgttctgactcctgggctgcatgtgactgctgggcctgctgccagaccctagctcaagtttctgatcccccaaccctacccctcacacattctgagctgttggggagaaggaagagcttattgctagtgtagccagcctggagctgccttcacttggcaagaggtctggtctgcacctcacaacatagtcccactaacaggtttgactctaggtccagccctctccaaatgccaggctctgctgttccaggcaggaaaccagcccacacactgcaaagtggcctgggcctctgggctggagggctttaggaacagtccgtaatccccacgatctctcctgtcccggcaccaaggacccttcatcccttgccccagaccagtggccctggaagtatgtgggatttgttgagtgatactacctccatctgcctggctggaaaacccatccatgcagaaatactggaagttttaagataggggagaaaaataataataaagcaagtgtgagaaagatggagctgacaggtctggtgggagacgtggtcatctggctggcggcttgggggtcttcacaggctcaagtttctgtgtctgcactgagctctcccagccccaaggttccgcttacctctgctcctccctattcagcagctccagtgtccatcaggaatctaagctattgttagggaagccagacttcttgtaactctggcctggaggaaagtgtatatatatagagagagagagggaggagggagagagggaaacctggatggaacagggattgtcttcagggcacttccccaatgacctagatatttatacccttgtggcttagaactctaagctctgatttgcattgcaggggagcatgccaattgttggggtgtttggaactgaggcctatgtagcaggaggtatcctggaacagaagaaggagcagagagaagggagggcaccttctctgctctactcagggtgaaggaagctgtgtgccggctgcacctgcttcccatgccagctcaacttcctgggaagtatttataactgaggcctccagccccctgtgatttgtgggacagttttaaaccattgattttcattagcactaaatcatttctcttggctaattgaaaaggaactggggatactgaaagtggagtcattcacgtggaccaaatcagcgaaagatgtcaatatgctgaaacagcacaagtcttcagttggacggctctgagttccctccctgaagctcaaaattcacttctctctcagaggtcagaggttgtgagaaacaagcccctagaatggagaaccaggaagtgaacttggattcttagcaggagggatggaggttagacacttggaagaacttccagcctagggtgataggatgagagattctgagggaggtgttggaggaatgcagtgaacatctcctctgcagaggtgtgtttgagatctccatgtcctgcctctgtccgcaggcacaggtgcaggacgccctgtctggggaagagcatttgtccttctctagacacaggctggggtggtggagttgctctgggaatgccaagtctgggaagtatggtgttcagaagcctctcctggggaatggctgggctaggcttggagtaagaggtgaaatctttgctattgcttgatcacttaactataaataacaggaagcttaacgatctgatcttacctgaaagtaacacagccagccccatcttttgtctgtaagaacacattgccatctggccagaaaggaggccatgccacagtctaaggataaggacacttctggaggtgttggcagagccctgggccctgggggtggcgaaggggaggggaatgatgagtcccacagcttgtggacaatcctaatccccattcagagccaggagccagccaggccggcgctggggatactgagccccaccccctctgctaacaagtcccagccagtagacctcagcttcccctgcttcctgccaaggctctgcccactctgcccatgcccactctgatggggcaccaccactggctgcccatccttgtctttctcttgacacagactggggtgattgcattctctgccaaggaccaggcccagctgaatggcccccagctggtttgctgaagcctgaagccagggtctacaggcaagagcttggggaaggaggatgggctcaaatccttttactatgcgctccccaccacgacatctcagctcttcctccatttctgtcctgagaggttggcagagattagaggctggacaagaaggataaacatttagtaaatgactattgcagtcctgtccccagccctgggacctcctcgcaatgcccagtctggaaacactgcggccttatgcggagagggggctgtgtggtgtgggggaagataactggagtgggggagtcaccccaggctctcctgttgctcagtggtgtgacttgggacaagttacttcctctcaagcataggaatattgtgatttgcctttataccctcacccttagctccatgtgtgagctgaacaaggtctgtaaaccacaaatattggaagttgtgtgcccaaggtacgggtgttggggctcatttttccagggaagcctgtgagcacactgctggaggcctggagcctctgagatgagcgaggatcggaggacacagagcacctcctcaccctgggctgggtgggaaatgggccaaaggcgagggacagcaagggacagggaggacaggtgggaaaggaagctggagatgtgtgtgtttgtgtgtttaagaataagcatgagtgtgagttgcatgtatgatgtgtgcggtgcgagtgtgtatgtgtcagtgtgtgagcacgtacctgtgtgtctctgtgtgaatgtgtatatctgtgtgtatcagtgtgtatatgtatttgtaggttgtgtgtgcatatgtctatctctgtgtgtcagaatgtgtgtgtgtgtgagtgtgtgtgtcttagtccattcaggttgctataacaaaatactttagactgggcaatttgtaaacaacaggccaggcatggtggctcatgcctataatgcccagcactttgggaggctgaggcaggaggattgcttgagtccagatggagaccagcctggtcaatatagtgagaacctcgtctctacaaaaaattaaaaaacaaaattatcaggcatggtggcatgtgcctgtggtgccagctactcggcaggctgaagtgggaggattgcttgagcccaggaggctgaggatgcagtgagcagtgataacgccactgcactccagcctgggtgacagagctgcgactctgtctctaaaaatataagaattaaaatgaaacgtcagaaatttattgctcacggttctggaggatggaagtccaagatcaaggtgccagcagatttggtgtctggtgaaggcctgttccccatagatggtgacatctgtgtgtcctcacgtggtggaagaaaggggcaaacaggttccttcaagtctcttttatgaagggacttaacccattcacaaaggtgtagccctcatgacctaatctcctcccaaaggcccacctcttaatactattgcattggagaagttttcaacatagaaattttggagaggacacaagcactcggagcatggcagtgtgtatcttgtgtcttgatgtgtgagtgtgcttgtgtgggagggtgtgagtgagtgtgtgtatgtctgtgtgtgtgtgtgtcactatgtgtgtatggtgttggtctgaggggtgcagcagtacgagtcatatcttcagagtggcaccaagggacacacttctctcttgcctgaggtgaagcccaagttgagatttggccctgggaggaactaaccaggatttccagggcggagggagggtacgtgtcagatgttgtaagaaagcttggaaagagacctgtgtggggtccagggattctgtccgtggcctctggactcatgcaggtcattctgtccatttcctgtctctgaacaggttgcatctaagtcatcttcatgtactcaggagtgcctcaattcagaaggacctctatgaaaagagatctccccatctttcttactaacccatgccacagtcttaaatgtatttattttggaaacttggcctgctgtgtaatttggttaccctctccccgcctccccctcgccaccaaccccatataaatggactgtcctatttgtactcaaataagaaaacataaatttacgttaaaggtgaaacattctggtgacaatgtttctgctattctgactgaaatggctgacaaaatttactaattggaaatttggggcagaacagagaagggagatacaaactgtgctaatgacttgacttaatgataactagctagtattcagtgtttattatggaccaggaactgtcttccatgattttcctctcataattcacttagtcttggctaggtgtggtggctcatgcctgtaatcccagcactttgggaggctgaggcaggcagatcacctgaggtcaggagttcgagaccagcctggccaacatggagaaaccccatctctaataaaaatacaaaattagccaggcatggtggcacacgcctgtaatcctggctacatgggaggctgaggcaagagactcgcttgaacctgggaggcagaggttgcagtgagccaagatcacgccactgcactccagcctgggtgacagcgcaaggctcaataataataataataaatacttcacttagtctttatagcaacactttaaggtagatattgttatcatccctatttcaaagatgaggaaataggccaaggaggttaagtaatttgctcaggaccacaaagcaggaagcagcaatacccagatttgtacaacggtctgaggggactgggtgggggttgggaagatggggctgggggcgagtggggagagggggtggttctggctccaggacctctgtttttagccaacactctgtgctgtgcagtgtccgtatctcagtgcgtgagttcagagatactccagccctttactgtaaatattttccttgtcctctttctttctttttttggcatatccaacccctagatgctctggttaaaatgttctgaccttttcgaaatgggtatattcagtgcattcccaaacgcaatcgcggcccctttaacagggccactgcaggaggagctgtcctatcagcaccacggccgccgcccagtgtgcccccaaccccggcagctgctgcgggcgcctcaagggcaggaagggcggtggagagcggggccaggaacttgcgactggccagttctccagaccggggagagagggaccgccgccgaatactggtgctcgccttcctttcccctcgcccccatcctgggagatcagagggagctggtgcttaggctctcaccaccctctgagtcagaatgaaatatttataggcccaaaacacttccttgctctggggtttgcagagctttaatggccaggtagcctccatttgtcctgatggggcggggcctggcgctggaatgaggctgaaaggctggaagattggggtggaaaggagttagggctgaggcctggatttaggctgtgaagtaagaagcacaatgtctggagctagactgtttggatctaatcttgactctgccatttactagctgtgtgatcgtgagaaagttccttagcctctctgtgcttcagcgtccttgcctctgaagtgggaatgataataatagcaccaacttatagaacaattacaagttaatataggcaaagcacttagaacagtgtctgacaggcagtcagcaaatgcaactaaaaagtgtttgatttaaaaataaagtaccagggtgagacttagacagcagacagctgtgggatgtagactggaaagggaggagagagaaaagtgtgttggatgtggctgatacatcatgttcaggggcagggactgttccactttgcctgggaagccaccagcctctcaactcacctgccatccaccagactgtcccattctgtgtctgaatttggcaacttccctttgggaggacggaggaggtatggctgttctccttaacataatttctgccatttctttctttctttctttctttctttttttttttgtttgagatggagtctcactctgtcacccaggctggagtgcagtagcgcgatctcagctcactgcaacctctgccacctgggttcaggcgattctcctgcttcagcctcccgaatagctgggatttcaggcacctgccaccgcacctggctaatttttgtaattttagtagagatggggtttcaccatcttggctaggctggttttgaacccctgacctcgtgatccacccaccttgacctcccaaaatgctgggattacaggcatgagccaccattcttggccaatttctgccatttcttgagcacttcctatgtgccagtcaccaagctaggtgccttatctttactctttcattgcttctttataaaaccctatgactacttattgcagatgcggactctgggctcagaaaacttaacttttctaaagccacatagcaggaagtagcagagctaggatttgaacccagatcttccagattcaaaagcctttactctttccatgacacatttttcgagctgtctagtttcctaccctttccactgtgagcatttgggtgttattgtgtgaagcatggacaatgttgttcctgttgatgcttcaggtttctgatccagacctggcaggtgttcttatcctcttctgctctgctggaagctcaggagaatgaggcagctcagcctctatccctgggtacgtgggatggagggacacttgaaaaagaaggttttttttttgtctctgtgatcataataaataacagaaatacttgttggtccttactatgtgccagacactgttctaagcactttctgttcattaactaacttactcttcacagcaatcctatgagtagatcctgtctcaatctcattttacagaggagagaactcagaggttccgcaatttgccttaggtcacaccaccagcaaatgacagagccacgctttggacccaggcattctggctccagagtatattctttaaccactgtaccacagaatctctttaaagagcaggagtctgtattggggcactgacggatagacccaggggcatgaggagttctaccatcaaatccactacttcccagacctcaaaccaccaactaccaacctgactgctcttcctaaaagcctccccagatcctgcctcactgacagatcatgacaactaaatccccatggtactctgttttgtctctctctctcttttttttttcttgagatgaagtttcactgttgttgcccaggctggagtgcaatagcgcaatctcggctcactgcaacctccgcctcccaggttcaagcgattctcctgcctcagcctcctgagtagctgggattacaggcatgcgccaccacgcccagctaattttgtattttcagtagagatggggtttctccatgttggtcaggctggtctcgaactcctgacctcagatgatccacctgcctcggcctcccaaagtgctgggattataggcataagccaccatgcccggcctgttttgtctctcttgatgcatgcactgcctgcacatgttacttgtcacgagtgtgcatgtgtttcttccccaccagattgctagctcctagagagcagaacctgggtctcagccattgcaattgccacagcacctggtacatggaaggtgcccagccaaggtgtgtggttgttgaacaaagggatcctgccatgaatccctttgtaagtgcaatgttcttttgaaacagagagtactaactccctagtgtaatttattgaggactgggatccccaggatgagggaactaaagagcactgaggccctcctcttattcactgaggttaagtgaaatttcagatcagggtacttagaaggagaaagaacaaagagagcatgtttggaggtggaggatctgataagattccccaatctctctgtctctctctctctctctctctctctctctctctctgtctgtcacacacacacacacataaacacacacacacactcccataagaaagaaacactctccttgcttgcacctccagctctacccctaaacttctgcccttgagactccccagacacattgcaaagttatcacaaaggatgattgatgctgacaggcaagctctttggcttgaacagacccttgtttaagacgcataagctgggcacgggagctcatgcctataatcccagcattctgggaggccaaagaggcaggaggattgctcgagctcaggagtttgagaccagccagggaaacatagcaagacctcatttctactaaaaataaaaaaattagcccagtgtggtggtgtgtgtccttatagtttcagctagtcaagaggctgaggtgggaggatcacttaagcctgggagattgagtctgcagtgagctattattgcaccactgctctccagcctgggccctgtctcaagaacaaataaaatgaaagagacgtagattgtcctgcttctcagacacatttttgtctaacactgagatccaggagatgagggccattgtagctaacattatgcatctcaagacagcaaacattttcctgacattattttattcaatctgctcagacagaatatgaggcagtagagagtgagatggggcagaaaaagttcccctcatttcagaggaagggaaacagagcctcagagcaagcatgatgtctcccaaatcatttggtccattaagaatgtaaactgggtgcttgtagtcagcaggcatgtctaggccccaggagagaagacctgtgcaagaggccttacctttcagctttggaggcatcatcatccatgggcctcagcccaaatcctacttcccatgtgtattctctcccctttcttccccagccaccccacccctgctgccagagacctgaaattccagtcttcctcctcaatccccaccccaacccaggtgtgccacttgccaccaactaggcatattaaacctgcagccgggctggatgaggcctatcttttccccctcccatgcatgttgcctacagtgtcacatgggcaatgcccctgtaccatgctgacctacagtaccaccgaaggcaaacagcgtatgaggtggttggggaaaactagctagatctccagcatgttgggagaataagagaaggaaaagagccctccccaagagctgcctatgactgatcttctcttctggtttccaccctgtaaattggatccccactccccacccccaactctatctctggaaggccccatgctccaatcagagcaaggtcagagttgatcatggaggttgggggtgtgtaggcagagcccggatatgctctcggcgggtgtggccaaggggatccacccttgagcctcagagtcctgtccatctgcatttgagtcacaccactctgccactttttagctgtgtgtgtcctggggcagctcacttaaccttctccacctcattttctttacctgtgaaaggggtactaaaacttactttgtaaggttgttgttaagaactagaaacaatgtctcaatacaagggactgttactctgtctagggcagaagcatctgccaggtgtccttaaagatgctgaatacctgtgggttctcactccgaaggcaaaccaggaaaacttcatgacccctttctcacccaggctaaaataactcactgtttggggagccctcctccaccacccaaagatggtctgatcctcccaggctcccacctgggggcaatcctgtgtgcatcctcctcccagtctagatgagggctatcaagttgcggaaggaggagagagcagggcccccactgcagtggagagggaggggtagggttcttgtgacctaccatgggaatgttttaaatcctcctcccatcgagcttttgaaaaaatcatgatccaggaaaaacagcaactgcgtctgctccattagcaagcgagggagacgcagcctcctcagccttagggctcttttagctggaaattcagccagccctagccatagggactgggggaagtctgagtcaaggggctgggagcccagggatgcatggaggacaatgtaggtgagttgggctcttggttgggggtggttgttgggcaacacaacctgagttggggaggaactcccaggagagatgaaggtagagtcaagatttagttctggattatctcaccaatatagctcccagaagggatggtctagggtgcataattggctttggtcctcattttgcagactggacatggagaggttgaataatttacccagattctcacagctgcaggtagtacctgcttacactttccgagtttcctttatgaaagtccttttctgtcccttctgtggggttgtccttggcatgctggggctgggagctggataggcttcatgggagactgtgggcaagtagaggatgactcacagggtctcccagtctgtgtcctggtgggtgggcagggaatggcatgagctagatgaggaagaggcaggaggcaggcaagccctgggtgtggccctccaggcctagaccatgggcagccactggagaagcagaggcaagctggtgataattccctgggcacacatggctttgctgcccttcttctgctgggtaggatgggggttgctttagctaatcaaataacggtatcaagtcattaaagtacaaattagagaaaaggatgagggggtcatagcaattcccttgtagaataatttcttgtggaaattatttcatttattgcagagcaatccaataagccctggctctcatggtcacttcagactggagttttaaaaatccattaatgcttaagggtctacattgacttcttatagcttaggctgtaactggtcccagaccacagagtcaaaggtcagggaaaggtcagcaacagccataaacaattcctgtggttgcttacagctttctccacaatatggaaggggggatcccagggatctcaagagaaccggccatgctttggtggtcttttctgtccataatgtcctttgtcttcatcttcatccaatgccaattcaccctttgagaatcaaactgagtattttcattgtacataaatctttgctcccatctgtaatcattttcctagcatacatttttagatttggcattgttcccacagcagtgtatgggagacatatactcttttttttttttttttttttttttttgagacagagtctcgctctctcgttcaggctggagtgcagtggcgcaatctcggtgcactgcaatctctgcctcccaggttcaagcaattctcctgcctcagctttttgagtagctgggactacaggcatgtgccaccacgcccagctatttagtgtgtgtgtgtgtaattttagcagagatgaggttttgccatgttggtcaggctggtctcaaactcctgacctcagttgatccgcctgcctcagtctcccaaagtgctgggattacaggtgtgagccaccgcacccagcctcatggccatatactcttaccaacactggatattttaattttctgcgatatagtacatttgatagcaacaaatgataacttatttaatttgcatctcttcaatttctaataaagtctttggtttttgttttgttttggccagttgtatttattcttttgcagttttcttgttcacagggtctcactctgtcacctaggctagagtacagtggcatgagctcagctcactgcaacttccacctcccaggctcaagcgatcctcctgcctcagcctcccaagtagtgggactacaggcacacactaccatgcccggctaattttgtttttgtttatttttatgttttgtagagatgttgcccaggctggtgtcaaactcctggactcaagggatcctccccgctcggcctcccaaagtgctaggattactggtgtgagccactgtgccccacctgccctttattctatgggatgtttgctttcaaatattgatttggtagagctccctatatgtaaaggtgttaattccttgtttttcatacttgttgcaagttttcttttctttcttttttttttttttttttttgagacagttttgctcttgtcacccaggctggagtgcagtggtgcaatctcagctcactgcaacctccacctcccaggttcaagtgattctcctgcttcagcctcccaagtagctgggattacaggcgtgccaccacgcctggctaatttttgtatttttagtagagacggggtttcatcatgttggccaggctggtctcaatctcctgacttcaggtgatccacctgcctcagcctcccaaagtgcagggattacaggcgtgagccactgcgcccagtctgttgcaagtatttttatagtttattgatgtgtcaaaccttttgaaaaggttttttgcccatataaagattttaatttttatgcattcacatctatcagtgttttagtttatgatttctgcctttgatgtggtacttagaaaggcctctcccacaacaaaattatggaaacgttcatgcatgtgttctgaacattttttatggcttcattttttaacctttaactctttaatctatctggaattgattgtatgtatctttgtaaactgctttaaattccctttgaaatggaagtgattaattcattaattaacatggcaaggaggggaagctggtgaagggggaagggttgaagatacaagagagaaggggataattaatgagtcaaggtctggaagagacaagatcaagtgctgttgacagggcctgcacaaggaactgccttgaaccaaaggtgggacactcagtctcttttagacgagggtggcaggaggtggcagaggtcagttttgtcatggggggaggtgggtagggaatgggctggagaggaagactgtgagccaagtgacaaatgcccagtgactatgggggtggggacagcagggagggcccagggaatggcaggagcctcaaggggcagcatttgccaatttacaagtttatgatctggggggactgtgattggccctcccacccttgggccccagcagcatgtggaagaaggttgcactgcactggagagtgtcctatgaagagagccaggggtcagctgcagtgatgagaggaaggaacatgcagggcagaggccgagagcatgaggaaacttgtttagtgtggaggacattctagactcggggtactaggaaaggcctgagggggaggagctgtgagaaggagagtctgtccccaatcagtgaacaggaacagagtcaaagaaagttaaatgaagcccatttgtacagcacattgcaattcacaaagcactttcccatatgtgcttgcagatgagcctcataacagcttttcagagcagagagggaaagggatttgcccagagtccagcgggtagccagtgacccagtcacaatgcgaaccaggagtgccagtgcccagtctgggtgctcgagcctccccacagaccccaacatcctctttctacactcaaggatggaagcttgtggggatgtgcctgacggtctttttttgccctctctccctgcaggacagtagcccacacttccagccttgcagaccatgaatgggatggccaatgtgaatcccgccagccgccctcactacgcctccgccatcccggtgcctcgtgcctcttcccagaccaggattcctacaccgggcgcttctccccagctgcggccacgccaggccggcctggccctgagcccacagagagcagcctcccccagactgggaaaggctgcaggtccttctagaaactcctctcctagggccttccgggggagaggctctcccaagtttgctggggcggtgagggagtcagctgaggatggggaaggccccttcagctccccatggaatagtcccaggacaaccccgaaagcagccctctccagccgggctggatccggaagaattggcgagagacaaggcacccagggaaagaagaaaaaagcccaggaagggactccagtctgccagacccggggcagaagcccttctcggacgagctttcacggagaaactcaaataccaggggctccggaaggtcggaagcctccaagctgcccaggaaaagaccaaagagatataaactacaaaagttctgggacccccaggtctttggagcctgatgagggggcagcttcgtgggcttcctctccagtctgcagcccagtgcagggcaagcgcccctctccctctccgggggccattagcttctcctcagtccatcagcagagtcagccagtcacagccacggtggcccccttccagtacaggtgagctggggagcaggcagggagggaagggggaagagccatgctgggaccaaggggcaagccggaagaggacagggaccctggtgatcagtggctggtaaagaccagagggccccaggcgatacaaaaagaagttaggtaggtggaggcctacagagttgggggcttggagagctgagatgggattgggaccataaaaggggacgctgactgaagctctgatctttctcgactgtggggaatccacaacaaaaagagtctcataaggagggtacccctaaaatgtccatttttgctctctggaacaatataaagattgggatgtcgtggaagcttaagcagctagatacataggcagtgtcagtctcacccaattcattgtgggacatttgccaacattgtgagttagaccaactctattggcttgggcactgcgcctttacttagtaagtaaaatctacactgcttgttgcactcataccttgtacctgtctgtctgtctctcactcgtttgctcactccatttgctatagtgccttgtgcatatctgcttatgtgcctggcatatcaggaattagtaatgctttagacagacaggtgttgacatccttgttggtggaggtggccagtccagtattcacaacaagatggccaacaagctagtacatccagcttttttcagacactgcaagttgattgcatagaaaaacaaacgcttagtcaactacgctttttttttttttttttttttttttgagatggcatctcactctatcgcccaggctggagtacagtggtgcgatctcggctcactgcaacctccgcctcccaggttcacgccattctcctgcctcagcctcccaagtagctgggactacaggcgcccaccaccacacctggctaatttttttttgtatttttagtagagacagggtttcactgtgttagccagcatggtctcgatctcctgacctcgtgatccgcccacctcagcctcccaaagtgctgggattacaggcgtgagccaccgcacccagcaaactatgctttttttaaaaaataaaaatataattatactaaaaagacttcagtaagtacactaaattttaattactaattattatatagtttagaaatgcccaaatgcaaattaagtatcttcctgactaaactaacttcctatattttttcccctatgctaatggaaggagaaactctcacttatattttgggcatagaaaagcttgtacatcatcccttacacaccagggacctctgaggcatcagagcggctggaggtgggggtagggaaccactaggagctttaaccttcagcagaaggcaacttgtgtatcttaatctctgaaaaattgaatgcaatttaatattacaggactaggcctttggagttcaggacaaggaagtgaatggtcccaatacactctgcacatgtttaggcttcatttagactgttacattcagttgtgaacaccacgttttaaaaggacatcgacatacaaaaacacatgtagagcaagactgacacgttgctgggggatcaaaaaaggtgttataggatgatgaaaggaactgaagaagtttgctttggaaaggaaggcttagagagggtctgagcactgttttcaaatatttgaagggctgtcatgttgtaagatgaattagatttacttggtgcagctccaaagacctgactcatcaccatggtggttagaagttagttcaagacagatttgaggctcaagagcaagaactttccaaaaagtagagaggattacaaattgaccggaaggcagtgaactccctgttattgcaagaattctgacttcacagccaaagggaggtcttaccagggtgacccctggctctcaaagcatatcttctgcctgactgtactgcctgcaaagtgcactgatgcttcttttcctaaggggcaactcacttacgtccccttgtgactttctttacttcgattctgaagctgatgagagaactcaagaagcagaaatgcagggcaggccttcctttgaatggcctttttccaattagtaaaatgtttccctggtgactctttgactttcttctcctacctgattcccttcattttgaattcattctttgggaaaagtgtctaggcattaaattgtttaagattttacattatctaccttacaagtcccttggtatattcagaacctgacattttccaaagagctcagaattcttcattcaaatattttaatgcagcttaaacagaaccatgtttccttcattcagcaaacatttattgcatgtttgcattttaaacagaaatggaaatgtgtcacaccaccctacctcctagaccctgcccctttcagtctctggattagggttggagagagggtcatggcacaaagacctgactcatcaccatggtggttagaagttagttcaagacagatttgaggctcaagggtgcgattaggaccaaggacactccgagatgctgcacgccaatgggcaggcacccagcacactctgcagggcctagagctgctgccatggcagctctgccaagggccaggctgggccacccttcaaagcttcatagccaaggaggtgccatctgcttcctagaatccacagacattgtgtttttgtggaaatctctcctccctccctgccacccgccccagcacctcagccttctgcaaagccccagtggaatgcagaagcagaggtcacctgcttccctccccatctccagcctggtcatgcctgacctgcttctccagggaatgaatcttgcagccatcttctcccctgccccatcctccacagccctctcttttcaagggccttggtgtggccttcccagtgaagcttgtctcctctcatccatcacttccctttggacccagagaaggtgcaatcccctgtccgctctcaggagaccctggtctcacacatctaattccatcacatcctcaacctcatccctctctgctatcctggaagagagccacagcagcttcaccacagcccttgctgacttttcccaactgccagtgcaccctttaccacctccctaacccccaacagttctcttcttcctgcattgggtgggccttgggttggacttcaattggaactatggttaatggtatcaggagcgtagggttactggtgtcactactgcaattttcttctctctggttcaacctctgcctgacttctggcatacagagtgctgtccactcaggctgagaagtgagggcggacatggaggcctggccatgtttggagagatggaggcagatgtggataaaaatacagagctgactgaaattagagataaagcctgccttcctcaatgtttctgccattggagtttctggcccatatgactgatgtaacctcacccactcttgcatcatattaatggcagcaacaatcgtgactgtaactatttctttttttgtttttagtctttaatttatttactggagacagattcttgctttgttccccaggctggggtgcagtggcacagtcatagctcactgtaacctcaaacttttgggctcaaacaattctcctgcctcggccttccaaagctctgggattaacagttgtgagccaccaccctggcctattcctatttttctttttctttttttttttgaaatggagtctcactctgtcgcccaggctggagtgcagtagcacgatctcggctcactgcaacatccacctccctggttcaagcgatcctcctgcctcagcctcccgagtagctgagattacaggcatgcaccaccaagcctggctaatttttgtatttttagtagaggcggggtttcgccatgtttgccaggctggtctcaaactcctgacttcaagtgatccatccgccccggcccccccaccctaagtactgggattatagaaatgagccactgcacccgtctgcctattcttatttttaacactggttattgcatacctgctctggcccagacgctgtgcttagctctttacatatatgatgttaatcaatgaaacagttgacacattatatagaattccctctccccagtagaattttctgttactttctcaccaatatgttgcatcccctacttcaaaatcccaggtccattctaatttcttccaagaaaccaaccaaccccagtctttctttatccccttggcacttgtgtacttggacagacatttaattgacaataagagcctggtgcagtggctcacacctgtaattccagcactttgagaggctgaggtgggcagatctcgagctcaggagttcgagaccagcctgggcgacatggcaaaaccccatctctacaaaaaatatgaaaatcagctaggcgtggtagcttgagcctgtaatcccagctacttgagaggctgaggtgggaggatcatttaagctcaggaaatcaaggctgtagtgagccttgatcataccactgtgctccagcctgagtgacacagtgagaccctgtgtcaaaaaaaaaaaaaaaaaagagagacagtagtacatggcgattgtccccatcataccaagcacccccaggggccaggatgaggcctcctgctttctctaacgacaccccaccctgcactatccccatcattcacctgaggggcctgagatacaaaagagctcagcactgcctaaatagcttagaaaaagctgagcagaagcagcaaacacctcacaaccctagactgtaaaacagatcccagccttgaggggcatcttttcaccccatgatggaagccggacccagagaggagaagagatctactccaggttatacagtgagttaatggcaaaattgagcccagagtcccggccatctaggcattgaaaaaagtgaaaactggagagagagaaagacaaatctcagtggcactggagactctcagggttccatggcccagcccttcaatttcccctcctgcctgcacagccctcccctccccctcctgccaagctgccaaagtctccatttagctggagacagcgggcggatgggtgggcgggccagctcccagagcctagggtaattgcctataatgaaagctcccacagcctttgttcctgggagcaactgtacggttgaggttgtgctcagaggtctgtgtgcacttgggagctggtgcccagagacctcacccttccttcctgctaccacaacgggcccagcaagagacctgtcctcccgggagtcactgtgattgcagctgagcctactcctccttctttcctgacctacaagctgcctggactacgagcaagcccaaagcctgtgtgccccctgagctaccaggaatcagtgacttcagcttcagagggagctcttccctgtgtatatgtacatggctgtacatacatgctcatcctgagggcaaggatcctggcaagacaaaggacccaaggcctggagttgctagggtatccctctgccctataagtgataacgttcctgggaaatgggtagactgtagaatgtcaaggggtgacaagcatcgggcatcccagtatcctctggggctccctgcctggcgcagctttgcacagaaggcctgctgcctgctggagggcaggcatgtgcacatacccatcagggaggggctggccctgagtggtgcagggcactatcagagaagaagaaccaagttctaagagggttttcttagccccatggaggggcttagagaccaggacatctctaccatgagtgactaccctttcttggtcccacaggttgcaaactgaccagaaacctggccccctctcccagggcagctggccccttgatggctatgctgagcccctccatgagactgaggagagcttctcctgcatgggtaagtgatctgggggagacttcctcctagggtcgggaggccactgtgctagagctgcctagatggaagaagaagtgacctaggctggatgggtccatctcttgacaaggagacatcaacctgtgaattgcactttgagttttcatcatgcttgactcaacccagggttggtccatcaaacccaggagccttttaggggcagcatagggaagtggccaggggatgcccaggctatgggagtcactgcatgtgtgtgtcatgtgagaagtcctgacacaaaggtaacaagctgggagtgagagccaggttctgagtggtgcccaggttgaaaaatgaaggtgctggaattagggaggcaggccagagccatctggcttgctgcctgacaacacttccccttccaggaccacttttaacaggccactcccacacatgtccccttccccgtgtcatcctgtagtcatgagatatcacctgaggctcaggcatgtgagattcaccaggaagatccctaaatttcaaatacagcaatattcaataagggcagagaccctgacagtctcagatgcatcttcaggtgctcagtgtctctgaataaatgaatgatgcatggatgagtgagtgtcttgggtaccataggtcaggccctaagtgggtcagattcaaaactcagcagcacttacggacgtgtgctgattttcctacaacattaaaaaagtatctagaggatggctatgattcacaccaggggtacatgaggctgcacactgcagggaaccaggtcaatcctttactttcccagacaaagggaaacttgcctcaacaaagtaataaatttccttttcacaaacctgagattgtccagagggcttgtctcccagctttgtcttggtgccctgctccagcgggccaagctggggcttagaacacagcctgaccctgagatcaccggacaggatggtatactgcttctgtcttctctgtgccctgctgggcaggtggccagatatcccttcttggcctgggagctgggaccttttgagccctttctaggcctggtctatagcagtgatcttggagccactgcaaccctaaaaacagagcagcaacactcattcttccatgacaagccttgtggaggagggttatgggttaaggactcagcatttgcaaagcaagccatctccttccacaataaatatacatgcaagagaaccagggcatggcaggggacaaaaggaaaccaaatttctctggcaccgaaaagccatcagaattagaatgtggtaaccaggaaactatgtggagctctatttttacatttgcagttttgttagtgtaatggcttcctcatgtggatgccacattgttagagcctaatgatctccatgcacctaacccagcgctcgttcacgattattatccgatgagttgatgagaggtcttttacttttaacgtctgttgcagactagcattaggaatcccccaggcttgtcagctggaagaccaccctcactggttagatgtgaaactgtctgctagatcacggttgggtacctctggggggacagagtgccggggaacatttggaggagggttttaccagaaaagtgagaaacactggctttctccaaggctcctagggaagaggagcagggttcactgcactgcctctgctctggtgctagctagttgtcatggtgacccatctctgccgaggatacgccgagctctttgatgggttggatggggagagagatttcggatttgcctgccttgtggaagagcctgcgctcttctgagcttgaagaaaacagagaagagaggaagagaggaggcaactgaaggatttcattttatgccttgccctctcactcccaaagtcacttggggcatgacatgactcattcattcatgtattctttcattcaatctacaaaccatcagtgagtgtttgccttgtgctgaacactgtgcttgacactggggtaaaagacaaataagactttgacctgccttcaagatgttcacagcccagggattcactccagtgagacttatctagagaatttgttgggatcccagaagctgtgcccagtgacctgcccctataggggttgacaaggcagccagtcagtcctgcctccctcgctaggccccatggcataaggagggcactgagcttattatcccatttatagaaggagaattgggtgctttggagagtactccatcaaatatttatataattcacagaatccagcatagttatttgacagttattgatcatgttatttccatatcaatttgtagatggctgggggtttgggggcttttttttgaagctcatgtatcttcccttcctgaccatgaactcatcttgccccccatcacctagcacagtgcctggcggtcagggtttggtgaaggtatgatttgaatgaatgagtaaggaatccaatgtaagtggttgtagagctctaaaatttgtcctctatcagcctgtttcttctctaccagctgagaaagaccaaccagtctttctctgctcctttcccaatgtgcttctctctgtcttccaagctcactgaatgggtttggggggtgagtgcagagtctttgagcggagcaggagaaggccaaagagctttctcagccttgtgccactttcttaatctgcttggactctgggcatagagtccaaacaaggctttctagtatttatatagcaggagaatttcccatgatgacttgcctccaacctggggcactggggatgttcttcatatatcctgaaggccatccaccagcagctgctccttctgcctctgccctggggcaagtgtggaaatgcccagcccactgatgtttgtacatgtgccctgaccctccctggcccatctgattctgttggtgacagcccagcactggtcccatctgctgactctccctttggttgcagtcagcactgggtagtgtatagaccaccatcagatcttaatttggacagccaagagaagccaaggctgacgttaccgcgtgcccacatgtgtgaggctgtgtgcaggaggactgggaaaggttgccccaaggcttatgcagattctttaatgacttccactttgtggcatgtttgaatgagcactaagtggacccacaatgaagggatctttttctcatcatagtacgtgttatcaggaaaaagccagagcctcctccctgcctccttctcacacgagggttgatatatagagagaatgggtggggcagtgtggagtttggcctcatactagggctgttttgcttttcttcctctttcttctcccttgttgagctggctccatctttaagccacagtgaagtttttcatgctttatggatttgaaatagagcaggaatagagtattcattctaagagaacttgcaaagctagtgtgcctggggcaggagcaaggaatggtaactactctctgggagagaagtttgttctgggggtttcaaaccaaatccaagtattcctggactacaaatgacttgcatcaaagaacataggaagtcaaagctctaacaaactttatagatctcccaaatttggcctccttttcaatgagggagagatgagactcagagaagagaagtgacttgctcaggactgcataggaagttagcaggtgaactaaaccaggaccactgctttctgactccttaaacactaaaaagaactaaatggtaataatgactatcacttattgaataccctactatgtgcagggcatagtgccaagtgctttacataaagtccttcatgaataccttatataatcctttgaaggtgttattattactctgtgttatggataggaaactcaggctcagaagggttatataaaacctgtctgaggacatccagctaggaggctgtgccaggattccatcccaggcttgtcaaaaggccacactcttctcttactccctgccttcccaactgccgccagtactcactcagtcgcacactgtccaagctcaactcagtctcccttagcctctgccaagcaatgaggaaggaaatgggatcagtgagccacagtccctgctcacatctccctcaatctgagcaggtcccaggatgccactggcatccctgtcactccaaacctatgtcatttcatgctgagttcacactgctgtgttctttgccctctggggacctccaggccaagatgagccttatgtcccagtcatctgtggagagaagacatgcagacaattgactagaaagtagaaacagttcaggggcagatgatattagccgtgttctcagagcttgagcaggttggtgctgttgtggggcagaggtggcttgggagtgcgagggtctctggagactctgttggataaacaaagcagcaatctaggacctggtaggcttccaggaactgggacgtgaggtcataatagcacttgtagcagcagccgacacttaccgtggcttactgtgaaccaggcattgttataagcacctttaatccttctaacaactgcatgaggtttggaatctaactccctacttgccttgcatcacagcttcctcacttgctagctatgcagccttggggaacttatttagtctgtctgtgcccctgtgtccttggttgtaaccagggatgataacagtgctttcctcatagggttttgtgagaattaaatgcatggatattggtaaagcgcttagaagaatggctgatacataagaactgctcaatatgtgtttggtgttatttgttattgaggcaagtgatgttattatcacacccactttgcagatgaggaaactgggatagacaggttaagtggcttgcccaaggtggtctagccaggatttgaacccatgcagctggtcttcagaggtcatgctcttaaccatacgttctatgacctcactggaggggaagatgactcaagtctgggagttctcccagggaggccaggagaggcagtgggatcaccagcctggctctgggaggggctatgaaggaagaggccagataagtaaggtcatccgaggtacctgctggaggggtttgaaatagaaactgtaggagtctggatgctatttctttagaggagtacaggaggagggaggagattgacttttcaagacaatatttggctgggaaggggatttatctcaaggcagtggatttgacccaatgttagccatttcagtggagtggcaagaatagcagaagctggtcagcttggagcctcttttccccgtggctaccttggactcaggccctcccactctaaaaggtgtgtgagtgattctacgtggtttttgcaactatgagtgctccacatatagtacaaatcccttgctctccagatcctgattgtggtcccagaaatcaagaaatcttggcaagacccagcttccctgtttctcgctgcaccaagaaaaccaggacctctgcattgcccaactccagaggaaattcatatccaattgacaatttttgttttgttttgttttgttttttgtttttttgagacagagtctcactctgtcacccaggctggagtgcagtggcacgatctcagctcactgcaagctccgcctcctgggttgatgccattctcctacctaaccctcccaagtagctgggactacagacgtccaccaccacacctggctatcttttttttttttgtatttttagtagagacggggtttcactgtgttagccaggatggtttcaatctcctgacctcgcgatctgcccgcctcagcctcccaaagtgccaggattacaggcgtgagccattgcacccaacccatttgccaattttttataaagcacttactgtgttccaggtgttattctagaagcttggaatacatttgtggacaaaataggcaaagacttctacacttgtgggccctttatgatgtagcctagagctgtgcagtgtacaacctgtgcagctgtacgtgatctacatggtggccctggagaagccccagctctggaatatgtctcccaccctaaggagcaggagcagagctttggcctcatgacattcctgggactataagcaacagcagtctgtgggccaccccccttcgccctgagtgcttgaatagatgaggaaggtgataaactttcccctgtagttttcctagagaattaccccctatacccaatacctacctgtccttgacttggcagcctcttagcagatttttagagactccactctccaacctgcagcgatctgcttcagctcctcctaggaaatcccaaccccttgtttagttctccatgtgtctatgagccatggacaggttctgggaaaaaggacactgaaggagaggtggcctggttgacaggaatctctccagctcagactgctccatacagctttagaggttgttatccagggagctgtggagcagttacaagtttcagctatgggaggcggaactatttgctaaacttccaccactgctgctccctacttctctggccaatccaggtaagcctcacctccagtgcagctctgaagatctggcccctcagatctttgccccatgcctgggcagagattggccagccctccttataactctgaactattgtctccctgggaaggcccagggcagacagagagcctgcagagggggctttatctcaagaagtgctggctccatgccagtcttggccaaggctgaagtctccctccagcaccactgaatgggcagaaactggaacacaccatcccaagaccccccaaacccctttgtaagaggattagggtcccctggtgagagacttccctccccactataaggctgcgggcaggcttacacagaaggagctctggagagaggcagttgaagagagaggtgacacagacacaatagccagagagattaagtgctgagaattaccccagccacaatattcatcctttaaaagggcggaaggaataaaaaacttgccttcctgggtggtgggagtcccaggcttcagagggagctgaagataattaaaggtcaggacataggaaggttcagcaagtgtggagtcatccacgtgagaccagatgagcccagggaggaggggagagcggagaaatgctcagttgtcccttctctcaagaaaatccttccaggagaaggaaatgagagtgtcctgtggtatgaatgactgaggtcagataaataagagaacttcctggcaggaggaaagctcagccccagtggaagtggaaggagaacagcctgaggttcatataaacactggcacagtccaggggcaaaagctgacctcatgagctcacagcatccttcctgctgaagaatctgaggttgcatgcaggcaggagggagcacagaggtggcaagccccttgtgatgacatcaggccctgtgaaaggcaacgttctcatcatggcattggaactcccacctatcacaccaatgaatactcttaacatttgcagagcaatttttatatgccaagtaattgccagtgattattctattaaaattcattgaaatatgagtccatggcattcctctgtgaggtttaatacctcattcaaaaacctaacaaaactctaataaagcacagaagtaccaactgagaaaatgagtgcagccacaaaatgggaatatctttctctctagggtagtaagaaggccaggtttctttaaaccatctgtcccagctggttcagactaagatgggtaaaagcttctcattactttcgcagttgtctttacttttttagagtcaggaatctctttaagaatttgactgatattacaatatatccccccagataaatggacatattcacagtatttggcttatgtttgatggctggtactgtggacctccagaatccagtctgtgaacatagattaagaagttctgttctagggtagtgatgtcatcactgtgttgacaaggtcaccacaggtttgggccttgtgcttttcctcatcaggtttttgggtttgtgtggcccacagtgaattaagaggatttattacagagtaagactatctccaaggtccctcttagtgttgtgatttaatgaccttaaaacaaccaattcttcatggacaggtcaaattaaactctagatttgcccatcccgaaggacacatgctcacacaaggagtttgcttgtccccatccaacacatgggcacagccacaggcacacaccctaccctctccttcctttgcctgcctggagttttccctcaccggcctgcagttgccatgacaactgatctgggtgggtcatggtctaagggcgatgtacctgggtggtgcagagctctgctgaggcccagtgtgcaatatccaccccagtggtgtgtatgggacagttgccatggcaacatacaggaaaagcacatgtgggaaacatctggacttcttatcctgggctctttattagcctgaggagcacagggatctgattttaaatgagtacagtttcagacagagtaccctagattaggtgttcttctgcctttccctactagaagcccctgagcagagggagcagagattctctagctcctccctccacccaatttcttagatgaccagctgtatatattctcttaaggccacatagcaaatcaagaagacaacccagaacccccaaggcttgacattagggaagtcctcagaagaccctgacttgttgggactgtcaggtccactaaaagtggaccaagaccccaggacataggtcatggggctgagctatgaagcgactggtgttgctacagaccaccagctctgtctgaaggattctcctctgccacattctcactcccaggattctgtggggcagtcttaatgtgactgcagtcctagatcatgcagacttcaggtgcagcagatgtctgggttacaggagctcctcagcaggacaggcaggagagtcagggccctccttcccattcttcactcacccttctaatacccagtccccatttctctgccaggatcccagactttcctgctgtggggttctatatgtcttggaatcacatgcagttattatattaagcaagtctctagaaatagctgcatggtaatagcatgaagttatgggaagatgtggaacacacacagacctatattcaaattctgattccaccagcagcctgctgtgtggtcttgggcaagtgtatgtctctataaaatgaagataatgacagcccctgcttcaaaggcttttatgaaatgatgaacattacatgtctaagagggtccctggcaataggaggtgcttagtaactgtaagatcccctgtctttcagttcagcaaggatcagtgagcccttactaactaacctatgtagggcacttaacaattcagctggcagaagaggatatctccgtgggatataagtaggcagaatgtgggtacccagcccctgactataatcagtgggtaggaaaggcagagcggtgtgcgatggggtagtcataaggcctcctggaggaggtggctctgaagctgggccttgaggggagaattggatttgaattcatataacagaaggcattcaggaaaagggcagagcaaagcaaaggtgcaggggtggggtcaggcctggagcaggggcatttagaggaaagcattagaggtcaaagttgtcagcaggtgaagccagagtggggaagggcttgagtactgcgtgttggccagcactggcctctaaggcagccagatagcagaggccaggggactgtcctttcctgggaagccagcgaggtcatcaggtcagagatatgcttctctgcaggacatcatggagttctggctttaaaagaaggaaggtctcaatgcttggagatctggaccccactccccaaggaggggaaggagaaaccccgtgccttgttgtgcactgccagggctcctctgctgagaaaccagtcacgagaaatagaagtcctgtgttctagcctgggggccgggacacttgggagaagcaagtgtccagccctgagaagaagaagcccagccctgagtcagacctccctagccccctgactttctagctgagaaacccttggctgaaggaggggccagttttttggattccagcccctatcctcccctcccatgtctggaaaaggccctcccaagagccttcaaccagtttccactccctccaggactacaaagccccgagaaccctgcctctgaagggagagcctgtgccccgtccccatcccagcttggggggccccggcctccagctggggacatgggcttcaggctctggtcttgtttacttgtgtgactagaggtgacttgttttccttctaagggacctcatttccgaccctgtcctttcacacggtgggcaggctcatccctgctctatccttgccctgttggtgtagaaatttgtgtccaggcagctgtgagctccaaggaatgtgagttgtagcttagaatttctcggcattcccacccttctggaagctcccccgagacggttgagctagagggcagaccgaggcccatgacctctggctccactcccagcctctagttttctctgcctcattttccccaatagacaggaagacaataaatctctctctggagcccacacacctgatctgtagcccagaggaaaaatccccaaccactgaactcagggagtcttctggggccagagagggtgagccggggacctgcagtgtccacagaaatatctcaactaccaatgccctggagaagcaaaggcagtggctgggctaatggaccaatctaggaagtcttcctggatgaggtcctggaggtgtgagccactcagagcatccatattggaccactgtgtctagtgtctccttttttttcagcaagtgggagtgggggatggggctgaagtcccagctgggattactgcctgggctgtgaggataccttgcccacttttccccctgtctcccagaagtgtggtgaaactatccccatgcctctggacagagcagagatttaggggcagaagagggtctcagccctgaatgccccaaggtcattcctctgaagaactggagcttccttcaaaggagcaaggcaagggtctactggcctcactctggcccagggcttcagggaagggagaaaagatgctgctgggccaccatcccagaagcttggcttccattccacacaccagctgcactgtgtcttgccacggggtattaagaggtcactgctgtttacaattccctacacatctgttccgagtcacgcattcattcatttaatcaatcgtcattcaccaaatatttttgagagcccactgtgtgcacagagctgggatgggttttgagaaaaagttcaactgaagatgaatccttgggaaacaccaatgggtgaatgacgaatgacagccctgaacattaggaaatgattaaagtggctgcagtgaactgcgtggggagagtcagggaaggcggcctagaggaggcggatttggcctcaagcggggccggggagaagagaggactctaattctacctccaaaaccagctcctcctgaagccttcccgttttgcttgatggcaactccaatcttagagctgtccaggcccaaatccttgggggacattcttggttcctctctttcccacacacccacatttggccaatagcaaattctaacagcttcaaaatatatgcagagcctgaccacttctcactaccaccacagtcaccgcccagttccaagccaccatcatctctcacttgggtgactgcaactgcttctgcccttgagcccagcaatttgctccccaaatagcagccaaagtggccttttcaagagggaagccaggtcatgtcactctctgctcccagcctaccaaggctcccatctcactggaagtaaagctttgggttgcttaagaagtcccatgttttgggtgctcaaaaagtccctgctgatagctggaatgacatgagggaatgacatggtggagaaaaggacaaaaagaagtggggaacaatggctagagggctttccacaaaggcaggggtgttggcatctgctaggcaggtgatgaggagaccttatggtaggcatctaagcagagaaaacgtatagaaaatgcttgtcactgagttgggcagtgacaactccatgctggtccagagtgagtgggctaggcttgaagagccatgtggctgggttcccagcccttgctctccagatcctgactgtggtcccagaaatcaagaaaaacctcccctgctctgcccttaaccctggaggaagccaagtatgggctcatgtgcccccttctccctcccgcaaatctccccttctcccaaggtcaccttccttcattccttccctccctccctcctttctttctctttttcttcccttccttcctttctctctctctctttttctctttcttccctttattcccttccttctctctttctttctcttccttcctccttcctttccttccttcccttttctttctttttttccttcctccctccctccctccttccttcccttcctctttctttcttccctttcttctctctttctttctttccttctttttctttctctctcccctcccttccttccttccttccttccctcctttcttcctttcttccttccctcctttcttcctttctttctcggagtcttggtctgtcgcccaggctggagtgcagtggcgcgatctcggctcactgcaggctccgcctcccgggttcacaccattctcctgcctcagcctcccaagtagctgggactacagtcgcccgccaccacacccagctaattttttgtttgtttgtttgtttgttttagtacagacggggtttcacgtgttagccagaatggtctcaatctcctgacctcgtgattcacccaaagtgctgggattacaggtgtgagccaccgcacccggcctctttctttctttctttctttctttctttctttctttctttctttctttctttctttctttctttctttcttccctttcttcccttccttctctttctttcttccttcctcctttccttccaccttccttccctttccttttccttccttccttcctccctcgctccttccttcccttccttccctccctctctttcttccctttcttctctctttctttctttctttcttcccttccttcctttcttccctccctccctccttcttttcttttcttttctcttctcttttcttttctttctcggagtcttgctctgtcgcccaggctggagtgcagtggcgccatctcggctcactgcaggctccacctcccggattcacgccattctcctgcctcagcctcccaagtagctgggactacaggcgcccaccaccacacctagctaattttttgtttgtttgttttagtagagaaggggtttcaccgtgttagccaggatggtctcaatctcctgacctcgtgatccgtccgccttggcctcccaaagtgctgggattacaggtgtgagccaccgtgcctggcctctttctctctttctttctttttctctttctttctttctttcttccttccttccttctttcccttccttccttcctctctctctttcttccctttcttcccttccttctctttcttccttccttcctccttccttcccttccttctcttcccttttctttctttctttccttccttcctccctccttccttccctccctctctttctttctttcttcccttccttctctttctttttctttctttctttcttcccttccctctcttctttctttctttcttccctctcttctttctttctttctttttcctctccctttctcctctcccttcccttcccttccctccttccttctttctcttttttttctttttttttgagacagggtctcactctgtggcacagtagtgcaacctcagctcaccacaacctccgcctcccaggcttaagtgattctcctcccaagtagctggaattacagacatgtgccactatcgcccagctaatttttgtatttttaataggaacagggttccaccatgttggccaggctagtctcgaactcctgacctcaaatgatccacttgcctcagcctcccaaagtgctgggattacaggcatgagccaccaagccaggccccaaggtcacctttcaaggtcaatgagctggggacagccttcccaccctctcctctctttggctctccctgacccccagttctcctaacacagtcccaactgacagattccccagaccccccacagacacctgggttacatccgtttctaatcacaggggtgtgagaatgtgatatcacacagcatgcgtctccttggctgtatgcctacatcttcattcctcaaattgctttaagttatctgtcaacagatgtagtcaaatcactcatcctatcgccattccagaaactaccaatgactttggaaagaggagtgggatgatgagctggtctttggggcgctgaggattggggactttcatgttccaaaccagcctctttctgcacctcccctttagaaacttggttactgacttcaccagcacccactgcctgcccagccaggcctctccctcatcacataacctcttcattgatcattgatggtagaatctctcttcagaggacaatttgaagcctgtcattctagagaaggggtaaatggccgagtgggaggggctcagggctgggtttggagataatgtgacagggcaggtccttctctttttaggaatcactcgaggaaccattctgcacatactggttttatcaactgatgctggaatggctgttgccacagcagcagagtgctcccactgcagtagaggatagtgggaaactcatgggatgtgaaaagaatcaaaaaagagccagatagagggagaggtcacattagggagtgtcagaaacttcctggatgccaagatggctatttaaagggaccaccacctggccatagcaagaccctttaaagaatgacagtgcacagagactggcactcaaggggattggcactgaattaacccatgagatgtgcatagaaggtgtcttccattttataaactgacaggtgacatttcatgcaggacagagtgtggagcactaggtttaggtggtagggaggaggcttctcttattgacaacacttttttctcttctcaaaagaagcagaatttcaggagccatttattgaaggaagggaaaggacttgggatttggggaataggatatcccatgagagcatgagacaaggtacagaggaacaaagaggaataaagacaggggaagggaccaggccaaaacaccagatcaaatgagacagcaagataaccaggaaggcaggaaggaagatctggccctggggagggggcataaggtgacaagcaaatgcaagtggacagagcaacaaatggaatcatgtttcgcagcagttctaaagaatttgagagcccattactgggtatatacccaaaggattataaatcatgctgctataaagacacatgcacacgtatgtttatagcggcactattcacaatagcaaagacttggaaccaacctaaatgtccaacaacgatagactggatcaagaagatgtggcacatatacaccatggaatactatgcagccataaaaaatgatgagttcatgtcctttgtagggacatggatgaaactggaaaccatcattctcagcaaactatcgcaaggacaaaaaaccaaacaccgcatgttctcactcacaggtgggaattgaacaatgagaacacatggacacaggaaggggaacatcacacactggggactgttgtggggtggggggaggggggagggatagcattaggagatatacctaatgctaaatgaccagttaatgggtgcagcacaccaacatggcacatgtatatgtatgtaacaaacctgcaccttgtgcacatgtaccctaaaacttaaattataataataataaaataaaataaaataaaaggatttgagagggactaacctacagacatgggtgtcagagatgagggaccaaattaaaccatgggagagggcaccaggttttgctcacagcagaatacactgggtggaatgtgtcacagtgaaaatatacacagtgaaaataagctttctcagccaggatggtagccagtgaatttccctttgtctgctaaggagaagatgaatttacatgcagaaagaggatatagagacagcaagtaagagcaactgtaacctggtaagtcagagaataggtgttgtcggattctcaaattgctatttttaggaaaggtgtggttctcatgtgattgaattaggggcatcttgtataaattagagaatgaccaatgagtaaggatgaggactgtagaagtgatggcttgtgacttcattacaagtaccctgaaggatggggtaggaagagcatggtcatgcttactcaaagatttggcaccaaagatggggcttgatcccttgcttgagctgggacctcatgtttggacataagcatgggtacttcgtgtgtgcccagaaaagaaagtcccatgattggcctcatcctttgggcactctctgtgccttggccaagttctggcatgataccactcacattcctttaaccagttcttcactgcttgtcatttcctatctggaaccacgaaccctagttccacccctgagtttcctaatgctcgacataagcctctgaagccaatctgcattgtgcattgcagatggtacagaatcctcttgtaaacctgtcctccactcctcttgttattcttataattggaatatatacacccatgtctgtctacctgagatgaatgtgttgatgtgtgtgacattgcttttttcacagggacaggattattattttcccaagtcttgtattgtctaccttgtattccctgccagacaggaaatacaagagtccagagttcctcaaggacagaatcgccacctttttttctatgtctccaagacagccaagagtccatgcttcttaccaaacacttctctgcttgagaactctatattctcgtgccacttatcctttctgctatgatccctgtcacggcagattttatggcatctcaatctggaaggcagagagtcctgagataacaccagaacccaagagtcatgcagggtacaaacccagcgtacagtgctcaggcctccaaatccatttaaccaacagagttgcaacacctgctccatgcaaggtgctgagtgacacagttctacacccggagagatcctgcgctggcgggggagacagatagagacacaaatacatttcacaccaggcagcaggtgatgattagtgttaggagagtgtgtgaaccatgagactcacacacagcgttcttcagattctaggagaaagggaggaaaggagctagagagatggaggttgggtttggggtggggagataatctgatggttagacattctggcaaaaagttcttagggctttataatccctagagtgtggctccacctgggcctacccctcctggagcaagctttgctttcagagaattcccctccactttctcctgagagccttttgctcaggcaacctggctgtgacttgggaggccatttgaggatgggcagtgtcccctctactgaggtacagtcctaggcaaactgcagactactccatctggctcttgttccccctccacctcatccctgtcccctgggtccagttaggaggaaaggaagaagggcttgggaaacatcttttaaaagcactctgctgctctgcttaactctggcaggcaagggacccagtgcaaagcctcctcttgattccctaggtttgacacaggcctttacagttccaaagcccttctacctgtgaagctggtattataaccactataaaagaaaacagaaccagaggggttcaatgactttgacaaggtcacattgctaattggaatagaaacccagtttcctgatctcaagagttactccttcccctacaaagccctcagccccctccccagtcaacgctaggccccttctctccaagccacccgtgtcctacccccatcccctacctcctgggctcaggagggcaaccttgagcctcagagactgaagtagggtgggactgggagtttcctgggggaaaaccaaagacggtttggggttgggggaggggaatgagcaccctggataccattcctccacccctctcccgacatctctctcaggcccacgggcccactttccctcccgcattctgagccgccctccctccgtctcttttacctgcacctccacacctcctcaacagatctttatcctggacacggcagggggtccccgtgccctccgagaatccaagaacccgccccgcttctacgcggaaagctgggagaaaaactgcttttcctttatttccccctaccccccactcatccgcccctggagctccgctcgcagatacctccccctcccgagccagaaatagacacactatctctcccccacctccctccccgtgcgcacactcgctcccctcctcctgtttgctccccgccttccccttccctccttcctctgctcggagctgcagcctgcagcctcgactcgggctggctggctggctgagtgcggccggggcgctgcccggcagtgcggtgtccacgggactgacaggcaggcaggcaggccgcgggctgggatccggacaccaaagcaaaagcaccgctgggcgccggaggagccgcggggcttccatccttcctttgactgatttttaaattttaatttgtattttccccgccgccccgccccttttcctccgaccccgccctatcgctccccggcttccctgctctttcctttttcccggcttccttcctcgcgtttctttcccctgcgccctcggcttgcctctctccctcctccctcgctctctcccccttctctccccttcttcctcggtttcttccgtcctctctctccccctcctcctcccccgcctcctcctcctgcgctcccgccccctgccccctccccccgtgcctgcagacgcgcggatcgtccatgcgctcctcgcgggcagaatgctgggcagcagcgtcaagagcgtgcagcccgaggtggagctgagcagcggcggcggcgacgagggcgcggacgaaccgcggggcgccggcaggaaggcggcagcggcggacggcagaggcatgctgcccaagcgcgccaaggcgcccggcggcggcggcggcatggccaaggccagcgcggctgagctgaaggtcttcaagtccggcagcgtggacagccgtgtccccggcgggccgcccgcctccaacctgcgcaagcagaagtcactcaccaacctctcttttctcacggactccgagaaaaagctgcagctttatgagcccgaatggagcgacgatatggccaaggcgcccaaaggcttaggcaaggtggggtccaagggccgtgaagctccgctgatgtccaagacgctgtccaagtcggagcactcgctcttccaggccaagggcagcccggcgggcggtgccaagacccccctggctccgctcgcgcccaacctgggaaagccgagccggatccctcgaggaccctatgcggaggtcaagccgctcagcaaggcgcctgaagcggccgtgagcgaagatggcaaatcggacgacgagctgctctccagcaaggccaaggcgcaaaagagctctgggcctgtcccctctgccaagggccaggaggagcgcgccttcctcaaggtggaccccgagctggtggtgaccgtgctgggagacctggagcagctgctcttcagccagatgctgggtaagtcctgccgccccgccccgccccgcccctggctttctcctaaccagctgctggggaaggtgtggggaaagcgaagccccctccccttgcgccttcccggagggccctcctgttcacgatcaggctgtgatgggcattgcgcccagatgtgctgagctggcccacctccagatgcgcatggctcaagtgtaccttcttaaagacattacaggcgggaacccgggctcgactctggcctgcccgaggtgaggctggacaatgggatggggggtgagggggttacaggctctcagaaatagagccagaatcccaatatggcaaaacctgggactggtggaaacctccgttgtggtgtggcctgcgcttgacaggagcatcccgcattgcaaggggagcgtccagcgagagcccggatctagaggacagatgtgggagagcagatgtgagggctgattggccccggaacacagctgaggctccacttcctctgtggatcccgagtgggagcgcaagtcggatttccccgcggtgtgaggattctggctaaaagaagcgtctagggccgggggcgggcgggctgccagctgtgcgcatctgggcgcatgtccgatacctcagccccggctctggccccaacccctacacccgcaggtcttttagggcgtgtcgaaagctctgggcgttagcgccgagactcctgtttgaccgggaagcctttgccctgtggctaatggaagccgagcaggcgggaagggaggaacaaagcttgctcgagtggaggaagcgcgcagagctgttccattgttctccgtgcctgaagagtctatgcaaaaaaacccgaagcgggccccggaactgctctttctctccccggagagcccctgccctcagagaggaatagatctgggatgtgccggacgccaggcggccatgcctcgggaactggcacgggccctcttggggccacggaacaaggacggtggggcctggtgcccaggcgagctgctttggctgcgcggacttgttgcggtggctgggttgtgggtcctccggcgccgagggacccgagcttcctgggtacccggcaggctgcccgcccgctgggggctgggaaggggcgtgccaatgcgcgtgtgaaagggcggggccgagtgacgggcttggtgggtggggaacatgcaagagctcgccgggcggccctggagaatgcgaagccggaggagaccggttcggcctgctgcagtcttcctaggaaccctcgactcctgtgtgggctaggatgagggtcctctgacaggggcaaggatttgggcctttggagaaccgatccttacgcaggaggccgcaaatgggctttgcaggggcaatcaggagactggacaagggcaaaagaagagcagccttttcccctgggagcccctcctgaaggtggggatggctgggtgggtgcggaagctgaccaggcagcctcactctgcaaagggaatgtgccacccggtcctcagtgtggggctgagcctgtcaaaggccctgcctcagtgaatggggcaagagagacaataagggaaaaaattaataaatttttggcaggcaccatggcaggcaccaaggagggatatggacaaaatgcaactggcccatgtgatagagagccctgctgagggactgaaagcagggtgagagaggaagggaccgtgtgtgtgtgtgtgtgtgtgtgtgtgtgtgtgtgtgtgtgtgtgtgtgtgtcagactgagagagcgacttggcgagggagggcaagggagtatcggggcacagaatagcagaaggcacagaacccttttcagggtcaaggctttacttgttggggataacttagctggtctgggtcctctccagacctggatgccctcacactgtcccagaagctgactgcccattgaagccctcttagttgctcctcaagaggagccaaacaggtctgagctggctagggagatgggaggaggggcaggagtggggaggagggcaggtgcagggagggcgagagaggaggagaagctgagctgtggtcccttattcctgcttagcagttgtcacttctcaaagcacactgacactttcagtaacctcggaagtgaggagagaacacctccacttcccagttggggaaatgcagagtcaaaagcattgagggccttaaaggcatctatgagttcatggtggaagggagattccacattgatctcctgaggactaagtcgcagctcttcctaggagacctgattgagagaggaagagtcagcaggcagagggacctgcccaaggctatgtctactgggtatgggccaccagaactgcctcgatgaccctacagagggctgaggggcttagctctctggggtggggagagaagggtggaaactcccaaatctgcctgtctccagctgagaggacccaaagttggggggtggggagttggttcaggctgtagcaaggcagagcctggtgtcaaacagtggtagggaggaaaggaggggagttggtgacctccaaactaagcttttccctgtgtgaagggcagagggtagactgcctgggggaggggtagagggagaggaactacagagggaattcgtcttccagagccaatgatggtggtgttcaggtatcagacaggccctcagtgtacagcagggtggcctctggggagaagaatggtgacttgatgtttcaggattgtgattgaagacactgggcatttgtccccacctcagtggggctcagtgtccagttatgttcactccatagtaccatcctagatccaagaggctgccaagaatcaatttctgaggcggagggagggggtgggagtgaggcagcttcaagtcagagcctttctgtaataagagggaaggactgaaacctgatcatccccttcccagaaatcagctggggtcccagatggtctaggcaggctccctgtcccttcgctaaccttggaagctgccaaataactagggccccactggggaaccctagcaacttggaagactgaggagtgagtaccgagggcaaatgggctaattccaggaattagatgcctctggaccctggcccgatactcacatcaggcagtttggctccggaagaaaggccacaaggcccttggcctgggtctgggggctaagctggaggctgcattcctgagttctctgtgtagaagtcctaagctctgtgaccccctctgggactcagtttcctcatttgtgaatggaagagaccctcccatggctcatccttaccccctagggatgggaagggggtgtagattaaggtgatcagacctggaaaatgttccaagtggcttaaagagagcctgtattaatacagcgcaatagaatacagatgcacctcaatttatgatggggttatgtcccgttaagaccattgtaagttgaaaatattgtaagtcaaaaatgcattgaatacacctcacgtaccgaacgtcacagctcagcctagcctaccttaaacgtgctcagaacacttatattcacctacagttaagcaaaatcatctaatataaagcctatttcataataaagttgcatatttcatggaatttattgaatactatactaaaagtgaaaaacagaatggttgtatgggtactagaagtatagtttctaccaaatgtattactttcatgtgatcataatgccaaaaaagcagaagccgaacaatcacaagtcggggactgtctgtactatagtaacaccccaaatcttcctacctcatcttccctggacctgaggatctcaaagcaaaactagtcttttgacactccaggtgttcatgttccttccttctgtcctccaggaaaagggggcaaagtgagacagctaagactgcccaaggtcagggagtaaaagaacccaggaacctggacttcctagtccctcttcatctcaaaggtgtctggacccacacaagcggttgtcatgacaacagttaggccttctgaagtgcaggccaagtagaaatgaggaagaaaggcaggaagctattcatttctaagccagttgattgatgtgaattttttgggggggaggggcagtgcaagggggtcgctccagtgaatgtgctctgggatactttgagtagcaggagaaagaaatgtgttcacaaatacttcgttttcctttttattcagtgcattgtggggctggggtgggtagagaattctccaaagaactgccacccagaacagataggtgatatgtggaaacttatccagcaccctcagattccctgaggcctagcaggagagtgaggacaaagctcactcctgcccttcctctgggcagcagcagtagtgatggaggatgcttgtggaatcacaggcaggaggaagggctgtggcaaggtgcagcagcctgcaggtttgtgtgtatgtgtgtagagaaggcactggcacaaaaccttggagctgtgaggcctcctgccttcctccaggttggtaccaataatatttcttttctcaccgtgtccagaaagttttcttccaaggctaggcttgggcccccacccaggtcatgttcctctcctttgggcattgccttgttctgactgctgcagtcaaaagctgttggctttgactcacagcccatggctctgcctctgagagtaccgcatggatgaataagtaggtcctaggggcagttcctctgccctggggagaaggtacagatggaggagaagtacccagagctactctggctccctgaaccttaagccaacccagggagataccctttaccatccatcactgatggctctaaccccaggccacaggccccttctagacctgcattgaatgggtagcaggaccaagtcacctggagtcctgggatgtttcctgacactttcttcttgtttcaccccttcccactttctctgcccaatttgatactgtggctgcaaatgcccaccccctacctcccaccccctaccacccacccccatcacaagctgccaacaccagatccttccccttctgctgacctccaatcttgcctttctctgcagctatccttccacacacatataccgcacctcacagcctctgaccctgagggtgaaggtgcaagctgctccacgtggtgcaagggagagccagtgctgtatggagcaggctgagcagagccctcagggtccataactgcagcttagccacctctgcagcacactgcaatgtcttcctggatagccaagtccctttctctctgcagagcgctccatctccctcacccttccctgagatttcatagaatcctagaatggaaattgtctagttgagccactacctcaagccaaaattaatcccactatagcatcataggcaggtgggtgttctgtttacactctcctagtgacagagggctcactaccttattttccaggaaagcactcattattagatagatatttcttctgttgagctttgattctgtcttctgagaatttctacccgtgggtctgaatttgctctctggatgcttacagatgaagctagcctgcgtttcccaggatcccctttcttatatttggggtcagacacctatctatgctccattcgtcttttctgcttttgcctcttccttccatttttcttccatttctcttcttttggaacaagacctgataggagatgtctgacctgttcaccctgactcacgggcccagtggagtccagctctccacctggaccccactgtctgcatctcagagtggctccctaccggggacccacagcacctggctggtctttctcctggcccaaccaggaagctctcctccccaaagcccaaagcccaaagcccaaagccttctccctctgcctggaaagcctgagccagccaacaaggggaaatggacgccacatgtttctcatttgcgctggctgacctccccccacaccctgtttggattacccagatgtgtttgatgtcccagagcctgcggccttttctctcatgcacaggaagggccgggtggggaggtagggggggccaggcccagctcactggccctgcgtgggcaggttccctcctataggaggcagacatcacctcccacaccttcccccacactgctgcttctggggactgggcctcctgaaggaagcaggacaccagcgccttcagggttcagctcccccttgttcaatgaaggcaggtctttgcttccttctgacccacagagatcgggggcagactgggaagatgccccaggaactgttttgatctcccatctggaggctgagggaggagcagagttgcacttaaggtgtgtctggcatggctgtccagtgtgggcacagcagcgtgtgcctgggataagcagggtgacccgcttttcaccatggtgctttgcaccttctataagcaccttttttttttctcagacttgatgcctttggaatgtggaggggtgtgttgcataggtgggaagctcccattaggggagaatgaggacccattgggagtttccagattgctccagcccattctggtgctgaggtagagatgggagggcatggagagcagcccatctccaggttcaccccctaagagctttggctccagcaggccccaggctctccctgccagcgctgttgtatgttgcgtgtttgacacacacttctccaactcagctccagccaaacctcagcaaggcagccagggctcggcagggtctgggccttggcctgagccatcctggaatctattttagacatctcaatgatacatttcagggccactggagtgggtggtttctccacagcatcttctaatttctgggcgacagctttcactctgggcttctcagggtgctttctcctgtgagttagaggtgtggaaagcagggacaagtgcagtcccaagccccagtatgctgtgtgtgttcccagcgttggttcttatggaatctcagagttgtggtcaaggttatccagttgaggtgttgctgttgggtgtggtctggtctgaaaggttgaatgttataagctccaggtgtttccatggagagctgggctcataaactacgaccttgggctgagcaggaagatagcgaatgttgagaaagcaagactgaggcaagtatgacgagagctattgggttaataggttgtatggcacatggcacaaacccctagaactcgggtgaggttgggtgtcagggtgtgaagactaagtgtgcagtgaatggcatgtgttcacatggatcagtgcatataaacaaactcaccggcttgcagcacatatgcacatactgaagggacatttgcgtgcatgtatatgtaacagctgggcaggtttaaaagagtctgaaatatgaccctggtggaacagcttcccccaaacagacccctaggcagagcccgctggggtttggactccttggcttctttcccagaaaagcactgtaagtgctggttactcctcagactctgaggacacaggcccctttgcccttggtgacccactaaccaggcccctcccttttggggaagctggcagccacccagcaggccctgccttctctctgtaggatccctaaactgtcatggggtctaggattccaacatccccagactgaggctgcttcctaggagctcctgggacctgattatcccaagggggaaatgaaaagctcaagaatcaaaagaatcagtaatctaatggttatcaataacatgtatcaatcacttggtaagtgaaagtcattgttcttgttcctcaagccaaaattaatcccactatagcatcataggcaggtgggtgttctgtttacactctcctagtgacagagggctcactaccttattttccaggaaagcactcattattagaaagatatttcttctgttgagctttgattctgtcttctgagaatttctacccatgagtctgaatttgctctctggatgcttacagatgaagctagcctgcatttcccaggatcccctttcttatatttggggtcagacacctatctatgctccattcgtctttctgcttttgcttcttccttccatttttcttccatttctcttctttggaacaagacctgataggagatgtctgacctgttcaccctgactcacgggcccagtggagtccagctctccacctggacctcactgtctgcatctcagagtggctccctgccggggacccacggcacctggcggggctttctcctggcccatcacttaatactcacaataattctatgatcctggcacttacaagtgaggaaactgaggcactgaaatacaggtaatctggccagggaaagtggttcacacctgtaatcccagcactttgggaggccgaggcaggtggatcacttgagctcaggagtttgagaccagcttgggcatcattgcaaaaccctgtctctactaaaaatacaaaaaattagccaggagtggtggctcacacctgtagtcccagctacttgggaggctgaggtggaaggatcacttgagcccgggaggtggaggttgcagtgatctgagatcacgccactgcactccagcctgggtaatagatcaagaccctgtgtgaatacaggtaatctgcccaaagccagtaaagcaagcgagcaacagagctaggatttaaacttaacccctatggtaacctgcctccaggagcctcaagactccctcaaacattgagtctgattccatttaattcaggagcaacttgtcaagaagttagtgtcggcagagcactgtgcttcctgagactgaagttctgggccctgcttactaggttctgaaaggctggatgaggagatagaagtgtccaggctcattccagtacaagcagaatgcagcatgctgcgaagaagccagaaagggcaactgagggctcggccagctggaattggcatcggtgcatagggtgtgtgggggcacatgtgagatggtggggaggggacatgctacagaagtgatgtgagttttgatagaagggtgagattctggcagtagaggtaaaaaaaactagaaaaggaagggaggaggaactgtgggcttaatggcaggtagtgatgagtcctgtctggcttagagagatggaaaaggtggtgaaagaggagatgagatcagaaaaacaggttggggtgggatcatggctgatccgacatggagtgcactgggactcaactgtaggctctgagcagatatttgagtggaagagaccaatcaaagttcgtccccaaaggatccccaaaagagtcctgtgcccgctggtccttggagatgttgctgatcgatgagatcagccagccagggcctctcaagtttcacatctgtctgctccagggaagattattcttgcagcctatgcagtgcccacatgggatggatggagggagaggactccttcagcctccatgcccagaggttggccctctgagagggtaggggcaccccttatcctaactcttagcctaaactcaagtcttcatcttcctctgttcctttggtatgccaccaggctgttccagttgccatgccctgggaattgattaggccctactgtgtgaggtgcagtgctctgccctgaccaagagttgttcctccactgccccagccctgggaagtgctctgctgaaaacagtcccacaacccacagcaaagcttgaaccagactacctatagcagaaccaagacattaaaccaatttgggactagacaggggagcttttcaactgcacgctattcagtggcaggcataagtggtgtggtgccacgtactagctctagctttattgtttgatccaagaagccttcctgaaggagccggaagttggggaggaatttaaaggagttttaaaggaatatttataggaatcagaggctgagcacagtggctcacacctgtaatcccagcactttgggaggccgaggttgtagaatcgcttgagcccaggaattcaagaccagtgtgggcaacaaagcaagactacatccttacaaaagaggtttttaaaaattatctgggcatggtggcttgtgcctatagccctagctgctcaggaggcttaggtgggaggatcacttgagcctaggaagttgaaactgcagtgagctatgattgggccactgcactccagcctgggtgacagagcaagaccctgtccctaaaaataaatgaataataaataaaataaataaaggaatccaagacacttggcacaatgggagaagacattccagttatccagctttgtttgtttgaaggtaggagaactagatggggactagctggcttggagccctccgagcagatggtccttcagggagtgaagacagccggctgcgctggggtaggagagcctgtggggagtgagggtttcccttctcctaaactcaaaccttcatctttctctgttcctttaagatgccactggctgttccagttgccatgccctgggcattgccatgggattccattgctgtaggagtgagaatgttttgccatagaggatctggttttgccgtggagtccaggtgtccctaggagctattgtcctagagttcacaggttgccatgggtgtaggtactgtcctgctgtcttcatgctcccacagggccttgatggtgacgtgatgtccaggggtggagcatttacagcatggccttcctgtcatcctgcccatgactgcagcacccaggaaagagagtcacaacagcagggaaggcagcagagcctatttggggtgggggagcaggcaggccagtgctgctgctgctcccactgccacagtggatggcagcagacatgagagtggccttcctcagctgtagtggcggggctgagaccctgcactgcctgacactctgcctgcccagtggggtttgcttgctgcttgacaggcagcatcgagaggctgttgctgctcctgctgccaccatcaagggacccactgggctcctaggagcaccagcgtcaggcctccctacttggcaccccaggactctctgaggtttcccagcccagcctgtagctttgggaccactgagggcctgctgcagggtctgggctccttggaagggaacacttagcccctgagactctaatcgaggccatgcactccacagatagttcaggcatcttcatcctgaggacccgtgggggaccatttaacactcacagacatgtctgagtcactggaaatcagcaacaataaggactaacatttattgagcactcactgtttgccagctgtgctagcgctttgtttgcgtaaacccattttatcctcacactgagatattaatcaaggatcatatgcaaaatatttgacaaccctcacaggtttcagagctggaggagtcctgggggccccctgttaactgtggttgctggattgtggaggtcccagaggaagggcccaggtggccagggtggcagggggagcacatgagggctcaaaaaagcacctatttgactactgtaaggaagtgtttcatattttttagcaaccaatatggccttattggtgcatgcttgttgacttgttgacactgttatataagatttaggtataaggaagcttaaggaagcctaaaggaggctaagcaacttaccccaaaggaatgtggcaagttcacggtcaagctaagcttaaacaaggcttgattcaggctcatgattcagccgctagactctactgcctcttgcacaagtagcaactcactgctctccctgccctcttgatgttctagaacccttgcactacatcagtctagcaatggtccttagagcccaggcctataggaatcggttctctcttgccctccttagcattcctcgagagtcagtatctgccaagtacccttcctcccaagcctctcactgtctagtgtaggaagcagacccacagaggggtggttaggatacagtatcatggctagtgctggacagagcaaagccctggagcttcaagaagagcctccccagatgtacaggaagaaatagggccaaaatggctgggatgaggataactagaatggtctggaagagtgggggcctgaaataagctgtttgtctgcctctttttgactgggaatgctggctctgtcactcactaactgttgatcttgaataagccacttaactgcctggtaaaatagggattagactccccagctcccagatctgggagactggatgagatgctgcatgggaaaggactggtgcagaggctggcacatggctggttctgcagatgtcagccccatcagcatttcagggaacgacttcccttttactctcccctccgctcaccctcagcctgtagcccctgatttctagactagatttcccagagtgctgcatctagcgaagaagttagcttcttcatggaagatttaaggactcgtcataatatctatcatttattatatgttatgcaccaggcactgttctaagcactttacacgtattcagtcatttaatcgtcacaacaacctagtggattaggtactactcttatcccctttttagcaatgaagaaactgagaggttaagtaatttccccaaggtcacacagccacgaagtggagtctgggtatgacccccaggcagtctggctccagtgacctgcctccttagccactatgccatgaggcctctctccagtggagagcactggcattcttgcatcccacaggcatcgtaagccctgttgggcagcagcccagatcttttattctaaacagggtggacccactctgacgtttcctataagagtttagtggcacagggaactgagcctagaacatccctggacccacttgggtacctgccgcaggctgaggacagtttgtaggatctatggctgatgcacttttaccactacctgtgtttaattctgcattctgcacacctatcctttaggtcccaaagggccagtatgtctgctacaggggataggtgtgcaccaagactctggtgtctggccttggcctggagccctagtgtctctgagtccctgactgcctggggcgatagaaggagcaccagctttggagtcatgagtgtgagggttcagatcaattccagtgcttaccagctggctgtccgtagccctctttgcacttactcctcatctgtagaatggggcttgtacccacagcagggggggtaattatatggattatctagaagagtgagcatagagcacctggcacaccatagatgaccagtaaagctagttctatttccacttctcctgcaggcctgcagacaccctgtccttcctcaccctaaccaccatggctctggagaacctagaggcgactagtgctcacaatgggcttcattcacagaatggctccagccactgactttgtttcaattcagccctgatactttagcttagactcttggttgtgcatttacaagccccctggagccagcttaaacaaaagggagagtttattaaaggaaccagccatgtttccaggggaaagggacgaagttttctatgcctcttcacatgctctgcattcttgctccctctgtttttctacacatctgattcttctcctcttgtaccacagactggctgcttctgcccccggtccatgtggcggaatagggatgcccatggtttcatgcctcctctgtccaagacatcagccaattccccctggggcgaaggggaacggtctctgattgacccacccatcacaatgagagaagaaaacattctccagaagttgcctttggcaaaggttttaaggttatatgtcagcccagtggttgtttagactgtgatgaaaagaaaatagaagaaataatatggaaaaagtcaacagaccgtgagatgtggagaagattatcaaagggtagcaccttatgttcgagcccatgacccatttccaatccttagcctgggcctggctcctgttgagatcaaggtgaaaactggccatgtcctcatttctgggcagggatgaagattcaggcctgacctatagctttaccttggatttgtcatttccctctctgtcccgggttcaatgaaaccacctgctctgttcacaatctctccattggccaacaagccctctggtggtcctccatgcttcctcccagggctgaggcataaaatctgcctcagtggcctgttatcacacagctgggaggacatctggggaggaacgaggccaagacatcctggttccttctcttctctcatgggggaacaggtggatgggcttggtgctgatccattatttcccacaagcatggggctggagctagggtattgggttgtggggagggtcccctgtttttgccttacagggtgggatgttccatgggggaaatgggaaaaaatttgccaaagaggatctagccctgcttctgagccagaggagcccagcctggacctgggcctggggcagggggtggattcctgccattttcccacactctgcatagagattggatttcctgttgaaattgtatctttggattacaatcgtaaagttcccagcttctcaactcaagctgtttgcagcagctctgtgtagcctaagtcatcgtcattactctattgggttctgggagggaagatccggagtatagtggccaaatgcacaagctatggggtcagagagacccgaattcaaatcctgattctgtttgagaccagcctggccaagatggtgagacctcgtctctactaaaaatacaaaaatttgctgggcgtggtggtgcgcgtcttataatcccagctactcgggaggctgaggcaggagaattgcttgaacccaggaggtgaaggttgcagtgagctgagatcgcgtcactgcactccagcccagggacagagcgagaccatgtctcaaaacaaataaacaaacaaatcaaatcctggctctatattaactagccatgagattccgagtcaattaacctccctgagcttcaggttcctcatctattaaatgggtcaaataatatctgtctcataggattgctatgaagattaaatgagataatgcatgtaacacactgagcacagtgcctagcaaatgaaaagcgccccaaaattgattgttttatattactatctcattgttatctacccactccactatgtgggtttatagaggaaggagtcatggcctctgcccttggcagctccctgtcctgatggaggagacacagtgctgcactcgacaacccactggttggttggaggaaacatgggtcttgcctcagggagctcccattttagtggaggagatgagccccagcctgttcttcctgagtcctctattttcctggatccttgctcatgagccgtggtatgccctcagcctgcccctctgccaccagtccacccatctcctcccttttcccctgcagccaggcctgccatctctagaaagcccccatctctcctttctgtgtccttgggcccaggtgtccttgggttactgggtgacttgcttttcaggtcctgcctgtgtgtgccaagcttgttctcaagaagcatctccccaggatgctagttcctctctaaacaccgcccagattgcagacacaaaaattagacctgtcggtttgcacgctgtctgccttaaatttgcatttgattaagaagcaccagcgtcctcccacccatggttcttccttcccaaccttcttctctttgaagtgctccccccgcaccctgccccaccattctcccagctctctccctttgctgtgctcaggaaatcctccagttgggctcctctccgttgcctcggccactcccgcagatctgcttggcattctctgcttctggcctcttttccgaggccagctctgcagagtttgcctgggtacaatgtgttctcattgtgcctccaacagtgtcagttcctggagctcactgtcaggaatccagcagctggcttagaaatcagctgcctttgctgagggctcatggagatggggtgaggcctatcctccatttctgtccgcactagccacaagcactagctcatgtaggaaaccactagatgcagaataatctttgaaaagccctctcctctactcttcccatctcagtctctctctggaggggtgagggcaagagcaccccaccccccccactgcccaccacctcctgaggtcagctggatcaccttcactcctcccttggctgaaagacaaagagagggtaagaccagggtgcttcttagaacacctggctcctttactgcagacacacctttggagaatcatcattaagatgactgaattgcctctgcctccctgcccactcccagcccgacagtaaacctgctgctgcttggagtttttctaccatctacgttgcatcctccctcatctctcaattatctgtgctagtgttaaaaaaaaaagccattccatctgcctcaaactgctcttcttaagattttgggatagcagttttcctcttctggtttccagtcacttttgactatgactggtacccattttgattccttgaactcacgtgtaaaggaagtgaaggagcagggagctccgagggagtgggcagctgaaggccactcacccatcggtaagtccctctgaggtcagagggagcgggttgccagagggaatgagccccagaatcccaccattctcataaacagcccaccgctctaatcgctccttccccagcaacactgggcctccgatctgcccatggagaaggctgggaagccagcacctccttctccatctctacctccctcttgcttcttggctcccatatgttcagggaatgcaaactgacactagtatcagcctgagccaggcataattggaaagggaatctttccccacccccaaccttgtcttgcctccctccttacaaaaaaaaaaaataaatcatatattatctcaagcagctctgttatgtaggaaacataagtctggaagaaaagacagatggggtgggggatggtttatgagggcggtcgagcaactgtcctttatatccactgaggagagatcaggagaaaatgatagtaacaagaagagcaagaaggactgaggttagactttaagaacttgcctttatgataaataagagccaggagtgatgggcggaggaagccagggccatctccctccatgcctatctccccagcagcccacatccttggcttactgcctgcctggaagatgttacctacctgtaccctgggggagaaagagcaagtgggacagggctgctgaatattctgcctttctcctgggtgggagcggccttccctcactctcagctccctcctggcctgcaatttcaagggcctgcagattcaaggacttggggtttctgggaggcagggaagtatggggctctgtgtgggctccttggcagaaccagcaggcagccaccctccaccatgttccgtggtaggatttctctcaacggaattaaaaaaacaagagccaagaatagaggcaaggacgccatgctccctctccatgaagccaggcccccagagaggttcaagacacctctgggtcagaattcacctgagagtgtgggcgcagctgaggctgaggatgtcccctcacctctgattttaatggcaagccacaacatcacagcatcaaagctagatgagttctgagagattaagtgcaaactctttcattttgcagatgaggaaactgaggcccagagaagaacagaaacttgctaaggatcacctggggctcccctgactcctggtgcagtgatttccccactaaagtttaattaagccatccccttccttaggctgtaaagttaggatgccctgactgggcacacacagctggttcttgaaacaaaggagtgggctaagtgctgttcccaccctggcagatgttctctggagctgatggtctcctacagacagggaaggagtgggtgggaccatgtcagagccaggtgggatcatcatcccatcccatctgacagatgaggaaaccgacatgcccaaaagcaaaatttgcccaagtccacccagccggtgagtggcagatcagagaccccaatccaggtctcctgccatctattcctatcctgtgattcttcttggttcttattttagacagtggacccggggaggaggaggatgcgctgcctatcacagtagcacctcagcaaacagctgctgttggcctgacccatgaatttttaaaactgtctgaggttttagggtcaagtaacaaactcacctctccctccctgtggcttttaagcctcataaatatgcttttaaaagtcactccgcagttcctcccacatacagagactcacatcatcgctcagtgaaacctgaggggtggtcagagctgctttctatggctgagggtggtggttgagggatcctcttctggaagatgccccaagtgtagggacatgcccagaccttgatgttccagggtggaggccctcaccacgcatctgatgggccagtctcactggccagagtcccatcacaggccatggccataggccccaggaaattctgggtcattggtgtcagcttgaggcacttgaaaccatagcgcccatgtcttcctcctgctgagggatcctggggcccgggactgcctcaggtttccccttgagaaaaattaaggtggtgacagcagtgggcagagtatgaagtcatatctgccaaagtccaagcccctctctcaaagagcaggccagcaaggagggtttgggatttcagccccagatctaggaggctcccatccctccgcctcctgccaccccctaccagcttcctggcacccctaatctgatggctttagcaggctttgtactcaaacgggagtgagctttgcttccacacctcttaaaaggtgattttttaaggatgaaatgtgatgttcgttaatgggcaccttaaaagccttggcacagagaaccgtgtgccatggactggggcatgccagctccatccactcgctcatcactcctgtccactgccacccatggctttcctcctagggtctctctgcctgtgtcctagcccctccccatggtctcagcaccgcttacttgtatggggtgccgctgtggaaggcaccttctggggactgagactccaagggtagagaggtggtgctgggcgtgggtcgatgcagccccccaccccactgcttggaaggttggagcatggaagggtgaaggctgctgagagccacctctgtagtgtataaaattgacactggttcctagtctcgtgggcttttaacggtcctgcctgcctgttccagaccccattgtgtggacagaagggggcctttgggatccttccctccaccttctcacctcacctcgctcctctcagcatcttcattagctgtgttggggtcactcctgcagcttgcttccttttcctaactcctctgttgagcagagccatgggcggtgtgctgagaaacagcatcgggtccttggatgggttttctagggaaaatgcatgaccaatggcctaagcgtggctggacctagggtaggaaaagaatggaaggtagctgaggatggagctttgggaccctgtgtagcactgtggttaagatctcaggcatggttagcaacaaatggcatggggatcctcaacacctgtcgggtatctactatatgccagtctaggaatttcaacaatgaacaaatagacccattccttctcttcatggacttacaactttgtggggcagatggtgtggagcaaatgatcacagaatcctcaactcacattgggtacatgttatgtagggaagtaaagggtgcaaagatttggattagagaggctgggccagggagggcttctctgaggaggtgagccttcagccagggctctgaggctgagcaggagtcaaccaggcagagggacagtatgtgtcagcacagaggtccgaggaggctcaagtatttgaggaaagtggaagaaggccaccgaggtggcagtggtgcaacatgaggctgggaagatgggagggtgagagggtgggctgggccaaacagggccttgtagatgagggtcaggattgtgaattttatccctacatccagtggaaagacaagaaagcttttaattggggaaatgacatcaggtttgtgtttttccaaagtcactgaggctgctgtggggagagtaagtgagagaggcaagagtggtgggttcctggaagacactagaagctgttagagccatccaggtgacaccacagtggcctggatagggaaacatcattgcagatgtgagggttggaggggcagtaaacagattcctgcaggctccagggagggagctgaagtggagaggctgaagaactgaccagggattccccgggaaaagagacagggacttgtgggcctggtgcactgtgttccctgagcccacagtgaggtttctggtgacaccaggataaggcttctgaaccccaggagcatctctgatcctgtgcattgattttttttttcatttttacttttttaaaaaataaaagtacttcattttgcctaaatacaaaagttccttatgtataaaggaaataaatttgataacaaaaccctttagttttctaatagggatacctttttaaaaaggtaagctcgggccgggtgcggtggctcatgcttgtaatcccagcactttgggaggctgaggctggcagatcacgaggtcaggagatcaagaccacggtgaaaccccatctctactaaaaatacaaaaaaattagccgggcgtggtggtgggcacctgtagtcccagtaactcggagaggctgaggcaggagaatggcgtgaacctgggaggccgagtttgcagtgaaccgagatcatgccactgcactccagcctgggcaacagagcgagactccatctcaaaaaaaaaaaaaaaaaaaaaaaaaaaaaggtaagctcatctcagctgtacttagggcacatgagattcatataaattttgagctcaggaaagatggaggagcaactagagtgtcctgagcaggcagatgtggtggtaactgtggcagcagcagtgatggtggcagtgatggtgatggtggtagagatgatggtgatggtggtagagatgatggtgattttttgttgatgatggcagtgatgatggtgatgttttggtgatgatgacagagatgatgtggtaatgctttctttgatgatggtggtagagatgctggtggtgtctcggtaatgctggtagagatgatggtgatgttttggtgatggtggtggagatgctggtggtgttttggtgttggtggtagagattatggtgatgttttgatgatggtggtggagatgctggtgatgttttggtaatggtggtagagatgctggtggtatcttggtgatggtggtagagatgatggtgatgttttggtgatgatggcagcaatgatggtggtagagatgacggcaatggttttggtgctggtagcaccaatggtgatgactagagcagtcatcctatctgcaacttcagaggcaaggttagtaaaggacactcactgttatggcagttgtgatgctggtcatttctgccccaagtgtgcccagttataagagctaaagatgatgtctaaaggacctacttacttcacttcttgaggcaaacagtattaccgagcccaggaccgtgctggatactgtggagttctagaagaagggtagaagtggtccctgccttccgcgagggtattatcttccccaggatataaccaagtgctaaatctcagtgtgccatctccctgtatgacattgatccctcttcatatgtcctttttacgggctgaactgaggagctccagatatgttaaggtgctccctcttcaaagccgacacctcccctccatacctgcttcctgccccaccccacctacacatacctctgagcaggtatgagacaggttagagtgggcaaatggaactttgttggaccaacagggaaaaatgtggacactgaggctaacagtgctacagtatgaccttgagcaagtcattctacctcctggggcctcaatttgctcatctctcctaaatagagaataatatttgctctaccctttctagctcaaaaagctgtgcggaggaccaaatgagatcatgaatgtgaaaactcctgcactcctaagcgttgggtggacgtcactgggagatgcagaccctgggcacgctgggtctctaggcagtgggcatttctcacagaatctcctagctatctggtcagcagacctggccataaggggctctggtctgggagttcccatggggaaccatgccactggtcacaataccgatgctggcttctatctctggtgagtaatgtcaggctgtctcgaggttaaaccttaaaagagaggctccatttctccacaaggagcaggcccagcttagggtaaaatgtcagagatataagactctctctgccatcctgatcctccgcatcccggcctctctcccactcccactctatcagcagtgtcccgtctctcctctttagcctgccaaagctttcctctctcttcttccttctctactttctctcaggactgaaccaagaactcactcacactgaggccactactaactgacaacagcctaaagcactgtatttgaaacgtttttttctcccaccttgatcctccaagtcagaaatacatttttcagcaaactcagtacacacatactgagtcaaaagttttatgaaacaatactatgcacaatatatttaagttttttgtatgtgtgatttcttgattgtattgtatgtggtctaattttttttcaattgctggttgcaatccactacattgatttcatgatccacaaatgagttacagcctgcaatttgaaaagtccctggcctaaaagaaccttctttctaagcacagaaagtccctgggaactggttgtcaagacagtttacccagattttggataatagagcaatttctttgtgccaggccctgttctgggtgctttatgtataatagttcagtgaacccacacagcccttctatgaggtagatgttattgtgatcatcattcacattttatgggccaggaacctgaggcaaagaaaggttaagttccttatctaagctcttactgctagtaagtggcagaactcaagacgccgtgtgtttaaccattgggctctgctgcctttcagggtgtcatagaaataaggtggctttgcagagggatatacatgatgctctaagaaagcctataagaagtccctgtggtcagagcaggactcagatgcttctggaaggcaagcttggtttgcatgttgtaaaaaacctgccaaacagactgggctctgagaacttaccgcccaacagacgctcaagctcgactgccctgtggacgcacatagactgatggcgatgccagtggggacgactgaagcccttggggtgcatgttaggcccacatgtagaactctgcccactggccaatcagcaagcagtaccgaagaaaagcctgactctggtctttacaaaaaaaaatactgccgttaattttaaacacacctctttttgcaggctaaatagaaaagtgagcttaatctacactcttgctgttctttaatgaatttattgttttaggctctgtgagaatgcaataaaagttaaaaatgtatttcagaacacagtgcaaatgtgtctccgcatttgatggattgcttttgagtccaacacttccggcccgtgggcaggcaggccccacagatgggccgcggcatctacgagcagagcgagagtgcgtctataagggatggtcgtgggaggcacacacttatcagatttcatttctgttctcttctcttggcatagtagctggagagtggtaaaatgggagatggagagacagtgaaacagctgaagtagcagcctcaattatttacagaccagattgtcagcctcccaaaaaatgaaaattgacctcacatctctcttctccttttcacaggtgggagggtcaggcacattactattggccactctcagcattggccattctcacctccccatccctctgcatcctcagctaagctcaatgcagaaattcaaacgcaaggaacaggccctgccctcagagagcccccattctgatgtgggagagagggcagaagagttcaagacccagatcgttaacaagggaaggcacaggcataggacagaatgtatgtagccgtgggcactgtaaggggcatagcagttgaatagcagccttgtctagagcctagatgtggaatattgcccaagagttgcactttgtaaactgagtctataaataccaagagaatgtcgaagagaagctattgaagccaggtagagttagggaaggattcttagaagaggtcaaacgtgaagggcagcagtcatggagaaggtgcttcatctgaaggtagggcccagtcagtgccttgaagcggcaaccaaagactaggaaagcctaagccaacatttctcagtcctgttggggactgcgccagccactgctctaagacctcgctgccaggcctggcaggtggccagcccaggtgtccaggtgcccagatgccccacagcaagccaaggcctcaatcctcccttcacttgattttctgtgagccttgcttgccagctaaggtgtagggccctccttagctgtggacgcagagccaagttaagtcgccatggtaaccctctggctgatggggacttgggttgccatggaaacttgtctaaaatcaaaaagtattttggaagaggggttgcagcagagaggaagggtggtgggggatgtctgccgcagtgccgcactacccatgattctgttctgtgcccttcttgggttcctcctggaatgagcgtgtgtgtgggggggttgtccagggcccagcccagggcttctaagaaatagtcattgctggtaccaggagccctcctggaggccctccagcaaaacatgtatgttaggccattcttgcgttgctgtaaagaaataccagaggctggataatttattttaaaaagaggtttaattggctcatgtttctactggctgtataggaagcatggtgcaggcatctgctcagccttcaaaggagcctcagggagcatttacttatggcagaaggttaagtgggagcaggcttgtcacatggtgacagagggagcaaaagagagagttgtgggggtaagtgccacacaattttaaataaccagatctcacgaaaactggctgggcacggtggctcacacctgtaatctcagcactctgggaggccgaggtgggcagatcacttgaggccaggagtttgagaccagcctggccaacatggtgaaacccaatctctactaaaaatacacacacacatagctgggtgtggtggcgcgcacctgtaatcccacctactctggagactgaggcaggagaattgcccaaacgtgggaggttgagggtgcagtgagcggagatcgcgtcactgcctgggcaacagagtgagactctgtctcaaaaaaaaaaaaaaaaagaactcactatggcaaggatggcaccaagccatgagggatccactcccatgacccaagcacttcccatcaggccccacctctgacatggggatgacctttccacatgagatttagagggaacggcctccagactacaccaggtaccaatctgtccaccaccatgtcacaccaacatgtcctccatttccttggtgaatgcttgacagtatctttcagtgccaaatctgctccttgacaaaaccataaaagccacaaagttaatgtcctactgctgcctgtcccctgctcctgagatccctgccccgggatcctccatgcttatcgtctcctttctgaccgggcacttcttgtcacaaggccagggctggccagcctcgtgtaacctcagcttcctcttcaccatggtagagagataaaagtccctgcttttagacagtgcacttagcctgctcaaaggaactgctccataaacactactattacttaccattaacttacaacaaaaaatgaaccaggcacttggtaaggtgtttgtattttactcatcccagaggaatttgcacatttaaatatcgtctctttccctccatcttcttccccaagttacctttcctgaaagtgggatgatgtttaaaacaaagcgatggaatttgaggggtacaacccctacagttctgtccaaattcacttctctaaactcatgttctccctccactccaccctaaaccctggcctcctgaggcaacgaagtttgcctatctggaaccattttctgaagctggatggcagacggggagcctcaagagggaagaaaagaatggcaaacttttcattggcccagtggccggcctcataaatcatcattcataattagaattatttattcccaaatcaccatcccaagccccagtttcccctgtacctaaagctcttttcacttctagttcaagagagtcttgccccctctctgcgtctcaaaagtgatctcttctcttcctctaaactcacctgaagctttcaccaagtatgctggccggttctgcttcctaccctattgcctaccaaaaggagataattccagcccctctttctgagatagggtgttaatgaatccttactgaggcacagacctctggcctcctgcagagaggtcctcctggaagtgccctggggactctggagacctggcctcccagcagccactccctctgcttttaagaggaagctttagcctgagaaagtttgactccttcctgaaagctgcacttatttcagccaggctgggctcaggtttcagggctcagggactctttctctccctttctccttcccaagactgaaatgcagctgcccagaagtgctgaggaggacacagagtcggcttcctaggcacaggcccagctctgtcccctttccttgtgctgggaccttcagtggaggggaggagtcagggagcctcagggaggcaaagcaggccacacatcgagggaagcggctggggagagctgactcgcaggaaatagtttcaccccagtggtccaggctggggttcccggtagctcctccaccattctccccgcaacacccaaccagctctgcttttaaaaggtgaacacaatctttcagaagctgcagcccaagccctttctggccctggcgaaccttccccattcccctcttgccaaacatttttataccaaaataattagataattaataatcatgtcaaatactgtgtttctggcactccatactttttaagctttggaatctgtgtgtaatagatctaaatagcagcccacaaacttggccaggcaacaaacatcccattcttgattgtctttaaaccaatgtaattctacttctgagcccctaccctcctgagtggcaagacatttcaagtcagaattactggggtctggttgggcgcggtggctcatgcctgtaatcccagcactttaggcggctgagatgggtggatcacttgaggccaggagtttgagaccagcctggccaacatggtgaaaccctgtctctattaaaaatacaaacattatctggttatggtggtgcgtgcctgtaatcccagctacccaggaggctgaggcagaagaatcgcttgaacttggtgggtggaggttgcaggagccaagactgtgccactgcactccagcctgggcgacagattgagactccatctcaaaaaaaaaaaaaaaaaaaaagaattgctggcggctggcatcctttcccccaaccccaggctcaccccaggtccagaaggtctgagcaaagcttggaaaacaggaaaggaccactatgttgtgatccctgcaagtttcctcagtgcctctccagttctgtgccatgggacatggacttctttgccaaggccagcagcctctgcccaatgtcccttcctcctgtttaccccaccccgtccccctcagggtgtgggaatgcatctgactgcttgctcctgggactcacggtgcttttttcatttctagttcaggagagccttgcccactctctgcttctcaaaagtggtctcttcccttcccctaaactcaccatcttttttgtttgtttgtttgtttcatttctgagatggggtctccagcccaggctgaagtgcagtggcatgatctccgctcactgcaaccttcgcctcccaggcatgggcgacactcccacctcagcttcgtgagtagctaggaacataggcatgcgccgccacgcctggctaattttttttattttttggtagagatggggtttcaccatgtcacccaggctggtctcaaacttctgagctcaagcagtttgcccacctcggcttcccaaagtgctgagattacaggcgtgacccaccatacccggccaaactcaccttcctaatagcctgaagctttcaccaaacatgctgccccattctgcttcctattctgtccaatgtccccgaagtttagagttttgaaacctggtgacctgctcagaatgggagctggggagtggaattacacagagggaggcaccatgaattaaacatctcagaaatgtatcctgccaaatgtgattgcattttcgcaccaccctgataaagtaggtaggacaaatattaatatccccaaaaggtaaatgagggagctacgttatgaactgacttggcagtgagtttgtggaaatactagaacacaagtccgggcctcctacctctcaacgtaagctgctgctgccaaagcaagcctttctgaactttcctgaaagctgctgatagcgctccaatggctggtgtgtttcaagtgcttattgtgtgcaagaaactgaactaagcactttatgagtaatagtttgatcagtctttactccaactctttgaggtaggtgctcttgtccccattttacagatgagggtgttgaggcacagagaaggcaaggactccgctggaagtcacagagttgataattgccacagccaggatttgaaacctgcactcttaactcctctcctatagtgagtttcctagtaacttcagccccttcagcgaagaagaaaggagtgataaaggagtaactgtatcagcaattttgtttagctttctgacttcacccagcctccaacaaaagaggctgctttccaaagtcccaggctgcattcatccctgcaaattcattgtttcttaccacccactcaccaccacaacgaatctccccacaagctcaaactcaaggacacacctccctctgtctgtcccccctcccaacccaaactcaacagcatcagctctgagagaaaaagtcgaaggaggaaggctcccaccagagagcccgtgaggcatccagtggggtggagaggggtttggcagcccctcccctccatctgcttccagctgggacacaggatgctagggaggggaggctcccgtggagacaaaggtcggggagcccagaagggaggaggtggttaggatgctgggggtttggaggtggggctatttactgggggggagacagcaatgtgcaggagttacccaaatgaagccccctcctgcctgactgcagcggggagccaacctcctgagcctgcgggcagagaggccacaattaaggcagagggaggccagctggccctcaaagcacctttctcttcacaaaaccggcagtggtctcatttacaactcatctcccaaagggcttggaggtgcttggagaaccagaaaccctggtcctctaattaccggtgtgcatctgggaaagtgagtcagccacgtgaaaatgagcagcccagagctccttccacccctaaagggcaaggtcctgatttttccatctcagactgcctggcacccctgaggaccccctctgctgaaagctgtttgtaggtaaccttctctgtggtttctatagacctcctccttcctctcaacatctcccttctgaacccctacaaaccagttattgaaatgtatggtgcccttactatgtaccaaatacttattctatttaataactctgcacattgctgtcttcccccagtcaccagatacttcacgtgtcttaagtcctcatgataggccgacaaagttgaaattatttttgtcctccttctgcaaatgaggaaactgaggcagagaggttgagtaacttgcctgaagtcatccagctagtaagttttggaaaggggttttgaacaggtgtctggttcctggccactgcactctgctctctcagggaggctttgctttggagtgatgcaaagagggatgtggggcatggagcataggtttgtcattcctatataaatcataatacttgtaaattatttggaattcttctgtatgagagacttgtctgctctcccccatttattcagtgattgatttatatcacaatgtactcatgggagtgtttatcttatactctgagttataattcagtactatgtatgttagtctgttctgcattgctaaaaaggaatacctgaggctggccagtttataaagaaaacaggcatatttggctcatggttctgcaagctgtacaagcaaggcaccagcatctgcttggcttttggtgaggcctcaggaagcttttactcatggcagaaggtgaacggggagcgggtgtgtcacacggcaagagagagaggaaggaagttccagtctcctttaaagaaccaaggctgggcgcggtggctcacgcctgtaatcccagcactttgggaggccgaggtgggcggatcacctgaggtcaggagttcgagaccagcctcaacatggagaaagcccatctctactaaaaatacaaaattagccaggcatggtgacacatgcctgtaatcccaactactcgggaggctgaggcaggagaattgcttgaacctgggaggtggaggttgtggtgagccgagatcgcgccattgcactccagcctgggcaacaagagagaaactcagtctcaaaaaaaataataacaaataaataaataaaataaaataaagaaccagatcttgggtgaattaatagagtgagaactcacccattatagagaggacagcactaagccattcatgagggatctggccccatgactcaaacccctcccacctccaacattggggatcacatttcaacaggagatttggaggggacagaacagccaaaccatatcactatgttttttattttgttgctcaaattaaatttattttgttgcacccttcgcccagtgggggtctggagggtgctgctctagcctttgggacagagaaaggagaatggtgggcagggctccactgcagaccagctgggctggcctgtctccccagctgtgatcgcaacgccacacttcttgcgcccatgcttctttacttctctgtacctgaccctcaccctggttcaatcgcaagtcttgttgcttctgcctctgaaatattacattgtctttcgtccccagccattgtcctattcacaccatcatctccttcatgaatgtttcctgacttccctccttccagttcacccccatacactcctctgggggtgccttcctaatgcacagctgagaccatgtcactccccagaacagaggccttcagtggcttctgcagaataacatcctgatttcgcatccagcatttcaggcctccacaattgcactttctcacctttctagcttctcctttctcttccctacccaaaccatctgccagcatttccctgagggaattctgtgaaacttgttaattggcattacttaaaaataaaagaccctgtggtcaaataaatctaggaaactctgggttgagaaaggttaaacagattttctgatttggagtctctgagactttgtatactaatggggttcgtgagtccccaggaatgggtttaaaatatgcagaatctccccagcgtgtttgtccatgggatcctgctttggcagaacactggtagggccagcagtccacgaggccatgtgggaacattgcttcctgttcggtccagctggactccttgctctcccccgagtcagcctcattttctggcctctgtgtcttggattaagcaatatccccagcctggaaacacctacttcctccatcttcacctataaacatcttacccatcctttaagaatatttttccagccaggcgcagtggctcacgcctgtaatcctagcacttggggggccgaggggggcagatcacttgaggtcaggagtttgagaccagcctggcaaatatggtgaaaccccatctctactaaaaatacaaaaattagccaagggccgagtgctgtggctcacgcctataatcctagcactttgggaggccgaggcaggtggatcacctgaggtcaggagttaaagacgagcctggccaatgtggtgaaacccccatctctactaaaaatacaaaaatcagctgggtgtggtgatgcacatccgtaatcccagctacttgggaggctgaggcaggagaattgcttgaaaccggaaggtggaggttgcagtgagccaagatcgtgccactgcactccagcctgggtgacagagtgagactccatctcaaaaaaaaaaaaaaaaaaaaatcagccaggtatggtggcacatgcctgtaatcccagctacctgggaggctgaggcacaagaatcacttgaacccgggaggcggaggttgcagtgagctgagatggtgccattgcactccagcctgggcaaaagagcaagactccatctcaaaaaaaaaaagaaagagaaaaatgttttccccatggtcccccacccctaccgcagccaccaacctcttctgaggttcttttgaacctttgtgacaatgcctctgatggcattcactggctgaaactattttagcttttttctccatttgtctgacagcagtcccccactctccctggtcaggctctaagaaccttggtgataagggcagtgtcactcattatcttattttctttagcatctactacatattgtagttctccttggcatactcaagggattggttccaggaccactgacttataaccaaatctgtgcatagtcaagacccgcattcagctctgcagaacctacgtgctatgaaaagttggcccttggtgtaggcagttttcacatcccgggaatactttattttcattacatgcaaggttggaaaaaaaaaaaagtaatgtgtaagtggacccactaagttcaagtccatggtgttcaaggggcaactgtgtatcaacctggctgtgcctcagaaccatcgatgtaatttttaatttcttactaaacttttaatattagaatagttttagatttacagaaaagttgcaaggctagtacagagggttgacataccccacccccgtttcccctgttggtaacatcttacattattagggtacctttactgcaattaatgaaccaataatgataaattattattaacttggaagtccagactttatttggatttacctgggttttagctcatgttctttttctgttccaggatcccatctaggataacacattactctcagtcatcagatttccttaggcccctctaggctgtgacagtttcttagactttctttgttttcgatgaccttgacagttttgaagagtactggtcaggtattttgcagaatgtcctgcagtggttttaactgatatttttctcatggctaaacagggattatgtgtttgggggatgaagaccacagaagtaaaatgccattctcatgacatcctatgaagggtctataccggcgatccccaccctttttggcaacagggaccggtttcatggaatacaatttttccacggacaggggttgggggatggggtggagatggttttgagatgaaactgctccacttcagatcatcagacactagattctcataaggagtgtgcaccctagatccctacaatgcgcagttcacaatagggttcaccttcctatgagaatctaatgctgctgctgatctgacaggaggtggggctcaggcggtcatgcttgcctgcacactcatctcctgctgtgcggctagggttcctgctgtgtggcatactcaccttctgctctgtggccagtactggtccatggcctggggattgggaagccctggtccatgctaccaacatgacttatcactgttgatgttgaccttaattatctcgctaaggtggtgttcattgagtttctccacggagtgttactgtcctctgtcccctcccgccctcccccatttccatagtgtactcttcagaaggaagtcactgtgtgcagccacgttcaaggagggcttcacctcctggagggggagcgtccacctaaattcttctttatgggagatttgtctcttctcccccattcattcatcattcattcattcatttagatcagtatgttcttgtggatgtttatttcatactttgagttataatccagttctacattttttattttgttttcaaaattgtttcagctttggctgttaggggagcacttttaactggcatctgtgtccctttgacatactccaatctttatttacatatttatttccttgcttttcggccctacaagatgctctaggttcattttgcacattccctgccccagtgctccaagaatcagctatttctccaaggaatcttagttcctttaatgggaggaggtttagaatctgagatctgagtgctgggtgtgcctattgctatcactgtggtgcatagacctaggaatatatgtgtttatattaacccatgtatgtaaacatagctgtctatctctccatatatatgtgatatatatgtaaactgtgtgtgtgtaactaaatattagttaatactgatgtctgcaacgctaacctaatagcacgtggttcattctaaactttcttcctttatgcagcctttttttttttttttttagacagagtctcactcttgtcgcccaggctggagtgcaatggcttgatctcggctcactgcaacctccgtctcccaggttcaagcgattctcctgcctcagcctcctgagtagctgggattacaggcatctgccaccacgcctggctaatttttgtatttttgtagagacaggggtttcaccatgttggccaggctggtctcgaactcctgacctcaggtgatccactcgcctcagcctcccaaagtgctgggattacaggcgtgagccactgtgcccagcctatgcagctttaaaaaaccccaattcttaatacaaaaaattagctgggtgtggtggcgagcgcctgtaatcccagctactcgagaggctgaggcaggagaatgacgtgaccccggaagtggaggttgcagtgagccacgatcatgctactgcactccagcctgggcgacagagcaagactctgtctcaaaaaaaaaaaaaaaacccacaaccccagttctggccgggcgcggtggcttatgcctgtaatcccaactgtttggggaggccaaggtgggtggatcacttgaggtcagaaattcgcactggccaacatggtgaaactccatatctactaaaaatacaaaaattagcctggcatggtggtgggcacctgtaatcccagctactcaggaggcagaggtttcagtgagcggtgatcacgccactgcacctccagcctgggcaacagagtgagactctgtctcaaaaacaaaacaaaaaaaacctggttattctgaatcacagtcttttaaggctgggccaaaggctacactccaaaggctgagaaacactgtagcaagcactcaaatgcttgctaaatttaattgagtttagagaaactcagaccagccccatcacagatgtgcaggatttccagccttggggctgtaaggcaaatgagctcgcaccttcccccaagtgatgctctgtaggaaacagcttgtaatcattgagaaggtgtccattaccccatgtttgggtgtttctgctcatttcctctgtatctggttccctgaacacctgatatttcctgatgtgaggccagactaactgggatccgttaccgcctgtggcagaatcttcggtgacagtccctgcctgtcccccttggcccagcagccagtacatttttcctctgtggtgataatcagggcatgtatgtgactctaaaccaagtccacaagacttgaaatgacttacagatcattttacaaatgaggagcaggtccaggaaacatagccagctagtggcagagcaagtagaagaacctaatcttcctgtgctcttcgtatccacgctgaaccccgtccattcttctgaatgccctgggctggaattgtgatgatacatgatggatacatgggaaactcctgagctgcatgtctttaaggccactgtgaactaaaatacccctgaatgcagtcttggcttgctttctgcagaatgtccctgtaaagggtacctgagacagctgcagatcaacatgacaagatgttctcagctcactgcttttatttcacacacatctgaagctccagagccagagaagaggctgtggagagatgcacacctaataagcaccgagggacagctgcctggcccttctagatggaagggagtcatgttggtcctcagagaaatccaggcacccatctttagcaccttcactcctcccccaactgcatctgcccctcctctcaatcccccatactcactcccctcaagctgccctcttgctgccttcatccctgccccctcagtattccatccagaccagccctcccccagggtaccatgctctaacattatctctcacaccttccccaggtccccatcaaaacacccatttctttagtcaaggtgtttggacagcagtctgattaaactataggacaaattgcttcagaaattcagacttgtcatcccactttgaataggtggggagcaagcccctgactctaggcatttggatgcccagttgttaactgcactggtagatactttgtctctagtgtgtcccagacatttcctgaccacatttctttatgctgaactgaaaatcttgtgatcttgtttcaagattgcattgatttgcatctatctcctatcccccactccaacccatttgcttatttccatagtttctgtaggcaggttttctcttgctagttatcttgccacctttgcctcctaaagagcccttaaattggcttccgggcagcaatctatccttttctttctggaaaatagcccaacccctgcagcctacctctcctaccagcctcagactgcactcaccttcccccactgtccacagcaggaaggacagatgacaggaggaggctcacttttgctgccattgcaaaaacctcgagcagcagctgctttgtcactcaattcagaagctccttcctggtgtgaaaggtattttgcaattatgcatagttactcacagttacccattaacagaaacctttcagctccttgccagcttcatcttaaatgctttttcctttctcccttcagaagtctttataagcatacggtatttaggaaggtctcctttgccaatatatacagtattatataaattacaacatggagtgactaactagtggctctccctctaaggattttaccaccgaatccaaatatatttcactgattgcatctaggcagctataggagtgttttataggttgctttttttttcccccagggggaagtggctggaaggtggcacaggatatgttctctcttaaatcatattaccactcaaccaaggatacatctattgtgtatccagcctcccacctcctttccttcaatgggaggattggtaagagcttaaagctgaggcccctctggagacccctaggttcgtaaccaaaagggaccaggatggatggggtttcccacttatgataataataccaacaataacaactatgatatgagtgcctgccagatactaggcactgtgctagcacttaacatacgttatctactttaatcttcctaatagcccttagaatatacataattatctctgttctacaggtggaaaaaaaatgagacttttgaacataaagactcttagttaagtttgcatatttcatggtagagccaagacgccaacccaaatctgtctgattttaaagctaccacccacctaccctggatattggttcggagtcaactagggccctaaaactagtgaacatggtgccccaccctttcctgaagcctggcatttgtggcctgggaactgatgggagagtatgaacatctgagggcgggcaagtttctccaaggccctccctcagatgggggaagatggggaatcaaaggttctcattttccctccaaccacctccagcagtgtcatcccaaacacgcctgattctgctgtatgtaattaacgaggaatgactgcccagccatttgatttctaattgccacataacatgaaagtgacaatgcagatgattacatgtgtcagatgaacttggttgtaagttttatttaaacactaaattctttggctgtgcactcagcctttgtattactcacgtagcaaggttgtcggctcttcatttaaagaggaagagatggcaggggtgccgtcaactgttctgatgagagcaggtccttcctggctctccctgtgtgccaggccttggaccctgggctccttggtggggtgagggtggttagggagggtggcactggagcagagtagaccatggcaggttagtgcttatggaccaggtaaacctcttcccaggagggacgtgaatctgcacagcttgtggtctccctactcccatggaatcaaggagaacttcctggggaaaatgggatgttttgaagaatctgttgaatgaaagagtgaagaagatgatctgggatattagaaatgataatatttctctgaataaaggttttacacacaaaatatgggcaccacataacctgatcagagctgaaacttagccatccatgatatttacatcctgcccactgttcaaaaccaggaatccctttttgcgggcttttcattcaagggaagaggctcagatatcacacagttatcactgacacccgcccccatcgaaaataattattcagggattctgagagccaacgtaattagtccaattaatctctagcgatgaattattctgtccgataatcgtcttcggaagcaaaggattcattagcgtctctggctgacagcagggagtcaaatgtccttttatctctcttccctgtccctgatatgatagaatgaaattggctctcactttgataaattctgtctctattgaaaaggaggttggttagggcagcagcagaggctgggacctaggttactagacgtgttgcctgctccacatgcactgctgaccttgagtttaaggcctcagtttatcccatggaaacatggggagacttgagtgcaagctttgtgatcagttatcaaattaaccaggtaccttcatgggcttccaagaggcagttaatcccagcacacaccctggaagaacatgcccttctctgctgagcattctcaacgaattctaaagaagtcctccacctttttgtaggaacttactttacataatttagtcatattgaaggcactaagtgatgagtagaacccaaggtgcctattgaggtgcccatcaaaattccaacttttactgcacaaattataggatacgaatccaattatgaatccaaatgtatttcactgattgcatctaggccgctacaggacagttttataggttgcttcttttttcccagggggaagtagctggaaggtgggacaggatatattctctcttaaatcatgtcaccactcaaccaaggatacatccattgtgtatccaggccccagctcctttccttcaatgaggtggaggattggtaacagcttaaagctgaggcccctccagagactcctaggttcataagcaaaagggacaggatggacaggctttcctacttacaagagtagcattcttgcctgttctgggggttgtttttaattgtcttgctggagcacatataccctttccttatggtacataagccctgactctaggggtaacacatatggagatctacctgtcctgtggccgcccaagaccacgcttctgtttgtaccttcccctaataaagcaccttttattaaatacaacaacaacaaaatctcaacctaagctttgagagagatgtgcgattgggggagtgcggtggaagctctcctaggggcctcagagcagctgggttggagattctgctccccagagtgtgtctatttcctccatggcctgtctgtggcagagtgctggctatttcctccgtggcctgtccgtggcagagtgtgtctggttcctccgtggcctgtctgtggcagaatgctggctatttcctccgtggcctgtccatgcagtgtgtgtctgtttcctctgtggcctatatgtggcagaatgtgtctatttcctccatggcctgtctgtggcagagtgctggctatttcctctctggcctgtccgtggcagagtatgtctatttcctctctggcctgtccgtggcagagtatgtctatttcctctctggcctgtctgtggcagagtgctggctatttcctctctggcctgtccgtggcagagtatgtctatttcctctctggcctgtccgtggcagagtatgtctatttcctctctggcctgtctgtggcagaatgctggctatttcctccgtggcctgtccatgcagtgtgtgtctgtttcctctgtggcctatatgtggcagaatgtgtctatttcctccatggcctgtctgtggcagagtgctggctatttcctctctggcctgtccgtggcagagtatgtctatttcctctctggcctgtccgtggcagagtatgtctatttcctctctggcctgtctgtggcagagtgctggctatttcctccatggcctgtccgtggcagagtgctggctgtttcctccatggcctgtctgtggcagtgtgtgtctgtttcctctgtggctcgtctgtggcagaatgtgtctatttcctctgtggcctgtctgtggcagagcgctggctatttcctccgtggcctgtccgtggcagtgtgtgtgtctgtttcctccttggcctgtccgtggcagagtgctggctatttcctccgtggcctgtccgtggcagtgtgtgtgtctgtttcctccgtggcctgtccatggcagagtgctgggctccaggtcagcaggtctttgctttcctggtctcaggctctcttccccaggaaaatgaacattacacatgggtacgagattttgcatatcacttcagtgagtttctagaccctctgttaaccctctagaccctctgcatgaataactccagatattataatacattgatcctgttcttgaggaacttaaaatccaggaagtgaagcttggggagggggagttgttaatgttaacggttcagcacaacagaaaggaggtggtgtgataatggagtgggtcttaatggcattttgggtcagttaattctttgctatagagggctgtcctgggcattgtaagatgttcagcagcatccctgccctctactcactagatgccagtaacaccccctcccaagtcatgaaagtcaaaaatgtctccagacatcaccaaatgtcccctgaggggcaacatctctgttgagaaccactataatagaggcaccgtagtatgctgagcctcagcggaaggtgtggtcatttctgggtggaaggaccagagaagcctccctggaagaagtggtctgaggtttaggaagcaaaccaaaaggcagacttttttattttgttttggtcagctttttatccctagagtctaatatggtgtttggcacatagaaagtgcagagaatgctcatcaagtacgtaaacaaacaaatgaatgaggaagggttgaacatgcagaaaatggaaagggaaatgcattccagattaaaggactagcatcagcaaaagctcagaggtggaatgaacaggtgtctctagggaatcacaggcagcccagtccctgttccatggataaggaacagaatagcggcttgtatgaccctggcttaggacgccgtggaatcgccttttctggagatgcttaagaaaagttctgcctgaaggaaaggaaaaggagtggtttatagaactgcccactaattgatcacaactccgtcctgataaacatggccatggtcttggaatatttctcaacacagccctctaagaagttactaccagtcatttggagttggaatgccagttgcacctgtttaactccctgactgtggtctagagacctcatgtcagaactgggggctgctgttctgcttgaagccagcccagaaagggaggcattagcctctcttggtcattcttcacgctttgtgtgtggctccattttccaggccatatctcttttccctttaccctgccccattccttctctgctgttgagctgccttgtggctgagttctcgtctccctgctgtctcacccgttattcaacgagcctgtgttatgtgccctggagatacagccatggacacaccagagttgctgcttgtcaggtgtggatatagagaagcaggcaggcaattacattacaacgtggtgaatgctgagttgtgggtaacagaggctgctgtagggcagagcagtgtcacctaacagctggttgaggaaggctttgggacctttttaggaaaagacccactgaaagtagggtgctcaggtggagtgacagatagctccagtttataaatctggaatggtgagttttactgtagttttttcaatgtgtgttaaagagttgtgtgtccagtaaaatatatatgtctgcctttccagggaaaatcactgtgactccttggtaacaggagtttgtaatggtctggaaaatgcaggaaaatctttagagtgagttcctggtctccattaaaagcatttatggtgtctggggagccatttccccctgatttgtgtctgacaggggagcactgaggctgagatatcagggaggaagacaaaggctcacatatgtgacaagtcaggtgttcactgggaacacggcatggaacagggctatctctaagtctgtctgtaggtaggatcagaggcagagccctgcagtgggcacctacagagagagaagaatgaaaagcatggcctgtgcctccagggagtcaagccagacacttaccaaatcaggagaaactggcagagatagtagctgctggtatttgagaggcagaaggcaagagttgagacaataagccaatagggaagtggggtgagagggattgcatgagatttcccaaaggaagtgagctgtagagatgggatggaatgggatggcagggcaggagagagaaggctatagggtggcaaatggagacatgaggctgcctccctgtccatctcttaaccagaggactgggaggcgggacaagtatggcaggtgagtgggtggaggaggtgccatctgactatgtgcccaggggatgcatttgtttagcaggcctttatggaaggcctacaacatatcaggcactgtgccaggtgctaggcattcaaagataaatagcatatggcctttgccctgaaggcagatggatgtgtaaagaggtgtgggtgatcaagtgatacgcaggctgtggtagaagtctgttacaggctgcagcagggaccctaaggaaggaatagtgatttctaccaagaggaggggccagatgaaaggcagcctgcattctccatgggaggaggctgaatggaggctgctcactcaccatcactcgggcagcatttcctgggcagctgctgtgtgctgcccagtgctgcgagggtgtggatggagctacataagggatgtagtgtctagtggaggagacaagaccagcaggcaaaaggagttgtcactgcaaaggcagtatgtgatcgttgatgagaggggctcagagatcaaatgttccagagcttgaaggggagtgatctctggagtggccaaggaaggcttcttggaggaggtatgactggaattgggcattgagggctggggagaagtgccccagcagggacggtcttttagatggaagccgtaggagggatggaggaagcaaagatgcagccaggcatcggcctgaatgggcaggagtatgtgggacactcatggaagatcaggccaaaaatgtctgtagagggtcttgtatgtcaggtcaaggactcaaatgccatctgagagatgctgaagtctcatggtgcagagactcaagtttgcatggataagatgtgcttttagacaccttgggggctgggggctgggggcaggacctgtctgaagccatctcagccatcccccggcctccagccagggcttggtgctcctgtacaaaattctgtctccacagtgtgtcccccagtttggcttcctggtgggggaggggacacacacagacatcaattcagtcaagactctgctcacgcctgtccccaggagcaaagccttggcccgctgttcccatggcaaccgccagtcagtgctgagcaaaggagggtgccagaacacggagagctggaggggaccagcagccccctagtcatcacagtcatcactgagaactcccccagttggggtgtagaggcataggggaagtcaaagcaatggctgggaaaccttgagggcaaagggactccctttgttctttgaaggagggaaaggaagtgctgaatggagccaggcagctgatttcccatcgcttctctcatccctccttctgagcctagggtgccccctttgcgtcctctggctcattaaagatagatgaccctggggagggtgagggccggggtcaccagctgctggggcttcttgccctgagttaggctggggatcatttgcagggagaatgcagccaggaccaccagccctggctgcagagggaggagggtaagtctgggaagctggccccagtgggtgatcagcaacatgtccctaagaataggtacatgctattgacaaagatgagaagtgaaccgggagccgtaaatagccaggagcctgtgttctctgggctctgtgttctgtcggttgcttattcattgaaagtcagggatgggcgagatgcagtctccagagtgacgcagtgggacgagccctggagctggagacagagaagctgggttctaatcccagccctgctgctttgtaactgagacctaaatcaaattgcttatcagtctcttcagctgccaaacgaaccaagaagctgcctcacaggattactgaaaggctcacacagcaggaggaatgtgaaagaagctggcacacagtaggcatttgcctccttgcttccaaatgtagagggacagtagagatcgtctgccaaaagggttcatatatccaaaaggcagggttggccagaccctgagtgctcatgtcgcttgtccactgcctcctctggagagcctctggctaagcctagctttggcccagctcttaagttgccccgggaccagcctcttccatgctcaggcctcttggcccccctggatgggctcagggcaaaaggtgaacagcaaatgccatcaggcttttccctgtgtacccagagccatgctctccccatgcctgctcctccaccgagggctctcttaacagctttctcctctccgggcccttagcttagggcctcacttcacctttgccctgtgtatagttccgggttcaagctgaactttattcagcacacgaggtgggggcttcctcctgtcaccccacctctgcccttgtccgagggctccagccatgctgggttcttcccagaactccaacacatttgaccagccagggggaaaagggggtatggggaaggcactggggctctgtcctggaaagatgtgttgtcgctgaactcaggtgcagctttgtagcttggcagacctggaaaatctctctaaggcatgtttgtttcctgggaatttggctctatttacttggggaccaatccgaaggtgcctggtgactgcagcatggtgcctgggccaccgtgggctggatgcaggccctggagggcttgggcaagggctggagaaggcctggctgcctcccaggcattccctgacctccactccattgcctcttcttgtaccttcctggtctcactttgataggggtccaaaggctccccagagcagtcccaggcctgagaccccaccctgccaccaccccggcaggagctccggctgcaccgctggttctggagaaggcccagcacatctcctcctgctcattccctttgctttcctcttcgtatccctgccctactctcaggagagcagaaatggggctgattccttctctaagaaggagaaactgaagcccacaaaggctgagcggcttgctcctgggcatcggaagaagcggggactggaatccaggggtctctgcatccagccttgcacttcccttccagatacatgggggccaggtagtggggacagggcagactcagggagtgggagtgggagcctccagtcccacacatgtgttacccatgaaggagagggtggggttgggagaggatgggagcaggagagggtgggagcgggagagggagtggccctgaagctctgcttttggctgcagctggttcccaggctcctgcattggaatcgggcggaagaggaggattctgaatgatctgattaggcagtcgagagcagccatggatcttggcaagcaggcgacacaacctgcctgccagacgctctaggaaggttcttccgaggccagaagctttacaggtttcagagctgggacaaagcccagtgaggagaaagggctccctcgaggaagcattggacaggagcagtgactgccagtgaggcctggactggctggcagcccgatgtcttggaggtggagaaatgcttggcctggctggtggcccatgactccctgtcttctggcagttctgtatctcattcattgcctgcagtggaggacaggcttcattctgtgagctgtgaggagcgtgattccagcatgagtcaggaagggcctcctggcgtccgcctctgttgtctttttggtcatgtatcattcattttggaaaaagcacggacttcagagaagactgggattcagatccctaccctacaagccgtgtgaccttaggaagttaactgacctctctgagccaaacatctataaaatcggagtactcatacttacctcagccgctgcattgcaaggacagaatacatattcgtgtttcgcaccatgcctggcgcacactcgggaaatactgtcttttttccttttccttcccttcttgcctcagaacattgcctgcttttctcaccttctgatgctcactaaacaaaaaatttttttaaatgcaaaaactcttcagcacatcttattaagtctcactgtaggaattctctgccttcttaattggaagtctcccttaaagctaacctagctccttcttgtttcaattgatacccaagccctggagggagttccggggccttagtctaagccgagtccttttggtgagcagtggaaccatcctggaaatgggggggcatgttggtggcagatgggccgagtcacagggtccccagtggtgggcagtagaggggtgaagggatcagtgacacagcaggcttttccagaaataagaaccctccagggaggcagccaggcagggtggatgtcagctttttgatggaggagcagatgctgtgcaggctgaagtggggcaggggaagagggaggtgtgaacggcagagggagcatcgccttctgggcagccctaccttgctcataccttgcccccagctttctctctcataatcctcctcaaagctcaaccttttcctctttatcctcaagcctggctctgagatcagcaggctgtgtcgtcttgagcaagtcactgctattccagtgcgcctcagtctcctcatctgtgaaatgacctctgaggcttgtgccagctctgacttttgatgagttttaacattcagcctcttctgggcttgcagcagggctgtctatactggtccatacacaggctggccagaccttatgccagcagcccagtcaccctgccatatctgctttgtctcccattccatcccattcccatccccaaaccacacctcttctcctacggtgtcactttaaaacaatgtgtggagcacccactgtgtttgaggtgtcagaatgggatttggaatgaatatgccaggtctctgcccttcaggaggagaaagacatgaaatctaaacaacagctcagctgttatttcattttataggtgagagaactgaggcccagacattgaataccttgcccaaggtcacagggcattgaataccttgcccaaggtcacagtggtaaagctgggatttgacaaagactctctagctccgtgtcctgtggcctctcgtcgtctgatgcccagagccagtccttcctctcttgtggctcagcctttgcataggctgtatccttcctgaacctgagacttgccctgttgcctgtggtcagattcattctttcccttcctttggtttcagatcagtggtcacctcttccaggacctcccctgtgactcctctaacccacccaccttatcacttttctagtcagtccccaacagaagctctggcccccatgcacggatgatgcctgaccacagctgcacatgccaacctcttggctgcaagctccctgagggcagcccctattgtatgggtggactcagaaccctcaagacagtggctaagtggaagccagtggctgctggtcagggcacagcccggcatgatctggtggataatcagtgcttcagaggcggtgatgttcactcatttgatgtgtctcccatttgaaatgcagccacttccaagggaatcacgtgggattcacatcctacatagaagactgcaaaggcctggtttggagaactcaggaaaggtctgtagccaggagacctgaccccttgagttctggtgcaggcaggagtgtgataggcagaactactcccatcacaacagtggcatcttcagataaggtgccttttgtcacttggccactggtaggttctgcgaaaggaagtgatgtcagggatttagggacaggcctgggggtggagggctgcacaggagtgggagtgggcaggtgggtgaagtcaaatgacaaaagcctgcccttacctttgctactggttctcttctgccgctaactcaaatatatatcatctggcaagtctctgtctaactcattctgggcctcagtggcagggccccagaaacctgaagacgggcccgctctgtaaaatgaacttgaaagtgcgccaaaggcaaacactttatagaagaagagccagtgatggcacaagacagggatgccctctctcaccgctcctattcaacatagtgttggaagttctggccagggcaatcaggcaagagaaataaataaagggtattcaattaggaaaagaggaagtcaaattgcccctgtttgcagatgacatgattgtatatttagaaaaccccatcatctcagcccaaaatctccttaagctgataagcaacttcagcaaagtctcaggatacaaaatcaatgtgcaaaaatcacaagcattcctatacaccaataacagacaaacagagagccaaatcatgagtgaactcccattcacaattgcttcaaagagaataaaatacctaggaatccaacttacaagggatgtgaaggacctcttcaaggagaactacaaaccactgctcaatgaaataaaagaggatacaaacaaatggaagaacattccatgctcatggataggaagaatcaatatcctgaaaatggccatactgcccaaggtaatttatagattcaatgccatccccaccaagctaccaatgactttcttcgcagaattggaaaaaactactttaaagttcatatagaaccaaaaaagagcccacattgccaagacaatcctaagccaaaagaacaaagctggaggcatcatgctacctgacttcaaaccatactacaaggctacagtaaccaaaacagcatggtgctggtaccaaaacagagatgtagaccaatggaacagaacagaggcctcaaaaataacaccacacatctacaaccacctgatctttgacaaatgtgacaaaaacaagaaatggggaaaggattccctgtgtaataaatgatgctgggaaaactggctagccatatgtagaaagctgaaactggatcccttccttacaccttatacaaaaattaattcaagatggattaaagacttacatgttagacctaaaaccataaaaaccctagaagaaaacctaggcaataccattcaggacataggcatgggcaagaacttcatgactaaaacaccaaaagcaatggcaacaaaagccaaaatagacaaatgggatctaattaagctaaagagcttctgcacagcaaaagaaaccaccatcagagtgaacaggcaacctacagaaagggagaaaatttttgcaatctacccatctgacaaagggctaatatccagaatctacaaagaatttaaatttacaagaataaacaaacaaccccatcaaaagtgggcaaaggatatgaacagacacttctcgaaagaagacatttatgcacccaacagacacatgaaaaaatgctcatcatcactgggtcatcagagaaatgcaaatcaaaaccacaacgagataccatctcacggcagttagaatggcgatcattaaaaagtcaggaaacaacaggtgctggagaggatgtggagaaataggaacgcttttacactgttggtgggagtgtaaactagttcagccattgtggaagatagtgtggcaattccaaggatctagaacgagaaataccatttgacccagcgattccattactaagtatatacccaaaggattataaatcatgctactataaagacacatgcacacatatgtttattgtggcactattcacaatagcaaagacttggaaccaacccaaatgtccatcaatgatagactggattaagaaaatgtagcacattgccgggcgcaatggctcacgcctgtaatcccagcactttgggaggccgaggcgggtggatcacgaggtcaggagatcgagaccatcctggctaacatggtgaaaccccgtctctaataaaaatacaaaaaattagccaggcgtggtggcaggcgcctgtagtcccagctactcgggaggctgaggcaggagaatgatgtgaacccgggaggcagagcttgtagtgagccgagatcctgccactgcactccagcctggggacagagtgagactctgtctcaaaaaaaaaaaaaaaaaaaaaaggaaagaaaagaaaatgtggcacttgtacaccatggaatactatgcagccataaaaaaggatgagttcatgtcctttgcagggacatggatgaagctggaaaccatcattctgagcaaactatcacaaggacagaaaaccaaacactgcatgttctcactcataggtgggaattgaacaatgagaacacttggacacagggtggggaacatcacacatgggggcctgttgtgggggtggggagctgggggagggatagcattaggagaaatacctaatgtaaatgacaagttaatgggtgcaacaaaccaacatagcacatgtatacctatgtaacaaacctgcacattgtgcacatgtaccctagaacttaaagtataataaaaaaaataaaaaaagaaaaagaaaaagagccagtaatattagcacagaccaactccagtggctctaagagtgctccaaggtggtggaaacttctatatctgtgctgcagtagctacgagctggtgtaatgatgtggctattgaacacttgaaatgtggctagtgcaacccaacaactgaatttgaaacttcattaattttagttaacttaaatctaaaagatgctcaatatcattaggcactagggaaatgtagatgacacctacagtgagataccacttcatacccactggatggctatcaaaaagagacaatgacaagtgtcagtgaagatatggagaaattggaactctcatatactgctgatgggaatgagaaatggagcagccactttggaaaacagtctggcagttcctcaaaatgttaactataaaattaccatgggacccagtattgtactcataggcatacattcaaaagaaatgaaaacatgcatccatataaaggcatggacgtgaatttcatagcagcattattcatactaggccaaaagttgagatgacccaaatgcctatgaaatgaatagataaactaaatgtggtatatccatacaatggaatatcattcagccctgaagaggaatgaagtagtgatgcttgctacaacatggaggaaccttgagaacgttgtgctaagtggaagaagccagatgcaaaaggccacatattgcatgattacatttctatgaaatgtctagaataggcaaactcacagagacagaaagtagattggtggttgccaggagttggagcaaggggagaacagggagtgactgctaatggccacagggcttcttattggaatgataaaaatagtctggattagatagtgatgatggttgtacaactgtgcaaatatactaaaaacaattgaactgtacattttatttgttttttttattattatttttgagatggagtttcactcttgttgcccaggctggagtgcaatggtgcgatctcagctcactgcaacccctgcctcccaggttcaagcgattttcctgcctcagcctcccaagtaggtagctggggttacaggagtgcaccaccatgccaagctcattttgtatttttagtagagatggggtttcatcatgttggtcaggctggtcttgaattcctgacctcaagtgatccaccagcgtcggctcccaaatgaactgtacattttaaaagggtgaattttggtatgtgaattccctctctctctctctctttctctctctctctctctctctctctctctctctctctccccattctgactagtggcgacaatattggactatgcgctctagagtcagactatctggatttgaattctggctttgccatttgctgttatatgtccttggacagcttactcaacctccccaggcttccgtttttctcaactgtaaaatggggataataactgggctctctcaaagagttgtcctgaagattaaatgggctaatatacataaagctgctagaatagtgcctggtacccagccctgtagaagagttagccaatactaatcttactagtgtcacaaccagaaatcccccagggcctcctccaattgtcatccacacctggactcagcccctccccactcccgtccccatttgcctgcagatggttctctctgctgtgtaaactgttgccataacaaccactcccagctcccagcagcagtgacttctttggagcagggtgtcacatgaagggtctgggcaggatcactaatggaaaacattttcagtaaaccttgaggttcactgggcaggaaagtcaaggcctgttggggaacagagggccacgtctccaggctgagacaggcaggccaccttctgcaggaggccagccctctgagcccagcccggaagtccaagtctttaaatgagagaagacagaatatgttcgagagtctgctatctgatcctataacctatcattctgatcctataatctaacattcacaaggaaatggggcagggaggtgtttctcctgaggtggagaagtcaggatagcaaactagcactccttccaaacagggctcgaggccaggcaccctctcctggtcccacagtcctccgcatggaccacccttgaccttggcaagtcctttcctaacgtgatcttgttgctaaatattagtggctgtggaggtattgctttctcctggaactttaagctcgtctccccggcccaagtttgctgccaaaggctgcacttttgcacacggctgagcagggctgagctgtcctgtgacaggctgtggcctgaactagccatccgcgtggggctgccctgtggtcactgcctgccctcagctcgctgcagagagaggctgccactccccagaaagggtcagcctgggtgtggtggagggggtggggtgactgtcctcccagctcatcaggcagctcccagcctcaagaacactgcggaggagcagaggtgaggcctcagagcacagatctgaaccctgatctatttaatatttccccaggggactggagcagaaaggccagctggagcctcttggaaactttggccctgaatcagagcttgccaagtggggcttgtgggtccccagaacctccctggtgccgaaggctggttggttaatcccagaagccaggccctgctccctctccccaagaaccgggtgggctccccgtcatagatactgcaaactcaggctgttctcccagcctggccacgaggcctagggttgcgggaaagatgtcagccctaggagtgcagagtcctgggaggaaaggagctgtgctaagcaggagactgagggagagagacctgggcggtggctcccgagcctgagcgagacgctgtccacctcgctgcgctgcagtcgcagcaaggccacagccggctgaggaccggcaacgcccccttgtggccattctcagcaacaagcccccagagagcctggcgggggctggactggggctgggttctcttgctgcaaggctgaggtggctaggtgacttctcttatcccaagcctggagatgaaggaggcggcttttcctgagaacagacttgtgcctgaagagtagatttgttctgaaggccagggacactttgcgtagccacttggcatcaggaagtcaagccctggttttgtaatggacatccaatactggtggtatgcaatgagatgtaaggattttccaaaatgtggccttatgtagcacaccctccactgtgggggtttgcaaagatgaggccccatctccatcctgttgaatcagaagctctggggggtgacaccctggtatctgcctttttagcatactctgagagaaaagatgcttttatgggcttcagccaagtacaaaaccatagaaccagactgtcaaagctgggtaggggcttgggtatcctctactcccactcccatatttgtagatagggaaactgaggcccaaagaggggaagtaattcaccctagctcccacagctaagtcatgtgtgcccccaagctagaactctaaaaattattattttttatagtgatgggctcttgctgtgttgcccaggctggtcttgaactcctgggctcgaggtatcctcccatctctacctcccaaagtgttgtgattacaggcataagctactgcccctcaccctctttacgtgttctaagttgtccacccggcatgccctgctttacgattcctcttagcccagtgcccagtggagatgcattaccgagggtccctaatccaagccatctcactcagtgaaaatcaaaaccgtaggtgatctggaaagatacctgcctggcagttccaggctgagatggccgtgcatgctcctctctctggccccagatttgcttctatttcctagtttttctttccttgcctcacacacccatgtggccaacacattagtcctttagtcctggctctttctgggtatgtgtccccatgcagcaaacaacaggagtgccattgagcgctgggctccagttcagcccactcgctgattgagatggttccggattctctggggtaaggatgaaaaccctgggagctcccctggggagcaggagcactcaactacgagaagcatgagatttgccatgctgcgggggttcggtgacaactgcctctgacaatattgtgacttaagtgggggaacgagggaaagataggattagtaagagaacaaatagtcccctgcctgcatcctccatggaaatggggtgcctctggtgtgggggcctgccagcatctgttttagagcttctcgggtcatcagatggcgaagaaaaggatagagagaggggatggagtcactgtagggacagttactgtgctctacctgaaggcagaggggatttgcttgctgggttatctgtcagttttccatacctgcccccagccacactgtaggatggagcctttgcagtgaatcagtgcaaggtcactggatgcaagaaccagcagaaccctcctagtccagctctgagcagtgggtagagacctggagtttatcgttagaccaaggagtgcactgaggtgggcctgcaatgctctccctggctggagtttgaaggtttgtgtccttgagtggaagagaggaataaaaatgattcccaaagacgtttgactcattgtaagcaccagacgatcatcaacaaatgctggttgtgagatgtgcagataaactcccactgacctgggcttcaccctagggatctaacagggtcaggaaagatatttttctctctctctttttgggagttattaagaaggggtgtgtgtgtgtgtgtgtgtgtgtgtctgtgtgttgtgttgcttatgttgcttaatccttcttgtttccagatcatttagcctagcctggatttgggacccagtcccaaaccatcccacatgattaatttacattgcagttcacctcttctggtgatacatctctgtgtgtttcatccccagcccacagcatggagtgctggtctaaagatccctgggccaagagtgatagctaccatgccattcacaacctggtgacactgggcaggcccctcccctctggacctgagggattgttgttcccccaccaccaccctgaaaccgccgtgtacaaaatgagatcctttcaagttctgaagtgccatgacttgaaaacattctttctttggctcacttccgttccttctgttggttcccacctcatccagccactcacagcagaagccagtctagaagtcaggtgcaaatgcagtcctctgtggcctctgccctgagccaaaccactaatgtgggatttgaaacactggtggaaataattaagatttcaacagttattcagtttacttaattgtcagccaataattaaaattttatagaacttggggaaatttgactgccgggtgatggattcccatgagtctccttcttcctgaacgtctctgaattttggggggttattaccctcggttgaaggctctccacctattactacatcagattttagactgcaggccagaggggacccctgaggttcacgatactccacagctaagattggccccaagagaacgggattgaagatattgtattgcctcacagcagtgagagagtggtagtcaggcctgatgacacagaaacaaggttttgttactacctcatccacccctaactccaggtatgagtgagggtctcacctagccaaagcaaggttccggaagagaatgtcaggtccgttgagctgcaccctccaggggtgtgcaccacgcccatcagcaaatgagagacaaggggccagcctcagtgccagcccgagggtgcacccgttgttcacccacctctttgtgccttctgacagataagagccaccatttatagagcacctactctgttccaggcaccgtactataagcatgtttgtgaattagctctttaagcctcacagcaaccccaccaagtgggtatcatgcccatttcccagagcgggaaactgcagtgaggtgagatgacttgttcaaacaagctgggaagggggcagtaccaggacctgaagcacaggtctttctgaatctaaggactatgttcttgccactacatcactgtcagttttgccctagggtcccaatctcttgatgagcaatttcgtagtcctgccctcctggggaagcctgtttcccctgttctgacactggaacagagagaaagaccctttttacatcatcctcacagtgcaccctgggctgtcccttaaattacttctcttcctctagcaacgttttagtcttcttgcttcctccccatacaatgggagatgtgtccacagaaatctctctatgcatatgtctgcagaattgcagagttttatgagggtttccacaaactacaggctagaccacaagtaggtgtgtatatctggaggcatgtgcatgtattttgaaacaccatattgtagtggaaagaacaagggctttggagtcaaaaagacttgtgatcagtcccctggctcaaattaaataacatggaaaatgcctcgtggtgaacattgagtagctgggcattatttgatttgtgtgtgcatgcacctgtctgtcaagtgtatttgattgctagtcctttcccaaagacccttgacatggacagtatgctctctctgtggtcttgcataagagccaacagtgtgtagaaagaaacaccatcctactctgcagatgccccagtgcatgctgggactatgctgctgtttgtggtaactgtgaattgccgtggtgatggctgggttgggagagacttgcatctgttctgagcctgagtagcacacacattctctccccagttgctccattttcagggaaaggcttggagggcagcccaggataacatcatgagctcctccccatagaccttggtgtcgccctggggcctgctaggagccctacctgcccccttcccccctcaaaccctacttgcgcgcacacacacacacacacacacacatacacacacttcactcttgcagctggaccctgttctgtaggagctaagacagcacgcactcccaggcccccagagtaagttttggagggtggcatcctggctggtatcatgtgaaggagaacgctgtactctactaggacctggctagaggtgggttggactggagagtaccttgttctaatttgcacaaaggtgccacgtaagatgggagtattctgagcacgtcctccacttaggggtattgaggaaggggatgggctaccaagactccctctgcatctttgccatgtctgggctctgttttgtccccaggcctgtcccacacccagagcaaaacatttgacagagacacatggaggcagcctccagggcatctcaacttagccaataaaacaagccattagccaggcacgatggcacacacctgtaatcccagcactttggggggctgagtcagaaggatagcttgagctcagaagttcgagaccagcttgggcaacatggcaaaaccccgtctctactaaaaatgcaaaaattagccaggcgtgatggggcatgcctgtagtcccagctactcaggaggctaaggtgggagaatcgctcaaaaccagggaagttgagcctgcagtgaggcgtgatcatgccactccatcccaggagacagagtaagaccctgtctccaaaaaaaaaaaaaaaaccattgaacttttaggttacttttctcattatcacagagtagcggaagccctagataccttcaccccatccgggatgctcaccctcacaggagatggtgagaaaggggtgaagcttagttatgggttggtggtcagaggtggggtaaggtgaagatcaggaatggatgagggttgagaggtgaagtaaattcccttggaaatgtaacttactcatatttttaagctaaaatataaaaattcaccttcagggtcatgggtgtgaatgtcagattggctcctcaacctaggccccctctgcagcctctggagctctggaggcctttcttttgtacacaggtaagtcctcttggcctgaagctgtggctgtaccaccccgggaatgtgtctgtcacctagcaatgtggaggaagccagacttaccaggggccccaaccctccagacccaccctgggctgagccttggagaagcagagcggcatacccatgatggccaccaggggccactgctggggcacagagggagctgcagggtgtagcctctgcagggcccctccagcctggtagcagagaccagatcctggtcacccccaaggaaaccaaaccctgccctaacctcctcccctgtatgccccaaatctatacctgtggggaagctgcctggagtcaagtgttcttccattcgcatctctgtgatctccagctagtccctacttcctggacctcagcctcccagctctccagagacacagcaggattaagtgactttcaaggactcttgtggtttggcgactctgggagactctgaaatagtcccaccacactctgctgatgtggaattgaggaaggggctaggatagaggtctttgagggaagagatatggagaaagagggtcaaacctgtgacctagatgtctatgactcccatctggagcatctggggcattagggaatgcagcatgactctcctgaggctactgtgtggtttaaacatttttccttaaaaaaaaaaaaaaaagacattttcctaacgtgacatgtatgtatccctttactttttttcatgggtttttggaaattttaaaaaattgtggtagcatccattcttgaaatgttcactaagcatcttctttgtttttttttttgaaacagggtctcactctgttgcccaggctagagtatagtggtgtgatcatagttcattacagcattgaactcttgggctcaagtgatcttcctgcctcagcctcccaagtagctagtattacaggcttgagccacctggccaatttttttatttttattttttatatagacaggatctccctgtgttgcccaggctggtctcaaactcctggcctgaagcgatcctctggcctcggtctcccacagtgctgggattataggcatgagccactgcttgcagcctaagcgcctcctatacaacagtcaccatgcttgatgctagtggtgcagagatgccctgtgatatatcaagacaagtatgagtttcttcctgggctcaactctgccttgtgctacatgctaggtgtgtgaccttgggcagtttacttgttctctctgagtgtcagttttctcatctgttaaatggggcagtagcacaaatctcccagaaatgttgcaaggattcaagtagataatgcatgcaaagggtctggcacacacagaagtctctgagtaactcttgatcaccttcctctttgggaatacacaccccttggagatgtgtgtgcctgtccctcatgtctgccaagcccataaaaagcatcaccctgggccagaaacccacaccttggcaccatgttcttagtccccacataggcattttagaattcaactttatttcttggcgagtctaaaaaattgaccctgtctgtgtttcatgccaagccatcaattaaagccatggagcagcttacaaggtgacacttgccaggataaataggcattggcggccacggaagtgatgccaggactggggatagagcttaggccactggcatggtggcctgccatttgtccctgatccttgccaccagcatggaggcctggattcatggtgctgaccatgagaggatgtgggggtggagaagctccccctgggaggggaaaggagggatggctgggcttgggtgtggagctggttctcagaaaaggtgcccaaaaggctctggagagggcattgcaggctccctgcccgccccacccagcctcccctccctgacaagacagtcaagcagctgcctgccagccggcctgagcttagtcttgggggaataaaaacctcttgaagagattcagaaatgttccctttggcagctaaaaaaaaccttacactcctgctgagtctgtgggctgaggagggactgagggggcgtttggcctctgcagcagcggcagaaggcttgcggatggaggggaaaagggagcagcctggagagccagagttcttgggttttctctgttgttttgccatcatctttctgtcactccctgactctctcctgcagattgtcttttagggaggtactgggggacttggttccattcatgactttaggttccaaaatgaaagataagccatggggcagggccagcttctcttcattatactgtccttagggcccagggtggtgcctgatgtgaagtaagtgcttgataaagattcattggatgaactgaaggaaggaagaacattctttgagttccttcatgctcaagcacctctcagtcatttggacgttattttcaccctgtttgctgttgtagattctcatccgtccaggctaatatctggacaccagggttgaatacaatggctcttggtgatttgggattctgaggattgggccacacccatgcatccttctcactcaggattgcaccacttgtgtggggactgcccagagctcacttcaagctccagaaaatgactgctcatcccttccacctcccaccagccacctcacctttaggagactatatctgaactaacttcctgggaccccatagagcaaccccagatattaccagtcagtgcctgggtttaggtgtactgaagccagcttgtaccagttccccagagccaattgttagcccctcttcctaactctgtggtcagtgacatcagattggtagattgaaagtggccatgataggaggctttataccagggaaattggcaaacaccacacatcggtgtccccttcctccgaaagccagttgttaaacatttaccagcacaaccctggatagggggtttcaggcagatgttccagctcatctcaaccacgagaaatcttgcccaggacctctgctatgagaagcagggcctccccaaaacaaagccagaggtagaggcagttccttgggggctctgaaaggagtgcacagacacagaaagccatgcctgtaccccctgccaggatctggggttcagagggctcaatggcacatgtccagggcctttgagagggcccattctgttggttgtctttgggaaagggaggaggaaggtgactatcatggcccagggactagcctcctggggacactgtcaatctccacttcctgacccccaggatcccagcattaagttctcttcactcacccagctcttccttctctccctaccagacccagagtcccagagaaagaggacagtgcagaatgtcctggatctccggcagaacctggaagagaccatgtccagcctgcgagggtcccaggtgactcacaggtaagctcgagctgcagagagggtcatgccctctgccttcctggctctccaccccattctggagggcagggcccccgggtccctccacacctctgccaggtcagccaggtggcctgatgcgtggagccactgcagaaggaggaggaaatccatttatctcaacaagagaagcttggctttgtcttctgtctgcttgtgcctgaacatttcatttcatttcagcaaatcagcttgaaaatcactagcttaggagccaggaagtggaagccattacacagctcaatgtgtgatctttgatagtcagtctccttcattagacctctgtctcctcaatctgtcaagagaaggtttactaaatgctctcttcctgttcctaagtctccattaaactaggggtctagaatcaattcccttctcaacacctgggtcttttcactcttgtgtcagttaggtgccccctggcctcttctacgagccactgagggaggcttgagtgctcaacagggcccacacagtgtcacccagctccatgccctgttaggtgtgtccccctagcccactccctgcagagacctcatagcctccagctgcatggggcactcagccttcccacggcacctctctctggagcaaagtcctggccacaggctctgctgtgactcagaatttcccttgctggctccttggactgcccagatgagctcatgctgtcagctccaagtggggcagagggctgggctaagctctggggacagcgggaggcagaacagacagccagattgggaaatcatggggggtgtggggcaggaaggctgtgtgagggctaggaagcctccccagttagactggaagtagattcctctccaactcctggggctggaaaattaagagcaaagttgggacacaggggcagtggaaaaggactttctttagcccagggtgtggccatttgggattctgaggatgggaccacacccatggacatatttacataccaccaatgacaaagaactcattacctttctttttttatttttaacataggctttttaaaaatattttgttattatttttaaagaccgagtctcattctgtcgcccactgcctcagcctcccgagtagctgggattacagctgtgtgccatcacgcccagctaatttttgtatttttagtagagatggggtttcaccatgttggccaggccagtctcaaactcctggcctcaagtgatccacacgccttggcctcccaaagtgctgggattacaggcgtgagccaccgcgcccggccaactcactacctttcagtcaccccggtgcattgtgggattgcagcaactctgatgtggaactgcacttagtcttaagtagctttcagccgttggctgtagttcttcctgcttagatgacccttctccttctccttccttgtactactcctccccctatccccagcccatgcccgcatcttggacactcagccctttactcccagacatctcgagtattttaaatggtaagataaatcaaaactctctggggattacctctgctcaggccagcagaaccctgactactgaaagggaggtgaccaaggaagtcctggaaaaaggtggatggtgggggctccaggacccccttacatctgtcccttactgccatccctcatagccccaagcccccagcaggagcccaagtgaagcagggatctggcagagcttggcttatcagtttaggacccagcggatgaaatcttggacatctgccttcccccatccaaggaaattgttggaacatctctcagcaccaagtcacccaccagcctcatgccaaagacaccagaaagtgcttagttgctgagagggccacaccccaaatgactcactcacaggagtaggagagaagtagcagctccagcctcctggtgccactgactcagagcagccagcccccagtccctccgttaagccggacagcttgaccctaggcaggcgctattggttttctgcttctagtgggaaaggggaggcttcaatcaagccttttgcataatgctgactggtttagggggagcgtctagggcctctggcttctgcctccctttataggaaaggaaccaagagccccggagctggtttttgtgtttactgtggacctagagccacttcctctcataggctttggtttatattattcctgttccacactggtagccaaaacaatgattccctgactttttatggctcttttttttttttttttgagacagagtctcactgtctcccaggctggagtgccttggcatgatctcagctcactgcaacctctgtctcccaggtcaagcgattcttctgcctcagcctctgaagtagctgggactacaggtgcgtgccaccacaccggctaatttttgtatttttagtagagatggggtttcaccatgttggccaggctggtctagaactcctgacctcaggtaatccacccacttcggccacccaaagtgctgggattacaggtgtgagccaccacgccctgccggctcttttactttttaaagggctttctatcaatgagcccttcccttagccctggaagtagacaggatatatacatactccctgggttagagaatgaggctgggggcagggaggcacctgccagagtcacgctggctgatgagggtaggttctgtactctgcatgctcagaacccatgccagctgtgtgccaggcacagcgctgggcactggctccccagaacacacacaagcttcatcctcggagcttatggtccagtgtgtgcttcctgcaaggctgttttcacccaggaactcccaggataactggattccattccttttcagaagcctttactcctgtgctgcttcctcaatttctactggttcatttcccccagcgaggagagtctgggtcagactgtggctggagaggaaatgaaactgtgtcctccccagagaaaggcaagcctgaagggtgggtgcagggctggaattcaagaactgaggatctgagctagaatccccctcaccaagcttaagtctagagatgtctagagatgtgtttgggggaactgaaaaaaaaagagagagctgtggaataggggaagaggcaattttagtacaaataactaaacaggggcaggccaggaatagaattgaggaacccagatgctgagtgcagccctcactcccacactagtatataaccatggtgtaggctaactacccaaaccagcttccctggagatccccgccaccctcttagtatggttagcatcatcctcttcctcccctgtctcatcccatggtcaaggtcagcttgcttttatcaagcacttactgcacagggcgctggactgagttttctgatgagaacttccttgctttttactcacacatccatcgtgggtttgctcctctttgattcattctagagcaccagctctaggccaggtgccatgcaaagtgctgaaataccgtggtgagtgagcaaggcagacaaagtcgcaccatcactacagtctctggcttcggggcacatcggtttctgtccaaggagatgtgatgtctaggtccacagtaattagaagccgaaacaagacactgtatgaggcagagctgcagaacacaaaggggttcctaaagggctgccagaagcagggtgcagtggctcacgccagtaaccccagcactgtgggaggccgaggtgggaggattgcttgagttcaggagttcaagaccagcctggacaacatggcaaaaccccatctctataaaaaatacaaaaattagccagatgtgctcatgtgtgcctgtcgtccctgctactttggggctgaggcaggagggtcacttgagctcgggaggtcaaggctgcagtgagccgtgtttgcaccactacactccagcctaggcaacagagtgagaccctgtctcaaaaataagtaaataagtaaaaagagttggcagggccaggaggggagccgctgggcatggacacggtcaggaagccctccagagggccagaagcagctgccactgattgccctgactggccagggcctcccccatcttgcccacaggactactgccaggaccccagcacactcagtttcaagagcgtttggatccctcaagttctgctggttagaaaataagaccgtattttctcaggtccaatagagacaactttggaaatttttcttcttttcaaggaacttgatagaaaccagaatggaaaaatcaatgtcccactcccattccagcccccaaagtggctaagcaatggatgtgttcacagagcagtgattgcttgggctcatgtaactcatgtccagccacagattgcctcagttgccccagctttcttggccaccaaaccccgtttcgcttacttagtcctgtctggcttaattaggataagttatggagaccctgcctgaggctgatttgggctggccccactgctaggctagatggaattatgggtctcagcctgaacccaagtccaagccaccccttcaaccagattccagttgtatttcctctctgcagcccgcctggccctatctccttccctagtcccccaggttcccctagtctcaggccatccagcactcacctgggcattgctcccttggcctggtctagcagggcctgaggcttgagactctggacatttggcttcacccccatgtctggttccctgtgtcctctcctttgtccagttaaggctgcttctattctctggggaggcttatttcccctgctgccctaggcctgtggcttggaccagtcttactggggacctgccatacatcccagattcccaaagcttttcctatactctctgcactctacttcagctttcctatatatgatgtttgggaatcagctagccctcagctaattactagaagagaggtgatggacacaccattaacaaaatgaccaaggccttctaagctcaagtgaccagtctctcccacttgcctccaggtctgttgaccccttccatataccaggcactgtgttctgtctgtacatatgtgatccttacaactctataaggtagatgttatgccattatccccattgtacagatggggaaactgaagctttagttatttactttccttgggctcctttactaaccaataccaaaaaagaattcaaacctaggtcatattacacaatctagggtcttaacagtatacaggatttcttccctagccacttaattaagatcatttcctttgtcaaacagataacgtatcacaaaggtaacacacaaccagaggcctcatggaggaggtggagcttgggcaggtggggaggaggtgacagggcctgtgggtggaggggaggcattgctggggtgcatgtgaggggacagggcacacggcggctgtgccaaggactaagtagtgccttctgctctccacccagctccctggagatgacctgctacgacagcgatgatgccaacccacgcagcgtgtccagcctctccaaccgctcgtcccctctgtcatggcgctatggccagtccagtccgcggctgcaggctggtgacgcgccctctgtgggtgggagctgccgctcggaggggacgcccgcctggtacatgcacggcgaacgggcccactactcccacaccatgcccatgcgcagccccagcaagctcagccatatctcccgcctggagctggtcgaatccctggactcggatgaggtggacctcaagtccggctacatgagcgacagtgacctcatgggcaagaccatgacggaggatgatgacatcactaccgggtaagcgcaggggcttcttggatggcgggggaggatggtggaaagaccactgggatgcgacgccttaaaagtggagtggaacccaaaacgggttttggtttgctgtgctgctatgaaagtacacaaaagtgtgctgtgtacactttgtgattgcctctgaaattcgatgtggtttattctagacttgggtgtggtgtaggcagggcctacatccaaggagctgattggtcaatgaaggcgcctccctctcattggtctctgtggctgtcattctgtcaccctcctccctggctctttgccctcaataaactggctcaaagagccttggaaaagcattttattcccagctcttatgcgaactctgtgtagaccctggacaactaaatctgctttcccatttgcaaaaaaaaaaaaaaccaaaaaggttattaacatcgtatctgtctacctaagaagagaaaatgagagcttgtgggtgaaatcgctagtcaaacagtgagtagcagcagtagctccacttcctttgccaggggttcgtaacccctcagttccctatccgacccctgtggtcctcagtgtctgctccttgggtttcttcctgtgcaaaccttctaccaatcatgcaacttcctaatccctacccagcgtgtcaaatccttctttcctgccttttgccctgcagggaccctcatcttcttatatttttctgccttaattgacagagttgtgcctatgccttccaaccttggaagagttggccaggaccccaagcccccagcacttcattcttgctgtcctctcctggtctgggaggatagaagagaggataggaagaatgaagtgctgggcgcttagggggatcctggccaactcttccaagcccagagacaggagagaggcagtggttctggaagcttctctggagcacctcttagcctactgccactttcactctcccttcttggtttgctggtgccctcctccgccaaggggccatacaagtagcagcagcatcccttcccttccttctcagggacttaatatcttactgccagggcctgcctctccccaataaaaatcccagacttcaagggagtggaaagtagcctctcctcggaaaagacgagagccaagctccaggccatccactgttccccacccccatctccacccctgcagagaacttggagggatctggttagggcttgtccagctgatgaggctgctctggagcaaaacaactgacgcatgaatggagttgtttactgcctgttaaatcccaggggccagcccaacctcgcgctcacgctcagatccaccagcctggagctgggaccagagaaaagccatgcagtgcacagatcctgagctccttctgtggtcagaggcctgtgctgggcaggaaggagagccaaggtgtgtgaggagctgctccacacagcctctgccctaggaagctgccagggactgcctgaggaagtgtcaggtcactgccctcctctgagaatcccaggagggtgcagagggtggcacaagccctgcggggctgagtctttagaaagtcccccatgtgttagaagaaccatagccctagaccctagggagcttccagacaggggaagtgataggacccctgcccagcacagctcccagattgatggaggtgacggggcccctgcccagcacagctcccaaactgatggaaacgagatccctctgagagcccttcaccccaccaacccacctgatggccatggcagaaaataccccaagtgttgcaaggtacaggagccctgcttggagacgtcgcagtctgaggaaggtggcaggacttccggctcttaactagctgtatgagcttgagcaaactggttcacctccccaggctttctttcatttgtctatctgtcaaatgcagataacagtagaacttatctcagggttctgatgaggattcaatgggttaatatatgtaaagtacttagaataattcctggctcattgtaaatgctcactaaatgatagctattatttttgttgctatattatttttgttgttattagagtcccagactgatggagagacatgattcttaccgtcaggggtgtgtagtctgaccagagtcccacttactcagcatcagcagcaaagacagatctagtagcagctggtcaatcccaggggcatagataataggctgtgggggcatggaatgcagggggaaagggtaggaaagaccccctttatcccccctctaacacccttgctttatcctccttcctctggacaggatgtgtgttcccgaatccattttttaaaaattagagttcaccgagactagcatgaataagaacttgccttccctgcacagcccccagctgtaagccttgggaagcctggagtttgcatggggaacacagaatcaattgttggcatggcaatatccataaagtggaccttcctgtaaactgtgatgctagtttacaagatcatttcacatgcattttttatggtcaaccttcagttagcagtaacccttaacacgagtttgttaacttccctgctgggactgtaaacatggccatctgagaagacagagttgaagggaatcaacttataatccccagtaatttaatgtaaacagtcactcctcgattatgtgttttcatggttaagtgttgttgttgttttaattagtaacagggcaacctggattccagcgactctttaagtgaacatgcaaacctgagctgtcgttcctcagcctcctgttggtcttctcatccccactgtggtttccatctagatgttataatttagaaaatgtcctatttcttaaaaaactgtttttctagtcattaaaggggtaggactgttccctgtagggatagcttcagcgcttccctccacactgcgacacccctgcccacccatcagcctcggcccactgcaatttactttcccacctcccaagagctcccagcactgggccagcagaaaagctgatctttccccactgggtgacataatcggctccaagctatccgagtgagccataaaagatgacagtaattctggcgctttctccacactctgtttatctgtggggggatcatccctttgacggctcttcccaagcccctgttcagtctcaagtcagctctccctactccctccagtgaccaggcccctttcaggtcattagtcagcaaaccaaagaaggcaaattcttcaaactgaagtcagcaaactagaaggaagaaagtgactctgatgctgctaccagaataatcatacatgttttttaaaaaggatttatttttaaaaattgtggttatatatatataacataaaatttaccattttatgttaaccattttaaagtgtacagtttagtggcattcagtacattcacactgctgtgtaaccatcatcacgtccatctccagaattctgtcttctccccaaagagaaactgtacccattaaacagtagctaccctttcctcctcccttcagctcctgggagccaccattctacttttcgtctctatgaatttgactactctaggtaacccatataagtggaatcatacagtctttgttgttgttgttgtttaatgactggcttatttacttagcataatgtcatcagggagcatttatgttgtagcgttagaatttcattcttttttcaggttgaactctattctgttgtaggtatacgccacattttgtttacccattcatctgttcatgggttgttaccaccttttggctattgtgaagaatgttgctctgaaaattagtgtccaaatattattcaagtccctgctttcggttctttttgggtatatacctggaaatggaattgctgtatcatatggtaattctatgtgttttttgtttgtttgtttgtttgtttgttttgaggaaccaccataccgttttccacaatggctgcaccatttgatatttctaccagcaatgaatgagggttctaatttctccgaattctccccaacatttactattttctgttttgtttgtatttatagtagccatcctggccaggcgcggtggctcacacctgtaatcccagcactttgggaggctgggttgggtagatcacttgaggtcaggagttggagaccagtccggccaactggtgtggggtgaaaccccatctctaccaaaactacaaaaactagctggcgtggtggtgcgtgcctgtaataccagctattcgggaggctgacacaggagaattgctttaacccaggaggcggaggttgcagagagtcgagattgcaccactgcactccagcctgggcgacagagcgagactccaactcaaaaaaagaaaaaacccatcctgatggaggtgaagtggttatctcattgtggttttgatttctgtagtgattagtaatatggagcagctttatgtacttattagctatttgtacatcttctttggagagatatctattcaagtcctttgcccatttttaaattgtgttgtttaatttctttttgagtgttaagagttctttatatatgctagatatgaaccttttatcacatgtatgatttggagatattttctttcattctgtgtattgggtttccttttcattctgtagatgtatcctttgatgcacaaaagctttttatttagatgaaatccattttatctgtttttttcttttgttggctatgctttgagtgtcatatctaagaaatcactgcaaaatctaacgccatgcagcttttcccctacgttttcttctgagagttttatagctgatggggttttttggaaatacaaattctaagcctcagacttaccaatgcagaatctctgctacccagaaagccacatttttctaaagcttctcagtaattttagactagtccatgttcctatctagtacaataatcttatctacagtatccctgacagacagtctttcatccttggcttacataggcacagtgatgggaagcttattccatatcatacagaattaagttataagaaagtttctaaatattcaactgaaatctgtttcgctgtaacttctacctattgattcaaattctgtcatctgggaaaaatagaataagggtgtaactcttcatccaaatatttcaacatgttcttaatatagctcaaatattctctagaccaaaaagaaaaagaaaaagtccctagcttatttcagtacttttttcaatgacccagtttttcgaacctttcattgtcctggtcaccctcctctggaagctctcaggacgtcaatgaccctcttaaaatttggcacctagactgatcacccgcttgacactagaagtagtctcgccagggtaatatccaaatcatgacactgcagacaactttgagttggctgctgactgtcctagatgacagctcgggccatttttaccacttggaaatacaaaaggaatttgtttttctaaaaataggaaagtctggaatttaatctaaataagaagataagtttcacagccatctgtccttccatccctggcatccattggagtgggaggggaatagaggatgggtacccatacagaggtggatgcaggcactgagtagaggaggcacacgtgcctgatgggaggaggtcagagggccctccatcttctccctactttaatgtgggtttccctctcaatgtgtccatttttgtgtatgtgaatgggtgagctgtgtctgagctgggtggcagtaatggatggggacttgcaggccagtgcagtaacactactgccaagtcccacaactccagagggtgcccttcacattacatagaggtgtgaggtccacagccctgacaggactgctgtcctgcaacctatgccaagggccacagggccttagacagagtcagcaggctccatcttgagcgagtgctgtaggagtgtgtcgggaacagaaggattccttggcgacttctgccacaccctggctctctcatcaggtggcttcctgccctccgtgtgtggctggatgttccagtcttcttatttttctcttcaccgccccttcctccactccccagcctgtcctcttgaactgtgcttgggggctcagaacagatgggattcgtttcctctttggctctgaagtgtcctgacgttgaaaaatgtcaaataaaataaactgtaggcccctgccttctcccaggctggctctgtgctcccagaatcagcgagctcaagccttaaagagacacttccagccttgctgacagggccccagcctctgcagctaccctcctgagaaggagctgcattcactgccctcccacttggctcatgtctgactctcagacctcaagatacccaacccagcccccctcatcgataagaattctcttgcaatgagcactgggtttatgtggtttgtacaaagagaagagaccccttttgaatttgaatggacaaggagtagagttgtcccacttcttatgtcttcttctgcctttgccttctctgtttcctggtaggtctttaggaatcccgcctagtgggacagctgggccaggcctagtttttgctcatggaacccaaggatagaagcagagagcagtagggggccatcctcgggaggacccaacattcaagttcaggaaggaaactcagtttctctcctgaaaggacttcaaatctaaaagggaggtaggcagcctgggcaacaaagtgataccctgggcatggcagcacgtgcctatggatagtctcaactacctgggaggctgagacaagaggatcacttgagcccaggagttggggcgggggggctacagtgagctatgattgtgccactgcactccagcccgggtgacagagcaagactccgtctcttaaaaaaaaaaaacatgaataagtgggctaggcgcagtggcttatgtctgtaatcccagcactttgggagtccagggagagaggatcgcttgagaccaggagttcaagactaggcctgggcaacatagcaagacactgtttctacaaaaaaaattaaaacttaactgggcatggtggcatgtgcctgtggtcccggctactcaggaggctgaagagggagaatcccttgagcccaggagttgaggttgcagtgagctatgatcacacccctgcacaccagcctgggcgacaaagaccctgtctctagaaagttaaataaattttaaaaattaaaataaaatagaaaggtagggtacttattgggtccacagtaaaggaagcagtatgtagttgaagtagatgatagctgttgcttcattgaagataatatctaacaattagaatgctgactccagattcatacacatagccttggctgatgcttctttgtggtgtagggaagaagcactgggctaattctgagatctggagttcaatcctaagcacggctctaacttgctgtggcactgagaaagccacctagcctctctgagtcttagtttgttcatttgtaaaaaaggtaatcatttttgccttaagaggatcaaatcgaaaagaatagtaagagtgctttgaaaagtataaagagctgtcagtttgaaatctattattctggttgggtgtggtggcttatgcctgtaatcccagcacgttgggaggccgaggtgggtagatgtcctgaggtcaggagttcaagaccagcctgaccaacaacaacatgatgaaaacccatctctactaaaaatacaaaattagccagtgtggtggtgcacacctgtaatcccagctgctcaggaggctgaggcaggagaattgcttgaacccaggaggtggaagttgtagtgagccaagatcgcaccactccactccagcctgggcaacaagagcaaaactccatctcaaaaaaaaaaaaaaaaaatagaaatctattattctgatctccatgtaatgttctcttcatttagctgatggcttctgccttaattaggggtggctagagtatcaaaataagatttcttaaacttggaagatgaggacattaaatttgggctttgacttaggtttcaaggaatgcttcacaacacggtcttgatattcttttaatcctgtagtgtgcagttaaataaacagacttttgagaacaggcttatcaacacaggcataccacagatgggcagagccatagcatggtttagagtgaaggctcacagctaggctgcctgtgtttgtgtcctgtctcttttccttcctagctctgtgagtttggatgagtttttcacctccctctgcttgtttcctcagccgaaaactgtggagagaagtggtgcctactctgtaagattaatgtgaggattaaattagttaatactcttatgttagatatcataaatgctgtcttatgttagatatcatacatgctcaacaaatgctggctctccttcatcagccatttgatgatagacattagcaagctactggacctaagttgtcacagacacattctagatgataatacattctttgacaaagaatgtattaaccttcatgcttgaaaatgatctttctgatcctcacaggaagaatgacataataagttgtttgccaagaaagatggatttgttttgacccatttttacctgttcacacaatgttctcgtgcagcaaatggtgcccatctgtggtttggggtgagtatagcatgtgcttattgtgcagatagctaagctcactgcacacagagtcacacaagtgaccatgacctctttcccatcatgacttggctaattgggctgtcagtccttcactcaaacatgtttcttgcctatgaagaatgtcttgggctgggcacccccagaagctgaccttgagacaaggatttgggtgcaagtggtttatttggcaggtgcccagaaagtgctgacaggagtgggaaagtgagttaggggagagaaggaagccactacaggctatgttcatgtgcaggttactgctgtgggcaactggggcttacggatttctaggagatgacgtggaatacacctcagtgttgccccaccagaagggcaaggaagcatgggtatttatatgtcagctcccattcattattggctgagggcagctcctagagggcattgggtctgcgtttcaagcctgctgcacataggctgagaggaatccctgagttcgagtcacaggcgcccacagtcatgctcagacagcacatacaggaacagtgactgcagggggcataggtgggacacaaataccaccagttataaagaggaaagatgggaaggaaagacaagaggaaggtgtggagttagattcctgggtcagatgtgaacccctggctctcaaaacactccttctttttttctttttctttttttttgagacaggatctcactctgttgcacaggctagagttcagtggtgtaatcagggctcgtggcagcctctacctcctaggctcacatgatcctcccacctcagcctcctgagtagctgggactagaggcacacatcaccacacttggctagtatttaaatttttctgtagaagtccaggcgcagtggctcatgcctgtaatcccagcactttgggaggccgaagcaggtggatcacctgaggtcaggagttcaagaccagcctggccaacatggtgaaaccccgcctctactaaaaatacaaaaaaattagcctggtgtcgtggcaggctcctgtaatcctggctccttgggaggctgaggtaggagaatcacttgtacccagaatgtggagcttgcagtgagctgagatcatgccattacactccagcctgggcaagaagagtgaaactccatcgcaaaacaaaaaaaaaaaaaaaagaaaagaaaagaaaaaaaagacatctgtagagacagagtctcactatgttgcccaggctggtctcaaactcctgggctcaagcaatccccaatcccccctgaacctcccaaagtgctaagattacaggtgtgagccactacacccagcctccttaattcttaaaatagtgggcagcacccctcagtctgtgcagcattaatctggataacagtgtctgttcaaacccagcagggttggtgaaaggttggagtaagccaggtattccagaggggctgctggaggtattctagttgctatggcaactaatgctagctaaggagtgctccttcctctagtgtgtcctagtaacctacaattgagctgctggagttttcacctagtgtgatgacatgcaatttggttgacaatcaagatgggtaaggatcaaggaagctgttgagatgagcttggcttttcccccaccagctctgcccacctgtctacctgtccactgtctcccctctttaattgtcaaccttttccttatgttctgtgataagccagctgagcttgtgtggtgcctggaaattccatgtagtctgatattacagaaagaacacaagtttggaagtatgacaggcctggtgttcagatcccagctctgagtctttggaaaagctgtttatctattttaagcaagaatacgaatacggcaatagtattgttcttagcatgtagtgaaatatagtgtatgtaatacacttggtggccaggcacagtggctcacacctgtaatcccaacactttgggaggccaaggtggatcacttgaggtcgggagttcgagaccagcctggccaacatggtgaaaccccatttctactaaaaatacaaaaattagctgggcgtggtggcaggctcctgtagtcccagctacttgggaggctgaggcacgagaattgcttgaacctgggaggtggaggttgcagtgagcagagatcggactccatcttaaaaaataacacttggtggccaggtgcggtggctcacacctgtaatcccagcacttcgggaggccgaggcgggcagatcatgaggtcaggagatcgagaccatcctggctaacacggtgaaaccccgtctctactaaaaatacaaaaaattagccgggtgtggtggcgggagcctgtagtcccaggtactcgggaggctgaggcaggagaatggcgtgaacccgggaggtggagcttgcagtgagccaagatcgtgccactgcgctccagcctgggcgacagatcaaaactgtcttaaaaaaaaaataaaagaataaaaataacacttggcatgcagcaggtgtcagtaaatgttacctccatcccttctcttggttactcctagaaaaccaaagctataaaggccatcatctatggccaactattccgcctgggtggtgatgtccagttgcccacccatctttgcaaaatcccctccctccagggagcctttcctgattcatcacactggactctgggttgtcctggaacttgtgtgcataattcatactgcaagtaatttgcacttttatgattctctcgcaattgcatagcatgcatggtttgcacacactaatatggcattatcttatttaatgttaacagcactgtgaattagatattcttcccccctccaatttacaagtgaagaaattggaactcagattaactggcttgggaggatcatataactcaaagtggccccaccagaacagaacccaggcctctgcctctgacattctgggcacgttccagtgcacctactgcctcaccatgtgctccttgaagcctttccctctgtgtgcagcccttgtgtccctgaagcctgtgagcatgacaggggcagggatcacaggccttccactggagtaggagtttcccaaggacagagactctgtcttctctctctctgtttcccctcgacacctagcaatgtaggttctcaggccatgctgtcgactgaccaatgaatcattgttagagaccccctcctggaatgcccttacatgacctctccatcttccaggatagagtcttgctttggggagccacaaagtggccacagtcaggaattctggtccaagggcagaaggagcaacccaagcctctgtgaatacaagtccttgtttgactccagctcaaaggctgagctgtcccaggatgttcatgaggggccagctctggcctctgggctatcagatgtctctggccaggcagtaaaaggccattcactgcagctgaagaaaggccagcaggccaggcagagggacttacctacggaagtgttcagggttgggggtccaaagatgctgaaggactgaatggtggtcatctatatatcagtgtgacgatggaacaagcacaggaaaaggcataaaagtatagatttgcaaagcaggccagaggaaagagtcaggcccatagagaccgaaagcacatagctacattggaggcagatcgacactcactgaatatgcagggcaggatcacggagagacaaggtaggagaggctgacacgggggcatgtgcggtagaaaaacagagtcagcacgttcgtgatgtgcacaccaagcagtggaaatgagagacagacagatactgtgtgagacccatccaaacgtgtgtgagaggtggctggatacaaagaggctgtgtgtgcacaagatcgactgtttgaggacacaggcccgccgatgtgcagggggtgtgcggcaaccagacaggcacagagagtgtctgagaggtggagggacccctccagagaaacaagagtgaccttgtgctcagcctgagggttggggagtgacccagagcagggcgagtatattctcaccagcctaccccccttctcctttggccagctcctactaaaaggggtctgtgtcgtaccttgtctctttcttgtggggcatctccagcttgggagacaggaacaaagctctgacctagtccctgccctctttgactgctcaccctcttccagcccctctacccagcctcaatctctcattcttcctctactttgaagtctggcttctgtcttggcccctgtgggtttgatgacaaagggcagttcaggaatgacactatctacacatacatggccatatggacaatttcaggtggtgggacttgcagcagctggggttcccaggactgctgacattctgctgagtgttattagaagatcagggacagagcttatcatctggctgtcactgcccctttccaagccacagcgagcctccacagaggggccctgggggatagccagctgccctgtgctcatgctggagtgaactttcctctgatcttccctgttttctggatttagccagggaaaatacaagggagctccttgctccctgtgtgaggttccaactgagagatcccacccttcccagctctgatcagatacccctgaagtttggaaggcaacagctatacaatctctctctctctttttttttttcttcccctgagacaagcatcactctgtcacccaggctggggtgcagtggcacaatcatggttcactgcagccttgacttcttgggcccaagcaatcctcccgcctcagcctcccaagtagctgggactacaggcaagtgccacgatgctatttttaatccatgctaagtttaaaatgtaatacaggctaattcttaaattttaaaatacacactaatttttgtattttttttaattttggtagaggcagggttttaccatgctgcccaggcgggtctcaaactcctgggctcaagctatccacccaccttggcctcccaaagtgctgggattacaggcatgagtcaccatgtctggcttatacactctcttatatctccacaagtccttgtggttagtttcctgctcttgggaagtagagtagcaaagtagatggaacattctagagcccaactggtctggtataattttcagtttgctactcactacctatgtgcattacttagcctctttgtgcttcggtgtcattatctgaaaggaatgcccaccttgtgatatttgctcatacattccacaaacacttgtagaccacttaatatataccagacactgcagatgtggcaggaggaaaaataggcattgctcttaaactcatgtatgaaaagaaatggccaggtgtggtgggtcacgcctgtaatcccagcactttgggaggccaaggcgggtggatcacttgaggtcaggagttcaaaaccagcctggccaacatggcggaaccctgtgtctactaaaaatacaaaaattagctgggcatggtggcgcgtgcctgtaatcccagctcctcaggaggctgagacataagaattgcttgaacccaggaggcggaggttgcagtgagctgagatcataccactgtactccagcctgggcaacagagcgagactctgtctcaaaaaccaaaacaaaaaagaaatggcagggccaggcatggtggcttatgcctgtaatcccagcatttttggaggccaaggcgggcggatcatgaggtcaagagatcgagaccatcctggccaacatggtgaaaccccgtctctactaaaaatacaaaaaattagctgggcatggtgatgcgtgcctgtagtcccagctacttgggaggctgaggcaggagaatggcatgaacctgggaggcagagcttgcagtgagccgagattgagccactgcactccagcctgggtgacagagcgagactccttctcaaaaaagaaaaaagaaagtaatggcagtgctcgctttggcagcacatatactaaaattggaacaatacagagaagattagcatgtgcaaggatgacacccaaatctgtgaagccttctatatttaaaatatatatattaaattaaaaaaagagagaaaaagaaatggcaaacaagccaacagataaacatgcaataggttaggtggtgctgtgtgtcataaggaaaaataaagcagggtaaggggcagagagtgatggggtagcgggtatttgagagtggatagtcagggaaggcttctttgataaactgtgcagataactggggagagagctgtccaggcagacagaagagtatatgcaaaggcccagaggcaggaatcggcataagttcaaggaactgcagggaggtcagtgtggctgaagcagagttagcaagggggcaagtggccagaaatgaggtcacaggtagccagaggccatgtgtgccatgctgaggactttggcttttcttccaagagagaggaagctactggaggacttcagggagagggacgatgtgatccaacatgttttgcaaagggtctgtctggctactatgaggagagcagaccacagggacaccaggggaaccaggaagcatggaagggagactgctgcagttagctaagtgagaatggatggtggctcacaccagggatagaagtggaggtggggagaaggttttgaggattaaagaagataacattggccaggtgtgatggctcacacctctcatcctagccctttggaaggcttaggcgggcggattgcttgagcccaggagttcgagaccagcctgggcaacacagcaagactccttctgtacaaaaaattttaaaattagctggcgatgatggcttgcacctgtggtcccagcaactcaggaggctgaggtgggaggatcgcttgagtgattggagattgaggctggagtgagccgtgtccatgccactgcactccagcctgggtgacagagcaagaccctgtctcaaaaaagaaaaaaagaagaagaagaggaagaagaagaagaagaggaggaggaggaggaggaagaggaggaggaggaggaagaaggagaaggagaagaagaagaagaagaagaagaagaagaagaagaagaagaagaagatcatttacagtactttctcaatacattgtatgaggtttcatttgtgtttcccagagatttgggatccaaattagcaacggagaaccactggagtgcagtggcatgggtgcttaagctgatctgaaatgattgctcctggcctctcgaggtggagggtttgtacacacacaaacacacacacactcacacacaccctggcatctgcccagtgaccccaggtgagggtccatcaggcccttactggagagacagcccctctcccctaccccttcctatggtcctctgtctcatgttctcagaagcacacaaagccactgatgtgttgggatactggaagcaagataatcagctaggattactgagacggtagctcactatacaagatctggagggtctaccctctctcctgcccctcccaactgtggggtggtgagaaaggcaggtctcctcgaaggttatataaatatttgttgaacagtaacacagctgggagcaggaccccttcctccagctgtctgatttgctgccccagagaaatctcagctgggattagggctgagctctggaacactccactgtgcatctgctgacccccagtgcccccagttcaaactctcccatctaccttccaaacctgtcaatctgagccccacaccagggagggagttggcaagaagtggtgccattgactggtaaaaagaagcctgccccaggaatcaagacacctggattgtgtggaaggatcttgagctagtcacttgccctgtctgggcctaattttctcctctgtgaaaatgagcggtttgaactagatgctctctaaagtcctttttggctcaaacgttctggattttctgaccacatgaactgggtctgatccagggtacctggcatttcctgcaggaagggcctggaggttgaggaggaaagacagcagccatgctggtctaggaaaggagagaagcgccccacattcatgcatgaggaactctggaagacacgggcattgctaatggtaaagaaatccattgcctggacctggacccaatgtcactgtggcttctaaacctgtggccaaacaaggccactctattattaatctttcttgctgttaatgttctaaagcaagtataatagtacctgcctcaccttagatcactaggttatttgaaaatagaataaactcatggatgtgaaaatgctttgaaaacttctacacagagactggaaattattttcttagacatctgtcaaggtcacgacagatgattccctcaggattcagtagggtcattgggggatctgggagcaggtttttgaaagctgggattaaggatgtggccaggtaattccccattgatcctgccacagtatggaaagggttaattcactgaagtccctctcccaattcctttctctttcctttccctgcccctccattctggtttaattctttctctttttaatcactctgctgtaaaatgcccattgtcctgcttctgccactatgctatcaactaggcctggctaggatgcagaggagtcacaggcccagctatcacccacaggcccagagggacattctctgactggccaaaacttgttcaaggacaggcttttccatctgaggaatgaaatagccttatgattgatgggaacgagaagacatgagggcaggtcagtggacagagttgtggatacctaccttgggaccctaatcctctcaagggtctcatttctggggctcaccaggaaatcgggtatgtgatcaggccccagacaggtgaccctggaacccagaaacccacaagcaagcaacactggaatttagagcacaccaaactgcttctcaagtctttccctttttttcttaccccattctaaccaaccacatcaacctctgagattattgtccaggagacaaggagagcctcccataaactatctttcgatgtctctgttggaaatgaaacttcagccaaaagaaccttgggcctcagccaaggtgactccagagatcctttgaggtggggaaggtgtgggaaggaagagagaattaccccctcccaggaatctggctgagggacctcatgcatattagcctgcattctgccctctgctttggacatttcctggactttctatgcctcagtttcccccttgtaaagagctgctgtgagagtgctggcacgggagacaaatgagatcatggctcctaagggctttttgaagagaagccccacaggagcacagaggaagcctatgtgagatagacaggcctttttcctctctccctctttggctgggttttctttctggacaagtgcctgactcccagctccctttcagcaggtgtcatcctcctctaccatgtgtccctccgctgccccccactccctgcaccccaggctacagtcatgctcagagtcaccccttcattgcccatcccccaccctccacctccactgtagtcaagacaaccgtgccaccatatcccttccactctgccacaccctcatgacaggcaaggtcagggccccttcaagcgcagaagctccccattgacaggggaggctgtgttttcatattttcacaaaaaactcccagacaacatttctcttcagtgctgctgccaattacccaaagtgccctgacctgaaaatagcaggtgctaatttgcatgttacttatttaagtagcaacgcttctgggatcctgctccttcccctataaaagctcaccataacctccacgaagcagtaaggtagacactactgtgggacttaccgtcctcatcaagaaggaaagaggaacttatagcaggaaacttgccttctgttgggttctggcagctcaggaatcaatcccaagaaggaggtgatttagagaccctataccccagaatgttcagtggggactcagctgagagcctctcccctgagctgagctactggctgagacttgttctctttatggtttgctcctccagtccctgtgtgaggtgagacacacagggaggagggtggaaggaagggtgggcaggcctccaggtatgaggatgagggatggagccacatggtctctggggggctgcgagggaatgttcaggaacagctcagctccatgcacaagacccctgtccctccaagtaaacccctgtgcctacccctttcaggcctcagatctccctccttccaggccctccctgctgagaaaaccacaaaggaggaaaccttatggaaagcttacagctagatctggagaaaaacatcccctgctgatgacattcctttggctgagacaaagtcattttactcaggattccatgctggctgaggctaaagagaatcccttatggcacgtcactgtaagctgttccccagatgacccaggccagctccagcacagctgcgtggacagagcctccctagagaactcattgtgctcaccccgtttcgggtggtggtgaggatgggaggctcaggacattaccagaacaggagagccaggatagggcttggccagggacatcatcctggaatgaaatggaagaatatgtgagagagaaccgtctgccttgctctgattccccctcagagctggtctgcttgggagctggtgcatcttttctaagtcttactacccaaacctcttagaacagagtaaagggaataaaaatctgtctgccccccatgctagggggaagtctgagggattggcgctaggatcactgcagctctttactcccctttgatctcaaagcatatttggaaaacttggccacaatgtgcaacctcagaaacaaagacccttcctccaacttaaactgttccattctccagaaacagaggtccctctgctgaggttttctgtcctctaagaactgtggttcatcactctagagctgcagccccaggtcagtggcattgggcagccagagtagtaggggcagaggggctgtacagttacccaaagtgcattgacctgtgggccgaaaatagtaggggcagcctgcattgctggggggcttgggaaaggattgttcctaggactcaaagcaccacccagacctctttaaaggcagtgagagcgaggaggaggagttcaggagtgcaaacctctcccttaacatctgtaaaaactgaggcctggaaagataggcttaagagaacacatgtgacctggatctgtatgtgtggctcagtcacatcaaactgcccaaacactagagactactgctctgtggtcccaagtcatcttagttcagcactttagggggcttaaaaaaatgctactgttgtttttgtcgcttaaagaaactgcaggtataatttgtccatctctaaaatgtaggcttcccagtttgcccagttcacattggcattgggacccaaccatagacacttagccccttccaggagccaagagtgagaactggaggaagcaagggtgagggcagcaggctaattccccccacagggctcctttctctggaaccaggagagtgaagttaccaggaggaccctcaggggggaggaacccaatgggaggaccctgctactggatcccactgtttttttcctaaccggtcagttgaaaatgcatcctggataaagacacagatccttgggtggcgtgagctgttgtttctctcccacaatcttcccccagcaagcacacctcacctaatctgtggtctcctgaatgctggagagatgttaggccccaccccctgaggttgttaggacatcggaaggtcgcgccatcctacttggctcccggctgtgagcagaagggtcgtgagccaacctgtggtaatatgcacccctatcggaccttcgtttcccaccacatccctccacggaccttgttttaggcaatgcactgacccatgctccgatttttagaaatttctaaaagcctggaaaggagccaggaggaggccgggaggaagccctctatggagaaggttctgcccaggcctccccaactccttacccacccgtgccccagagagaagtggctcgctgctcacaccccctcctgccagtgcagcgcgagtaagagcgcccaagggaccacagctggcatcccaggggttaatttcggagcagcccaggtggaggtcgagcccccaaccccgtcggcacctccaggcttccgaggccaccggaacggaggaggcttcggtggctctttgtctacctgctctgggtgttaaagagcccgctcgcagcctgcatcgccggggctcgggacagaagtcagcggcggggaaatggggctctgtcactttaagtacagctggagccgtaagtacaagccctggtggtggggagaaaagggagcggagggcaggcgagggttaggtttccgaccctccgcgtggcccacagctcataccttttcgggtgtccccgggtgtcaggcgagagcggtcctggggggcgctgggtgcccacccggtgaatggccgcctgagccggggaagatgcttcatctgcccctgcccagatccggaagaacggtgaatttcccccgcaggtaagcgcccccacccccctggcctcaccgccagaccgcagagctggggtcgggtttgtggcacccccagccccgccgcagccccccagttccgccgcagctgcagtctcaggggcagtgggtgtggggtccgcaagaaggagggtcttggccgcgctcgcttttccgccagagaggagtgcctgcgccgccggagcctccgagctcctggacgtttggcttacgggcatctggggctgggagtgggtgtgtggagggctctagggagtggaaagggaaggaaaggagcttaggcgcccaggagacctggacggagctgagacaatagcgcaacttgattgaacttcgatggttgcggctgtggcgcgtgggggcccggcctgtgagggtcgggggtcctggggaccaggcgggtggaaggaggaggggcttgcagccccaggtcggccctgccaaggtcaccctagttccggaagctccgggggtcgtcctggggtgaaaggaggtggtgggaggcggaaggatgaaacgggggagggaggggacgttgaatttgtgaccgtactgctggctggatacttccgagagagagtgaagcctggtgctctaccctgggaaggggtgaaaaatcggagagccgggtaatttggggagacgcacagtgagggactggtcttgtaaggtgagggcaaggcacagaggctccttcataaaggggaagtgagtgtaaccacagctggccctgggactctctgagctgacttggaaactgcacttccaagggagaattaggaaattccaccggcctgagaaagggggctggggtttctgggattttttagcggggtgggcaggggaggcttcccatctcactattctcaccccatatacactctccttcccctcagcctcccgcagacctgggaagttggaggttgggccctatgcctggtgctgtggccactcccacctcaaatctcaggcagcccagacctgcaccctgtaacatgctcctgcgtcctcatattgctcgaagggagccccaagtaccctccaggggctcaattacaactgtgcacacaaaggtctagggtaaaagcaaagaattgggcaaggcctgaaacgagaggcatcttctgcctctgttcctgccctgcaagaccatgggcaccaggagccccttggaagccagaggcccgctgactccaaacttttttcccctaccacagtatgacagaatgcagccctgaagcccccctggaatgtgacttgggtccttggggtcactttgccaaaatggctggtaggtatggtggtgtcataaaaggaaccagtttatgagcagagaataaacccatgtagggacctcttacttcaggtgagatcctgggctgagtcctggacagctcactgggccctggagaaggtgaagggaaggactgttcataacctcctctcctccctccacctctgccaccccaactagagcctacttcagatccacatagggtgtgcccaaggaaaattataattgccacccaaacaatatttgcactgcctctactcttaaattctttgcttccccaatgcctggagggtgtgcaagtcctctaagtgaccccaatgccctttctctgagcctatcactctttccttcctactcaacagcctttctaggctacctcattctttcttttgaattgatattctccccgcctccttcctttacccaactccatctcatgggaacctgcccttataaagagagcttagtgccctatcctggggccatagctattgaatactcacctagctcattaccagaaacagacttctgggcaggtgtgccagggcgggtacctgtctgccatagcccaggttgaggagcaggtcatgttacacctacccagcctactagggtggagctgggttaggcctgtggtttcctttccatccaagcccaagactttcaggtcaattgctattggtaggcaaggagacaggggatgttgtaaagtggaggtcattcctcgaattgccacacttcacatataaaatttaactagcctggctccaattcacagagggggagcttagcccaagcctttgctctggggagggctcaaaactttccctgtaaatgatgttaggctgaggccagcagggatcaaagagatgcttaccctccagaatcaggtttcccttaaactccaaaggaggcagcactgggaagatgtgagggtatttgggtgaatgacttaattggccctcaggtatctccatgaccagctcttgatgagtgagctgtgatcagtccatggcctcttcattgtttcagagcagatgtatttcttctctggatgcctgggattcttccatctatcatggaagcctgtgcccacaagcactgttcttgcgtatctcaaacattatggtctctcctggagactccttctcttcctgtcccagcaaacactgttcttcagtgtcttccaagcatgaagtccaggcatctatcccattcagcactcctagactccctcctggaaagaacccttagctagagcctggggatcagtgggaacaagactcgctcactacggttgcctcactcaacccacagagactccctggggcagagggcttcggcttggcacaaactcagcctctgtgagaggacagaatacctagggacagccaagccaatgagctgcttctcgttagaggattttatgggactaggcacacacaccacaggcaaaccacacttgctggattaacctcttcctgcaaagcccctgccctgagcttgggaggaatgagggagggacttaatcagcagaaggcatcttaataggggggacagtccgtgtctaacatctcagctaatcaccttttctcattttaacatgaggctgtaaaacacaagccatactaagtgctttgtaaccattttttcatttaatcttcacaacaaccgtatgaggtatatattattatcatcccatttcacagatgaagaaactgaggcacaaggaggttaagtaagcatactaaagatcacagtagtgggatttgtcctcatacctaggtctgtctgactctaaagccaacccctaactactatgctataaggagactattcttaccaataccagttgaggccccaggagtactaaatgctgaagatgcagaagttgagagtaattggaggactcagcaaaggtttagagttggcctgcgactttagttggaatgaggtgaaaattataattgccacccaaccagtggggagtgggaagattactaaacttggagtcagctgacctgatttagaactcactccactactaattagctttgtgaccttacagagattgcatagcctctagcctcagttttcctctctataaaatgggtatagctcctgactgatctaccttactgggatgtaatgacaatgagaaaatgtgaagagcagaatgctttaaacatgtgggctttgataagtggaattatgaccacgtgaagtcattcccagaagcaagagtctctcccaaattctttagattttttttttagcatctttttcttccgtcttactaggactctaatgaggatgcctatgagtataatacatggaacagttcccagcttagaatatatctctgatttttacttaaattcgtcattgcccatattcaggtttctattcagtccaaattatatgctaatgaggatggcatatttatacattcctggttcggatagcaatttacataaaaatagaccactttttaaaacttaaaagatgattttttttgtttttttgagatggagtttcgagcccaggctggagtgcaatggcatgatctcagctcaccgcaatgtgtgcctcccagattcaagcgattctcctgcctcagcctcccgagtagctgggattgcaggcatgcaccaccatgcccagctaattttgtatttttagtagagatggggtatctctatgttggtcaggctggtctgaacttctgacctcaggtgatccacccgtctcgtcctcccaaagtgctgggattacaggcatgagccaccacacccggtcaaaacatgatttttttaaaaagcaattttgttcatttaacctttcctccctgacaactttgtgccagccactatgctgggtgctggagaaacagacaaaaccctaaggagctgacggctatgtatgtatgtatttatttatttatttatttatttatttatttatttattcattcattcattcaacaaactctaatgagcacttcccagatgccaggcaaagttctgggtactggcgatagaatagtgagcagtaaggcagaccgtagtccctgcatttaggagctatgttttcttacaatgaaaacagatcaatcaatgttagccaatactttaaatatattatttcaaaccatgagaaatatgagaggggataatgcaggaggatgcagtctggttgaggaggcagaaggcagcaagtaactgtgataccaggtcatatgtgcagtaactgaaagccagcaagcaggggccatactttgagtggtcctggagagcttcctagaggaggcagcattttctttagggctttgaagagaaactaagagttttccagagggacaagagcttatttgaggaaagagggggaagtttttcccaattgagaggttctgtgtcatcttccaacttctctgcctagacccatcatcactgtgccttcatcagtcacacagacttcatatctaagacagaatcctctgagacaaacaactgaatgaatttttcactgctatctggaggaatcctatctggaggtctttgatagtgccactggcttgtttgctctggacctgggtgtcagtgtcagctcacgtttagttcatggaataatagactgtctttcagctgtccttgcccttgccattgaagcagaatcgaataattctacacttgtggagcatgtgtaggatgtgagaattcatcctcagcctaactttcttgggatgcttcaggaatttcctagaaatgctcaattcttggacgtttacatcttaggaaacctttatcccataaaggctctgactcatgattgggtaagaaatattgaaaaagaaagaatatcaaatatccctcccacacacatgcatatgtacacacatacaaaacagtctggccactggtccttaagtattgagcataatcaaggaatgcttgatgtaacccatggacttacaaaggatatatagcaagtatgaatttcctcacgaaccagttttcctacttagtgtattgttgcaggtgccattcgaataatggatgagttattcaaaagaggggagaagaggaaagttgtgtacccacctctgatttcctgggtactgagctgggtgctttacaggtgttttctttgttatcttatttactctgccagttagcctgaaagactgatggtgacatgaccatttttctgatgtgtgcatatgttcagggagggaaagtgcctgtcctaagtcagtcagtaagtagtggagcagaaattcaaacccagctctggctggctatacagccactcctccctagactaaatgtaaatctaaagagctgggtactttctacaagcttgaaaatcaagttcccatttggaatggtcatttcctataaagaagagctgctaatgaggttccccagcctccagggaagttaattttattgtatttatttatttatttattttgagagggtctggctttgtcactcatgttacagttcagtggcgccatctccgctcattgccacctctgcctcccagcctcaagcaatcctcccacctcagcctccaagcagctgggactgcaggtgcatgccaccatgctcagctaattttttttttgtagaggccgggttttgccgtgttgtccaggctgttttctaactcctgggctcaagcaatccacccacctcagcctcccaaactgctgggactatgggtgtgagccaccatgcctagtcttgcttttagacatatctatatatattttccccatatttactcatcatatggtgatagttttgtccaattataagtttctaggggccaggggattttatccaagtgcagcatatgtggaacttagtaatgatcttttgatgatgacaaaaaatagctgataggataccactgtaagagctaatatagctgtacagctttggacataccatatttatgctgtgtcatgtcacacacagagcccttcagattaggttaaatcatgtcacctgaaacataacaggtacataaaatggaagcaaatccaccagcaagtatttattcattgcctactatgtgccaagaaattctgttaatcactaaaaacataacaaaagacaacctattcccattccacactatgattaacttgtaatagaattggatatttaacagttattggggaataacagtagctggaaataggaagcaagcaagtcagaaatgtaagggaagatttatgcccaggtcaaggagcagcacgttaggagcgcagtgagtgtgggaaactcatggaagttcaaatgtagactgcatcaaaatttggagagaatgaccaggtgcagtgtctcgtgcctgtaatcccagcactttgggaggctgaggcaggtggatcgcttgagcctaggagtttaagaccagcctgggaaacatggggaaacctccatctctacaaaaaaatacaaaaaattagccgagcctggtggcacacgcctgtagttccagctactcgggaggctgagatgggagggtcgcttgagcccaggaggtcgaggctgcagtgagctccagtcatgccaatgcactccagcctgtgtgaccctgtctcaaaaaaaaaaaaaaatgaagaaatttggagacactattcaggtagaagggagactttcaggtatgaaggaggaaggagaagaaccctgggcctgagataaatcttgaagagaattgatggggcagtggatcaataggtaatgtataaagaaatcggaacatatggcccatcccactctgtcatcttcaccgtcctcctgggcccccattctcgtggctgtgcgggcagttgccctagtgcatgcacacacggtcctgcctgtgtgcatgtgtgcatgtgtgaaactgttatttttccggcttggaacattttcccatggattattttaaatagttctataagactatactagactatcaagttttgattttggtgatctgccaactgtacgattttaaaaataggtttttaacagctttaaaacagaagtagtatttctgccagcgggtggaattgtggctcaaaggccctgaaggagaacacatacttgggatttattcctgggtgccatgggtttctggaattttgcccctagacacagtggcgaagacagcagagggtgttccagggtacacatcctagaccctgctcctatttattccctctgatacgtggttgaaaagcagtgcttgagtggttaatcagatccctggaaatggatgcctcactcttgtctggaaaaagttccctaatgaaatctcttgtttacattatgctacacattcatgttctggaagtttttgccacttcttcccatttcctatattatatatgtatttggtgcccataattggtactgtttttcccccatttaagcttctctcttcctaaattctagataaacatccttgtagtttccaggccctgggttgccaactcagattcccatgcttgctgtcactgagtgcttatcttgggatccttcttccagaacccagagctccttacgtcaaccccaccggaatgggtccccaatatatgggattcatgccgaacaactttgcagacaccttctaggctagtgttgagctgaccctggggaagattgtagttgcctttccctggaaaggcggctctctgagtgagaaaacttcataaagactactcttctcagtgctcataatgtgttttggaattattacctttgcagtatatgagcagtatgttaatttattaattttccttgtcccattattaaaagggtcctcctctctcactcttatgaattaagtgtgaaggaggaggtatatgtaataacaccagctttttcacgtggtttatagcaattgctttcatcttttatgggtgcatctcatgtttgccatgatatttcaagttgtttcttttctggggttctcatatggaaatccctggcaaagctgtgctcctccagcattagcatgtgtgcagtgtttagaaagggagatggaatctgggctgctgcactgcagttacctcagcagggaacctaccagcctccaccaagctctacccctggcctcagaacctcagggggcaaaagtggccagtcacgtcctctgtctgagaaactagccatgagtctcttgcaggagggaggaaatcattgcttactcatgcgcaacctgatttaggagcattcctgctatctgagaaactaattctgggaatttgcacagagctattcattgtaaaagcagctttgatccccagagagtccacaagaccttggaaaaaaatttactgtgccagggagacagtggagcctataggagccccctaaagaagttgggacccttgggtttggtgtctggttttgacgtagtagtctgctcaggtaaggctcttagctaccccatgtcccttttataaagttgaactaagactctctctggcccagcgtggtggttcacacctgtaatcctagcactttgggaggccgaggcaggcagatcacttgaggtcaggagttcgagaccagcctggccaacatgacgaaacccaatctctactaaaaatacaaaaattatccaggcatggtggcaggtgactacaatcccagctactcgggaggctgaggcaggagaattgcttgaaaccgggaggcggaggttgcagtgagctgaaatcatgccactgcactccagcctgggcaacagagtgagactccgtttcaaaaaaagaaaaagactctctctaactgagaacaattctacctgcgaaataatgtcttaaagttaaataacgctggccatgtgatttcagcccaatgattcagcaataacaattattagcctcacttcctcatccccacttagcaaaaaaattcagaggtgaagcaaagagaaatatactgaaaagcagcaaaagtcagaaggggagctgtgatgatgtcttcagccttgtgaatttcacttttgtctttccaaaatggttctgggcatcagatagagcacagcccttgcaccaacttgctcactattccctctgactgtgtgccttctgcacacggagcacaggttgccaacaggctgctctcaaatgtgcctgcatccttctgctccaccaatcaagttgaatgctttcctagaattgcatttgctcccaaacctgtttatgccagttgaacttggataatataattattacataaattgatgaaatatgagcataaaaagaaagttgtttccataaagactatattggaagtttcaaaagggaaattgctagcctgggcaacatggcaagacccagtctctccagaaaagaaaaagcaaaattagccaggcatggtgacacatacctgtggtcctggctactcaggaggctgaggttggaggatcacttgagcctaggacgtcgaggctgctgcattgagccatgttcacgccactgcactccagctgagcaacagagcaattctctctccaaaatgaaaagaaaaaagaaaagaaagaaaaggcatgttgctgagttatatgtaggacttgaaaggttagaggagattataaaactctagaggattttgctttcagattgctttatgttgttaaaattttgctccaccttaaagaaactgacattagacttgataatgcactgtaggtatgggtgtgaagactcaagttggaaaagcagaagtgtatcaggaaaaattctattggtcctagtactttgaatgacactgaggttcactggcaactttctgtgtaattttttataacaaagacctactgctgcaaggattttacatgtaatgagtgcctaaggaaggtatgaaaaacccttccctggaagtctcccaaagcagaaaaacacccatttgcgtggatgacttggtgcatcagtgataggggagaaatgactgaggtaaactgttcatggtatgagagttgaccaagtcagggtggggaggggaggaagaggggcaggtggacttggtgactctgcctccctttcaaacagagcagccctgtgtttacctgtttcatacattgaggacttctggttaaaatgttagtaaaaacgattgctcttcttaaaaaagggcttgcaagccaccagattaggtcttttccatgtctttctttctccaaatctatatgagatctaaataagctctccccaagtcagacagaggacatatttttagtgctcaagtcatagcttgtatttactcattttcaactctttggagtaataattgatgaaatttatatttactcacacctaccacttggttgatgcccagaggggctgtcacctcccaatctcagaaaggcaggcaggaatttttggcctgcctgcctttctgagatcggaggaggcctggagggtggggtgaagttgtgaggaccccttttctaaattgagaagtggtctggatctaccctgtatcagaacaggatggaagaaagagcaggatgtttttatttctgtctattgcctgaaggcatctcctctagaaacaaaaccagtttgattttgattaactttctcttcttttaatttcagtcttccttctcttgacttctttaaggattatgccaaaagtcctagactgatcataaagcctcagaacaggaatttcactcatagttgcccaagaaaagcatgttaataccaaaagtaatttcctagccagtcatttcctgtgttctcaaaattgttatttttctctaagatatgtatctttagataacaaaaactgttctgcctctcaacctggaggaggtgatgtggcaagaggcatcttgacgaaagcatgtgtaaaagaacatgtcagagaagccaggaaaaggattgatgtcctgctaagtatatgtttgatatccagcccaggttggagcacatttttagcactgaagagataaagcacctaaaaatctaatgctgactttgtcactgatttgttccacggctgagggcaaatcttccagccttagtttcccccctttgaagaagaatgaagttcactggcagttgagaggcacataatgggtatgagacagtttagagagaatggaattttgtctgaatggaaagtgcatcagtaaggatttgctacagaaatatggcaatccaatctcatggggtgttgaaagcaataaccggttatgaaaattgtcaggtattaatatttgcaaagcactatagatacttcaatacctgattctgtaaaaactgagtagaacatctgcctttcaaaaatgtttggtaaagctggcatttacaggttaaggtttgagaagtttaaatcctttcagttccctgttattctttcctccattcattcttcatctgtaagtgggcaggatgtcatgcctggggcatgtcgtgagtggctttttaccttgcctgaacacctgtgtatggtttgtttctctggaataagatctttacttcatccagttattgtttaagaattaagattcctttttcttttcgttctttttttgttcaaagctttgtaataggtgagagatgtgcttactttcacatgcatggaaaactcacccataaaaacgaaggtctttcacaatgcattagctgggttttctctccagtgctgacctttgacctccatgcacaatgtggtattcagctgtcctgttctctgaagtgaaaaccttcagagccctcaacaaagatatttcaccaagagtaagcagtccatgaactaaatgacttaagataagaaggcggttaattctgaaataaagatgaaggcaagaggtctataaaaattacaaagccctccaaggccggatcactgatcccccccatggtgagggtgacaactcaaccttccttaagacccgaattaaagagacaagtgcactttctattccatggaatttctaaatggatttctttggacaaacctgcccagtgttccttggttgtattaataaaaagagtagagaatcttagtgggggaggaagctattcagaatgtatgaattaagagggcttcttgggagcacttcttttgaaatccttaacaagcactcttattctaaggatctcaagcccatttatgggctgcttggcaagaaagaaaacttcacaaataacacatggtcccagtcatcaccttagacaaagtgctaagaaggtaacggattacagctttgcctttttttttttttaattgctctgtagaaatgtaaagaaagacttaggcttaggaacaagctttgggtgtttaattgtcaggtttgttgaggagaaggagacagagaggcgaggtagggaaaagtcataatttggtttacacgaaaaaaatcatttctaaggactgtgttcagaatatttgtctgccaattgtgcaaagacatccagatttccatggtgtgaggaaactgttctttactgcatctacctcacagtggtaacttgcaaatttttcccccatgaagctttatttttggtgaccactgtaatttacatgttgggacctattattaactgctagttttgcactgttattggaaatctttacattaggaaagaatgtaggggtagttttggggggaacgaggggctcaaattaaaggttaccttgtatagtatctcagctctgtctgggatccgagaaggaattagaaactcacaccccctaagcaaagaaagctttggaaggaagcttcccaaaggaaacttctctaaggaagagcattcacatatcttagaagtggcttttcagagaaaaaactatcacgtaaatgcttttaaaatggtctattttggagccactgtggcatacatactgcagtttatcctaggagacaggattgatgagcccctgtaagaactgcattgcatatttcataaatgtaaaaagcagaggcaattgtgctatattaaatttcagcccataattgggtaactagagaagcccccatttaattaaattccgctatccactgtatgataggaaaatttggtgaccttatgtttgactactgtctgcgattgaagagtggttaaagttggtataagaatgtattgtgtatctttcaaatgtccttattagagaaacggattgggggtaatattttaccttaatagtgcttctccagtgactccttcagaatgacagtgctcaactcaaacaccgtgtgttttcattggctaggataaatgttttccacagaaatgacaaggcttcaggctctcaagaagctctcatcatgagaggtcaaacgattttacacacaaacaattccacagcacattctgcatccttcttgcaatttttaagctgtgctaggcaaactccacataggagcacattccagaaacacactgggggttacataaagggctagcttctgtttggtgggtaaatgtgcatatgattattgttgttacacaaaagaagggaccaataaagtcctgatgtgactttcccaactacagaaacccaagaaaattctttgccagaagtagatacattgtcattctgatggcagatgactacccaaagaaggggaaagtgaaggaaagctggaatctgggaacttgcaatgggataaagttgctttgaagaaagcacttagcaagtgttttttttccatattgccttctttcctgccacagaccctaagattctctaatcacctctgttccggggaaaatattttaatataaccccttgattcattcaacaagtatttatggagaatctactctgtgccagacccttccacccaacctctcataccctatacaggaagatactctgccatcatgtttgccaatgggacaggactcccaagggaataggtagaagaggaacaccagtaagtcaagagccacatataatgaaagaccaaagtgtaaaaggtgggcagaggaggaagaaggaatctggataagcaggaacagaaagagaatgctgtcaccgaggctaacagagggaagaatttcaaggagtgactgacagtgttaaatgcaacgcagaagtcagaaaggatgaaaaagtcctagttgaattagcaatgtagagatctttggtaacccttgccaaagagatttcagtgaagcagtggaaatgaaagccaagttccaatgagtgggggagtaaatgtgaggtaaggtggagaggcgatgagtgtagtagttgaaaggagagacagctggtagcctacaaatgcaggcgaaaagttctctccatgtggctcatgagtgatgaggcagcaggatcaaactagacataactatctcctgctctatctgcttttacctttttaatcctatgatctatgctagaaaattttttattttatgttatttgtaccacaggatttgattttattttgtcctgttatattaactaaaccagtttttaaaaatagggaaataatgcgtttcattcaatatgtacaatggaccctcccaataaattagcaataaatttacataatttgtctcaaacaatggaattatgctacaatgttaaagaatatgtcatatcaggtataatgtttaaaaatgccagtcaggaacagaggaatgactttagataatttgagatacaactttagagaaattagtgcctttagacatcagtaataagaattcagagtaaagacaacatgttacttaataccttgccttaaatatgccccagttgacattttgtacacatttcaacatttttcagcaacactagaaagaatcaacaaatactctcttatctctaaaataacaattaaatattttgcataaaaacatttaaaaacttaagatattatcttatttcccctgcctgggcaacaaattgaggccccccctctacaaaaaatttaaaaattagccaggcatggtggcacaggcctgtggtcccagttacttgcctgaggcaagaggaggtcaaggctgcagtgagccatgattacaccactgcacttcagcctgggcaacagagtgagactcttgtctcaaaaaaaagaagaaagagaagaagaggaggaggaggaggaagaagagaaagaggaggaagaggaagaagatatacttattttagcttaacttagtttttattgttatttgaaagggcagtaatgattggctatcaacattgctgcaggataggaactaaactggtttccatgaccagatataggctaggaaaacttgcattcttagttcaattttagttagaggctgcaagacaagaatcatagtagtgtggtttgtgagatttggcaattaatgcacttacacattagttgctttatgtctggaaagacctggaaggtgaaagtcattaaaataaacctcctccttatgcctggcgtggagaagaggctcctagaagaaacacagctttaaaaaaagttgtgggctgggcacggtggctcacacctgtaatcccagcactttgggaggctaaggtgggtggatcccaaggtcaggagatcgagaccatcctggccaacatggtgaaaccccatctctactaaaaatacaaaaaaattagctgggcgtggtggtgcatgcctgtaatcccagctactcaggaggctgaggcaggagaattgcttgaaccagggagtcagaggttgcagtgagctgaggttgcgccattgcactccagcctggtgactgagtgaaactctgtctcaaaaaaaaaaaaaaaaaaaaagtggtgtagggtgggcagaatagatccagcatgaaaaagttgccacttaacagtttaattactactaaggagcagtgttccaagtaacagactgaaaattggggaaaaaaataaacaaatatgggcataatgcagagcctatataaaaatatttaaatcttcagttctcatgtgtttttctagattttctgtagtctgtagcgctataatcatattttcagacatttaaaaagcttagttccctgaatgcttcatacttccttgctaattctggagcaaaaccattttaccaactcttcatattgttttatgtctccctacaaaatatcaacacaaggcacaagaagtgtctcagggccctctacattttataactaaacatttggtctctctggccaaatagactgatggtgtcctgggttgttgccaagtagggaagactctgcagtctccttcataatgccttaaaatccctacttccttgctgcctagctttttagtcaatattttgccttcatgtgactcaatatgtagaaattctctgcattttcaccctgaagaaaaattccttctccagaccaataggttttcttctccagcacatcccacattttttatagttccttctccaggtgtctggaaaagggcaaagaactaatgagcaattctctttctttctttccttctttctttctttctttttctttctttctttctttctttctttctttctttctttctttctttctttctttctttctttctttctttctctttctttctccccactactttggctttctttgtgattgatcagaaaatgattcactcttagccccaaaagtttccttctgtggtcacaataatagtggcaggtctggcataggagtatgttaaagtaggctgtccacaagagccctactgttatacggacctatgcggcacttatggttctagccatcccacagtgtcataatgttcagacaaagaagcaatccccattaactctctgttcaacaatccccattaactctgcagcttgactttcatgtggtacatgccattgaacatctgaaaaagcagtctctcctcaagatctctgaaggcaagaagtttttagaggcttctttcagtttctttcttttttctttttcttttttctttcgactgtcttgctctgttgcccaggttagagtggagtgcagtggcacaatccataaatcatagctcactgtgacctcttaacttctgggctcaagctgtcttcctttctcacttcctgaacagctgggactataggtgctcgccaccacgcccggctaattttttagtagcgatgaggtctcactaaggctggtcttgaactcctggcctcgagcgattcttctgcttttgctggaattacaggcatgagctgctgcattctgccttctttcagtttctatatttgatattctgtcttgatatagattgcacactattatagttcataccatactctacatctccagtgctgtcatcaaatgacattcccccaaatcagctgaccaggggcatctgccattaacctgggaaactattctgagttcattttcatccagcgaggcacaagagggttgaccccaaagcctaagctgtggggcatcagagcactgacgtctttgactcggaagactaacccaagtctgaaaagaaagacagggctgtccaaagcaaaagcatcactgttgctacctggccagcctagttgcggtggaatgagacatcatgaggatgatgcagctggttcccaggtggttgtggaaagctgttggctgcacccacgcataggacccctcttggcccatccaacgcccccaagagccacagggcctcctgcccccatccatatgtctcagtatggtggccccacttgtggggactcatccggcattttttttcttgtcctcaccatgagggattgatgttttggattcttgcccacgagttgcatagacttcctttacaaagtaaggtctttggggccagatagggtccttgataagttttcctaaagaggaaagatgctagaatgggcagtccaaaaagagtgcctgtcccaccacatgtgaagtcagttaaattatcagtagctgctcttcagctgacaccctgacatcgatttcttttcttcccattctactgcaggcatatgatgttgacattttatttggtggtgatcatatttaaggaagtacactgatttgcctttggaaactgtaggaaccaacctgagcaaatatgtaagctttctgtcaagctacatagcctatcctacattattctttttgctaaagcccttcagatacttggagcatgtcactctttcaagcaaattgtgttttggtttgcaggctttttgaggtctaggaactaacctcatttctttttcacaattctaaatcccaaatgtcagaaactactgaggcgcaaggtagaagtgacggagcagacacaaattaaatttgacctggagactacctttttgtgcaaagagtccctagagatgcataagtgatcttcaccctccagtggaacaccgtttggaaagctgccaaataatgcactgcagaagtaatcccatatggtccccaagtgatctgagtaaatgcctaatttagttttgctattctgtgaccacccctaacttcatttatctctctcgtaatggaagtatttgtagtatatgtagtggttaaaaacagtctttagagtcagacagatcttgatattacaatggctttgttttcttcttactagctgtgggcccttgggcatgtaactttatctgttttaagtttcagttcttgttgtaagtaaaatggaagccatatctaacttggaattaatatgaagctttaaatgaggttatacatgtatgttaagtgcccagcaaagtgcttggcatacatatttaggtgctgaacatatggtaactattgttgtaataacaatatctagtgatgttcccccctcccaaaaaaagattagattatttgcattgattagcctacatctggcagctccactagaagtataatgtaaaatgcatgcccttttgtgtcattataaaaggcagcacattaaagatgccttttaatagcaagtatttaagaaacactgggtttccacagtgcattagttagtgaagaagtggagaaactgctttggtttgatgcaagcttagaggcagataacaagcaaacaagtgagctagatattgcatcaacttcacagactgaaggagggccatcacccaggcttcagcatatctaatgtcgaaaagtatgatgcagaggtcgtgagtgttcattaatatcgtttggttgccttctcaggttcctaaattatttaaggtggttttccagagagccatgaatcttttcagtaaaactgcagattttcctttgatttcatgcaggacactgctgcatgcttgtccagcaatgcagaggttatgctggttatgcttgactggatgggtataagtaatagctaatgttgagttggatcccagcctgcctgatgattaagtgaacagcatctttccacagagcagtctcagacttctacatggattgctttgctacaatggaaatcttgacagttgaattcacacagattaaaaactgttcagtaatgaagtgtgtccttaaattctcctaccttctcgtgaccacttcttttgaaataatgatatcagggtgctagttgagggattgaataaactcccccagtaacaaattggtaggtttcccttgcaatacattgaagctccttcaagtcctgaggttattgttctttgtggacaagtaaaaagagaaaacttatcatctggtactcctgcccctgtggctgcttccacctatatcattgctatttttagttttgaacttaaacgaggatggggcatcaaaaagagttacaaaagttactggaattaggaaatctagccaagccactgagatcaaaacttcaaaataatcctactagggattgctgaagctatatcaaaagtttatataacctggtggctgggcatggtggttcacgcctgtaatcccagcactttgggaggcccaggcgggtggatcgcttaaggccaaggggttcgagactagccttggcaacacggtgaaaccccgtctctaccaaaaatacaaaaattaaccagtctcataacccgttctcaaaataaataaatagattaaacttttttaaaaaagaatattatgttttaaaagtttatataacctggaaaacagcctcatcttttaccttattgatgactctccataaccagcctgaagtatttcttttcctctgcatttagtgtagggacaagagttctttttgtgtggtgaccctgcttagatttgtattagagtaacattcttcatccagagttgttcactgactttctccctggggacctcaatagggtgtgaattcctgagagaaatgtttgcattctgtggtgagttggtttctcagtattatttttgaaaaggaaaataaatcaagtagcttaacttgcaacaaatacttcaataacagagtgttatggtgaatctgtggatttggatgggagtctctttatgtgcattacaaagggtcattgtgtcacataccttgcccgtatcctgaatagatcctcccacatgctcaagcctctggacctagagaggcacttctctctaactaacatggtaccatgtagttcagtatagtagtgtgcaagcagacagacttgaggaattagcatccaatattcttctctttaggttttaatatttggaatttgtgtttgtttctgttttgctggcagctttcctttctgatgttcccttttgtttgtttttagtagattgaatgtggacagcattagggtagttacagcagaaaagcttgcttttgccctctatcttgactcaggatttaaagattttgttgactgaataaggagaccgtgaacagaaaaaagatgacctcctcagcttttgtagaaacactaaagaagacgttggaaagtggacttcttatttaataaagaaaaaaagaaggtgataatggaaggccagggattctggagtgagaaaactgaatatgatacaaagaagtcaaaaagcggggaataatgtgttcagagggaacgcctggcaattcatttggtttgtggtgggaagcttcattccgcgaagagagagtagctcagtggctggaggtgtttatagccagatcagcgtttcacaccagcagtctggcctgggtcttttagagctgccagaaactgctcagagttgcacagatttctcagcctagtagtatgaatttggggcctgattcctatccctttttcctctttcagtactcactttgcgctcacagggtgatctgagatctgaagatgaatggcaacgtcttcgtttaataaagtagacttttatttgttgctttatgcatcaggaacatatacaggccatatacgttctatatcacttcttccaacctgtgtagaagaatttgtgcttctgaccaaaaatggtttttgcttctgtcaaccctacataagtcattccatcccactttaaggcatcgcctacttccagaatggaggattggcaatgacgtacaagcagtacgaatgcttctttttttctttttcttctctattcttttccaacctcttcctttttttctgagtcaaaactaaatcagaggccatgctcagtgattcatgcctgtaatcctagcactttggtaagccaaggcgggaggataacttgaggacaggagttcaagaccagcctaggcgacatagtgagaacttgtctctacaaaaaaattaaaaaaaaaaaattatctgggcatggtggcacccgcatgtagtcccacctactcaggaagctgaggtgcgaggatcccttgagctctggagcttgaggctgcaatgagctgtgtttgcaccactgcattccagttaggtgacagagtgagaccctgtctcaaagaaaacaaacaaacaaaaaacccaaaaaactgaatcagtagtagaaaaatcttgttttgacttgaaaattgagcaggttagatcagaagtaataaaagtggaaatccaagaggtcattcttagcccagagttgcttttttgcccaggacttgtcagttacggaattgttatttcttttcatttttaggggttctttttttggtctagccccagggctggtgacctttggcctgcttggccaaatccagtccactgcctgtttttgtatggcctgcaagctgagagtggatttcacatttttaaatgattggaaggaacaaaagaagaacaatattttgtgacacatgaaaattatgtgaaattcaaatttcagtgcacataaataaagttctattggaacatagccggattcatttgtttacatactatctatggctgcttttgtgctacaatggcagaattgagtagttgtgacagagactttatggcctgcaaagcctcataaatatttactatctggccaacccctactctggacccttaagccaaacttttcctacttttcggagtattgtcaattatctcttacttccttattggtttagagaaggtgcagaaatgcagacactattctacatttcttttcaattagctagggattttggaattgtgcagtggactcctaaggaaacactgcaggaagaatatgggtgagacagtggtgaggaagtaggaattatctcatgaaatttaaaatcaaatatcattttcatccctttccaaaaatccttaaaatgggacatctatgtgggttttagaaagagaaaaaaaaaatgttggttctgaacagaatcctactgactattcttagagcctccttcaggccctctccaataaaaatatggaaactcaaaataaggtcactcacatcaattgacaccttaattttgtgactttttagttttcctcaagatgttttcttgaccaagttaagaatcaaaatcattttccttgatgttcaaactttctaaagattttgattagtgggtgttcaattacctgtttatacttggggaaattgaggctaagacaagtacactaactcaactgtagtaatagcgactagtagagatagaagtacatactcagtactccagagcttgctctagaggactgccttttatcttttgaaggtgaatttgatggtatccctgagaattttttgcttttcttgagattctcagttatctttcactctttgaaggatttcaatttcctgacttggaaacatctgaaaaagagaggaaggtgccttgttttttcattcccactcctgtgaaagaagtacaggaggggaaagacttggggcagacaaaaagggaaatctctgaaactagagaaaactcaaacaaattgtggccagccgagtcagcattcctcacccacagttggtcctaattaaggagactcccgttaaacagctcaactttctgctctttcttcttgctctggccctgccagctgacatggcaaagctt

SEQ ID NO: 23937 - DNA, 3362 bp, Homo Sapiens
gcaggtgccctgtgctcatctctgcctgggaatggggaggaacagatcttgggggacattggggagtgggcggacaagcactccagggcatcagtccgggccgctgaccaggcggagggcagtgtcccaattatacaggcgttacctccttttctccatctcagcatctgatccctccctccgcagtggaacccaggctcctgatatccatctgggtgagccagccagagggaccggctgtgtcagaggcaagcaaacaagtattagagtgcaagactgtgggcggagagaggaagcccgagccgccagcagggagcttcggagagagaaagcccaggaacatcccagagagagctgggcccatcctcagccctacccagccccgcagcccctagccctccgcccagaaacccagccctgtccggcgtgccgctcttctcctccaggccggctgctgttgcggccagcgttgccggggcatcccttcttcgttcccatcatggcagtgtaccgcctgtgtgtgaccactggtccctacctgagggccggcacactggacaacatctctgtcacactggtgggcacgtgtggtgaaagccccaagcagcggctagatcgaatgggcagggacttcgcccctggatcggtacagaagtacaaggtgcgttgcacagcggagctgggtgagctcttgctgctgcgtgtacacaaggagcgctacgctttcttccgcaaggactcttggtactgtagccgcatctgtgtcaccgaaccggatggtagtgtatcccacttcccctgctatcagtggattgaaggctactgcaccgtggagctgaggccaggaacagcaagaactatttgtcaggactctcttcccctcctcctggatcacaggacacgggagctccgggcccgacaagaatgctaccgctggaagatctatgcccctggcttcccccgcatggtagacgtcaacagctttcaggagatggagtcagacaagaaatttgccttgacaaagacgacaacttgtgtagaccagggtgacagcagtgggaatcggtacctgcccggcttccccatgaaaattgacatcccatccctgatgtacatggagcccaatgttcgatactcagccaccaagacgatctcgctgctcttcaatgccatccctgcgtccttgggaatgaagcttcgagggctgttggatcgcaagggctcctggaagaagctggatgacatgcagaacatcttctggtgccataagaccttcacgacaaagtatgtcacagagcactggtgtgaagatcacttctttgggtaccagtacctgaatggtgtcaatcccgtcatgctccactgcatctctagcttgcccagcaagctgcctgtcaccaatgacatggtggcccccttgctgggacaggacacatgcctgcagacagagctagagagggggaacatcttcctagcggactactggatcctggcggaggcccccacccactgcctaaacggccgccagcagtacgtggccgccccactgtgcctgctgtggctcagcccccagggggcgctggtgcccttggccatccagctcagccagacccccgggcctgacagccccatcttcctgcccactgactccgaatgggactggctgctggccaagacgtgggtgcgcaactctgagttcctggtgcacgaaaacaacacgcactttctgtgcacgcatttgctgtgcgaggccttcgccatggccacgctgcgccagctgccgctctgccaccccatctacaagctcctactcccccacactcgatacacgctgcaggtgaacaccatcgcgagggccacgctgctcaaccccgagggcctcgtggaccaggtcacgtccatcgggaggcaaggcctcatctacctcatgagcacgggcctggcccacttcacctacaccaatttctgccttccggacagcctgcgggcccgcggcgtcctggctatccccaactaccactaccgagacgacggcctgaagatctgggcggccattgagagctttgtctcagaaatcgtgggctactattatcccagtgacgcatctgtgcagcaggattcggagctgcaggcctggactggcgagatttttgctcaggcgttcctgggccgggaaagctcaggtttcccaagccggctgtgcaccccaggagagatggtgaagttcctcactgcaatcatcttcaattgctctgcccagcacgctgctgtcaacagtgggcagcatgactttggggcctggatgcccaatgctccatcatccatgaggcagcccccaccccagaccaaggggaccaccaccctgaagacttacctagacaccctccctgaagtgaacatcagctgtaacaacctcctcctcttctggttggttagccaagaacccaaggaccagaggcccctgggcacctacccagatgagcacttcacagaggaggccccgaggcggagcatcgccgccttccagagccgcctggcccagatctcaagggacatccaggagcggaaccagggtctggcactgccctacacctacctggaccctcccctcattgagaacagcgtctccatctaaccacccccaaataccaccaaagaagaaagaaaggtccaagcatgaggaggaccagttcctcaggtcctccagacccttccatcctccctgttctcagttcacctgaaccttctcttctgcacatggagacttttgcagccaagatggctctggcatcatacaaactgggccctgagctgtgagagaccagcacagcagcgtccaggttaaaagccgctgaccaaagtccaatgcacaatagcccctccgaaaggaaggaaccgcttcacttcttgccccacttggggcagcctcttgttccagcctcttggaatgcccagcttgggtttctgagcttttctccctcatcctccccaatccccaaactccttctcctaccatgcctttctacgttctctttcttccaagcctagagccaccagcccagcttccttctctggaaaagcctggaaactgggcacagaaggactgtgtgcctgggtctaacatgtggtcccctttgtccctagcacctttaaggggaggggaagaattggagggcagcttgcctggacccctaacggctgttctcaggaacaggttcccaggcctggggtgtttgtggagatctgtctttctccaaagatttcatccaactcccctttcatcccactccctttcatcccatttttttctttctgtccttgagcccagtgagttcaataaaaaccaaaatatttggctctca

SEQ ID NO: 23938 - DNA, 524 bp, Homo Sapiens
aagcttttgatccaggcatgagaggagtattaataggaatggggaagttggaacgtgtttccctccatattcctcacgtctattttagcttttcctgccatttgtttcttactctttttctttctaacattctctgctagtgtttgaagagcagttgtgagggaacttaaatgatattccccttttccttttccctaataaccttcctgccagattttcaagtaggcaatgataacagcaggtgagatattaggaactgtgactacgaagtatgtagatggagatgtgcagaaggatccagagacttagagcaatgcttcacatgcttttggtaagcatgctccctactgtgggttaaaccaaacatgtaccaacccccccagaattatgatattctactgcagtaaccagcctcttcttttaacatcagatagctaaaggacgttatcctcaaagtcatggaaaagcaggaagtttttcatgacaaatcagtttgccatagtacagttaaaaaaaaaaagctt

SEQ ID NO: 23939 - DNA, 3963 bp, Homo Sapiens
  misc_feature (33)..(33): n is a, c, g, or t
ggaacgtatatgtccatatctggcctgttgctntgcagctctgtgtgtggatctcaggagacacaggggagtgggacactgccaagtgtatgggttctatgagggatgtgcttgttctcctgctgctgccagccaaaatgccactgtaaaacagcatcactcgtgcctcctcgggtcagcgacagcaaaccttagcgcgccccctcccagggaatgttacctgccaacccccatcccttccttgtgacagcccaggatcggaatcctggcctaggtagaagcaaatgacatcaccttctcccctcctcttctctctctctttttatttatttattttttcattgttgttttttggtttctggttgttgttttgtgtgtgtgtgttttattgttttattttattattttttttcttttggctcatagaagtcctttcctttcatgtccttggtgagggaagattatcaaatagaaccaaggtgatagagaagaaaaggaagctgtagctgagatttcacatccaactgagcacgacccaccattgtgttgtattttttgtgtttaccttatgctaacagatgcaaatactccaaagaagtgtcgggcactgttcgggcttgaccgacagactttatggtgcaaaccgtgcaggtatattaccactgcgaggcctttgggaaaatcaaagcattctgtccttccggtaccttagcgtgataatttattttgacctcgttccccatctacttcccctctggcatcaatgactaatgatcctcattcttcaaaatttccttgctaattttatgccatttcctctccccactttctctttctctcttttccccctgctctcatgaacaatatccctggtggcaggactgagaccacagccttaacaaacaaggaggggcacttatctttttgctttgaaagccagcatcctggagctggtccggccctatgaatgccttggtggcccgggtactgagcacagagagccaccatttccaaaggtttgaatgagttaacacttggcagcaattgcattcccgtgcacttagagtcgagacacatggagaagggttctggggtaggcttcttctttcccttttttctttttcctttttggttgttttatgtttaaaaaccacatgtctgtacggaggagcttggttagctgacattgttttacagtgctgaaaaagaagcgtggcattgaacggcatgcaccagctaaagggctgcaagcagtgagtcatgcagtctcagactgcagcgtccctaggcctgcagaattaacaaaatatatgtgtgtatatatgtagcattggttccaaaaggaatcagaacagcccagaagtgtccaaattaagcacccatgttccacctgcaggtctccatccagcctgcattctcagggaaagtgtaggtacttccttcttggtggagggataccgactagctcctgtctcatttcctttctttaatgaccacctttggttaaatgtgttgtttctttgttctgatacaagcagtctttgaatttggaatattacaatggtaggtatttcaacaccctaaacacgcttccctgtttgtagtgcctccctcgtcacgtgtccctccccttcatgactttgccatgtgctccgtgtttagacgttagatcagatgtgcatcccattacgtgcatgcccacgagtctcctgtgtctcttccccccttctctgatgccaatacgagagatcggtgaagtgcctcgtgttgaccccagcacacattagaggagagagggcctgagagtattccctgagagggagccacacagacagccctctgcctgtggaatgagggatttgggggcgagttgaacacccggcaggagaggaactccccaggcattctgtgagatggtagtgttcacagcgctgacagatgtccctttgacacagtcctggggtcttctctgcacaacagaaaggagttttgtgacaaagttgatggaggaggttaggtatttaattaggactagccagggagggcagggactctgttaagcagtgaatttgtcaaaattttacttgtaccaggtgggaagataactagctgtggaagcctgttctgagatgccctgccatggccaatgactggttaaccacaagggtcactaaaagagagggtttctcatgatctgtagaaatgtacaactgacactattgtgtgctcctcacaataaggccggttcaggtacctagtttgtttattttattaatggggtgggtggtggtttatgaatcctttttttgttttggaagcagttgctgcaagtcagacttttttttttcttgaagttattcctaacattgacccaaacatgcatcccccatttgggcatagctttagcttacaccttgcttacagcctgggtgtatcttcagagaccagaattttattgatatataaaaaaaaaatctgccaaccgaaaacctttgtagctgcttcctgtttgagcagcatggttttctaaaatgcatcttggaggggctgtcaatagggcagcatttctgctgcagacgctgagcccctggtcctaggtgccagagttccccaggtccctgtctccacctggttttctttccagtctcagcagtgttcagactttcccagcagatatttttctttgttggtgacttttccataccatggaatgattagcaaatgcatttatgctgtctttgaaggatgctattccaaaacaggatcaggaaaaaccccttgtttccctttcgaattaaccaaaagcttaaaaagggttttttaaaaggccccccctttaattcaaattaaacctaggtttggggggctaaaaaaattgggttcccttccccctttaaccaacctttcccttttaagggggtatggccccccccgggtttatggttaaacccctagggccaaatggtcttttaaaaaaaaaaaaaggaaaaaaagaaaagcagttgccaaccgaggcattttctgactcgtcagaaatgtgtgtgcgtgccagctgccctgtgctcagccaccttaggagacccattgctctgtcgccatagtcttcatgtcccgtgttccagatacccctctcattcctatgatctggaaacttccacgtcatgagggtgggaggggtgaggaaggtaccagaatgctcctagccaatcagggcttctagcttgccacacaaggtttctagtttcatttgacatttgtggacattttaacaagattctgttttgagcccaccaagttgcttttcccatcttttcactctgccctaatatagcatggaatgctgcttggtgctgttcccttgtcttcctggttgttctccctgcttctttctttctccctttcctttcctctctctgcttttctctgctgctttctcagttttgcttatgccctccccctgcccacctactttccttgtcccatttttaaaatgcatggacatctgtagtgtttgagcatgttttgatctgcaggctaaggtggtttaaaactctgagaggcttaattatttatcttggtttctgggatggaagcagaacccataggctatttactctctcccagggagaaaaaggaaccttgccaagatgaagctcagaggcagtggtgcttgctcccctagagttccttttgacccacaaggaacagacagaccctgagcccctagcccccatgatctcagcctttcggagccaggaggactggcatgctccctacacccttcccttctgcctgcttctgccttttgctgggtcgaccccagccagaaggatgacagccgtctggcacaactgaagagaactcaccaccttcttcaggcgggcttgttgcaggttgctaacagcaatctggttgtccaggcaaactgccggttccccgttccaaggggttcgcctgtttcaa

SEQ ID NO: 23940 - DNA, 3040 bp, Homo Sapiens
cagtgcttacacacgtgtttccagttggagtgttatcagccatggttctgacaatattctagggtccttagatgagcacacttcctgtatctgcattatttttatagcattagtggggttgatccccaggctcacctttccttaccaaataccatcccatcagactgggattaatgggaggagaagctttgaagtcacatgctcaatttcttgagttgattttccccgacctcatcctttgatgctaagcaagaagggctctgaaattctcattcctatttcttacatgaatgagtagtgaagaggggagatgctggttttggtgcagggcaaaattagtctttctggtttaaacacgaatcacgataacccaaacccaggaaggtccatgctgcgattccctggcacttcttctttgtagtcacttcggtgaccggcttgtgctgcaccctccattgactagccttggcatattgacaagagcaggatgcccctccatccatcccatcctcaccatctctccttccaaccttctcactacggggtgggggaggggaaagccccaaatcttaaaaaaaaaaaaaaatcaagtttgaatcttaatttaatccacaacctgcaggccatacaaccagttattctcgttcctttgaatcattttctgtttttcttattcttccccctcccccacctttgtttatcctcttctacctgtttttggtggtttcttttttatgtttcgttttttgttttttgtttttgttttaagtttattttgttttattaaagtttcccttcctcccttctcacctgattctgacctctcttgatttggtgtggttcttaacagacaagcccgaaagctctctgggcgccagcagcctcatggtggtggtgtgttaaaacctttaagcctcttgctagcgctgccttcagctatgtgggctcaacagtgagcattttgagagtttcatattgatacgaggcggctggggaaggagctctgtctttctcttttaaacacacacacactcacactcacacactcacacacacacatcactgggggatgggggtggtagtggtgggaatgggagtgaagggccgaggaaacttgatgggaaagtgagggactgtctaagccaaaagagcttttcagttcttctcaatttggacaaagccactttttggcaaatagatgccaccatctgcaggtggccgcctccatgctgctctcgtatataatttgggcatggtggggcatgggtgtttagtaggggttgggggaagcaagtagagagttcagactcttaaataagttgtttgccagagcaggcttagatctgggcactgtgaagtaagcgacccaccctgggggggcgccactgtaattgtcctcggaccactgggcgtgccacctctgtgggacatcccttaggtgacctcagcttgggtgtgagcattaggtaactctctcccttggcatctgtgccctctattcacagataactctctcccctgtttctaggagaaaaaaaaagtgcgttcgctacatacaaggtgaaggcagctgcctcagcccaccctcttcagatggaagcttactagattcgcctcccccctccccgaacctgctaggctcccctccccgagacgccaagtcacagactgagcagacccagcctctgtcgctgtccctgaagcccgaccccctggcccacctgtccatgatgcctccgccacccgccctcctgctcgctgaggccacccacaaggcctccgccctctgtcccaacggggccctggacctgcccccagccgctttgcagcctgccgccccctcctcatcaattgcacagccgtcgacttcttccttacattcccacagctccctggccgggacccagccccagccgctgtcgctcgtcaccaagtctttagaatagctttagcgtcgtgaaccccgctgctttgtttatggttttgtttcacttttcttaatttgccccccacccccaccttgaaaggttttgttttgtactctcttaattttgtgccatgtggctacattagttgatgtttatcgagttcattggtcaatatttgacccattcttatttcaatttctccttttaaatatgtagatgagagaagaacctcatgattctaccaaaatttttatcaacagctgtttaaagtctttgtagcgtttaaaaaatatatatatatacataactgttatgtagttcggatagcttagttttaaaagactgattaaaaaacaaaaagaaaaaaaaagcaatttttaaacagccctccaaaaggagttggttctggattatttggattaaatacgagctttcgaaccaatcattttacatctggtttttaaaccgtaagggccccatgaatgcagtgccggtacttttttttttttttttctgtgtgaaacaactcttattgtgatgtaacttgatattgtttaaatgttcagatgcagagggtaaaaatgtgttaatataccttgttccatggtgttgttcttttgcggggaggggccgctactcagcacttaatagaatcacaacgctgttgggccagtagtatttattgctttagagattgcttgtcgtacctgtatgtcgtccctttttaaatatgttttccattttcttgaaactgtataaagtttttttcccccttagcataagcatcttatatataacaactcatttgtacaaggtttttaagtttatatataaaatgtgtatatatatttttgtttcccctttttgacgtttttttttctgtatgaaacccagatgtcaccaaatggacattaatagttgcattaaggatcagtagcattaacaaaagttgctttaaaagccattatgtaaatcaagacttgaaaatgagtgagggaattttagcgacactgtctgagcagcagtgggagccatcttcgtttcgcctttgaactcccagtgggatgccctaccctgcgcccttaggacgcggactgaccgtgtacataact

SEQ ID NO: 23941 - DNA, 2135 bp, Homo Sapiens
ttcccacaaaagctaggctggttctgattcttaacctgctccagcagtgacacactcagtcccacagggagtggacgacccccaggaagaagatgatgttttggaggaaactccccaaagccctcttcattgggctgactctggccattgctgtcaatctccttctggtattttctagcaaggggactttacaaaacctgtttacgggtggtctccacagggagcttcctttacatctgaataaacgctacggggcagtgataaagagactctcccacttggaggtggaattgcaggatctgaaagaaagtatgaaattagctctgaggcaacaagaaaatgtgaacagcacactgaagagggcgaaagatgaagtacgccctcttctaaaggcaatggaaaccaaggtgaatgagacaaagaagcacaaaacccaaatgaaactcttcccacactcacagcttttcaggcaatggggcgaggatctttctgaggcccagcagaaggcggcccaggacctcttccggaagtttggttacaacgcgtacctcagcaaccagctgcctctcaatcgcaccatccccgacacgcgagactacagatgtcttcggaagacatatccttcccaactcccatccctcagtgtcattctcatattcgtgaatgaagctctgtccattatacaacgggccatcaccagtatcatcaaccggacgccctctcgattgttgaaggaaatcatcttggtggatgatttcagctcaaatggagaactaaaggtacacttggatgagaagattaagctttacaaccagaagtatccaggactactgaaaataatacggcatcctgaaaggaaaggtcttgctcaagcccgcaacactggctgggaagctgccacagcagacgtggtcgccatcttggatgctcacattgaagtcaatgttgggtgggcagagccaatcttggctcggattcaggaggaccgcactgtgattgtgtctcctgtgtttgacaacattcgttttgacaccttcaaactggataagtatgaactggcagttgatgggtttaactgggaactctggtgccgctacgatgcactgccacaagcctggattgatctgcatgatgtcactgccccagtgaagagtccttcaatcatgggcatcctggctgctaacaggcacttcctgggagagatcgggtctctggatggtggaatgctcatctatggaggagagaacgtggagcttagcctgagggtgtggcagtgtggagggaaggtcgagattttgccctgttcccggattgcccacctagagagacaccacaagccctacgccttggatctcaccgctgccttgaagcgcaatgctctgcgagtggccgaaatctggatggatgagcacaaacacatggtctacttggcctggaacatacctctccagaactctggaatagattttggagacgtttcttccagaatggcactccgggaaaaactgaaatgtaaaacttttgactggtacctgaaaaatgtttatccactcttgaagccactccacaccatcgtgggctatggaagaatgaaaaacctattggatgaaaatgtctgcttggatcagggacccgttccaggcaacacccccatcatgtattactgccatgaattcagctcacagaatgtctactatcacctaactggggagctctatgtgggacaactgattgcagaggccagtgctagtgatcgctgcctgacagaccctggcaaggcggagaagcccaccttagaaccatgctccaaggcagctaagaatagactgcatatatattgggattttaaaccgggaggagctgtcataaacagagataccaagcggtgtctggagatgaagaaggatcttttgggtagccacgtgcttgtgctccagacctgtagcacgcaagtgtgggaaatccagcacactgtcagagactggggtcagaccaacagccagtgatcctcagatggtgctggatctgggtcatcaattcttgcaagtggaatggcttctactcctaacactcccagcttctttctcaatgagaaagaaagcatgtgtatgtctgtttatggcgacttcaggtgg

SEQ ID NO: 23942 - DNA, 2049 bp, Homo Sapiens
actgtacaaatgctttatttctattcaatatttagaagacagttataaacaagatgcattcaatagcatggtggcagatgaacatcaggaaggaacatccatgagcttccatccacggaacctcaccatggatacgcttgtgatcaagggcctggtctcccctcaagacacggtcacagatcagaggccacaccatcctagcagtggagcagtaccagctgggacagggtccttctgtgacacctgctgcatcaccaggctgggtgaacggacacaattgccagaactcacagaatagaagtatcagcaccgaaacctcacaggaaaaatggtaagttctaagtttctccattaatagtaactctcagattaatctctgtcatccatcgcttctccaagaaatgactttttagggtgatgtgccaggcgccatgttggagggctggtggtagcggcttggggaggtgctcactctgtcggtcttgctctctcgcacgcttcccccggctcccttcgtttcccccccccggtcgcctgcgtgccggagtgtgtgcgagggagggggagggcgtcgggggggtggggggaggcgttccggtccccaaaagacccgcggagggaggcggaggctgtgagggactccgggaagccatggacgtcgagaggctccaggaggcgctgaaagattttgagaagagggggaaaaaggaagtttgtcctgtcctggatcagtttctttgtcatgtagccaagactggagaaacaatgattcagtggtcccaatttaaaggctattttattttcaaactggagaaagtgatggatgatttcagaacttcagctcctgagccaagaggtcctcccaaccctaatgtcgaatatattccctttgatgaaatgaaggaaagaatactgaaaattgtcactggatttaatggtatcccttttactattcagcgactatgtgaattgttaacagatccaaggagaaactatacaggaacagacaaatttctcagaggagtagaaaagaacgtgatggttgttagctgtgtttatccttcttcagagagaaacaattccaatagtttaaatcgaatgaatggtgtgatgtttcctggaaatgcaccaagctatactgagaggtctaatataaatgggcctgggacacccaggccacgtaatcgaccaaaggtttctctgtcagcccccatgacaacaaatgggtggcctgagagcacagacagcaaagaggcaaatttgcagcaaaatgaggagaaaactcacagtgactcttcgacatctgaatcagaagtttcctcagtgagccctttgagaaataaacatccagatgaagatgctgtggaagctgaggggcatgaggtaaaaagactcaggtttgacaaagaaggtgaagtcagagaaacagccagtcaaacgacttccagcgaaatttcttcagttatggtaggagaaacagaagcatcatcttcatctcaggataaagacaaagatagccgttgtacccggcagcactgtacagaagaggatgaagaagaggatgaagaggaagaagaagagtcttttatgacatcaagagaaatgatcccagaaagaaaaaatcaagaaaaagaatctgatgatgccttaactgtgaatgaagagacttctgaagaaaataatcaaatggaggaatctgatgtgtctcaagctgagaaagatttgctacattctgaaggtagtgaaaacgaaggccctgaaagtaagtggttcttctgactgccgtgaaacagaaaaattagtaggaaccaattcccagtaaaactggaaagaatctttccagaatcatcccatggataatgatgacgaagccacagaagtcaccgatgaaccactggaacaagactatttagaaacatttacatgcagtattttacacacagttctggttttaacactgtataaaacttttatgtaaaaaagtgcacctttagttttacaagtaaagcaggttgtaaaataaagtactttatggataattcctgaaag

SEQ ID NO: 23943 - DNA, 3498 bp, Homo Sapiens
gttgaagtattgataacaccaaggaactctatcacaatttgaaaagataagcaaaagtttgatttccagacactacagaagaagtaaaaatgcgtccaatgcgaatttttgtgaatgatgaccgccatgtgatggcaaagcattcttccgtttatccaacacaagaggagctggaggcagtccagaacatggtgtcccacacggagcgggcgctcaaagctgtgtccgactggatagacgagcaggaaaagggtagcagcgagcaggcagagtccgataacatggatgtgcccccagaggacgacagtaaagaaggggctggggaacagaagacggagcacatgaccagaaccctgcggggagtgatgcgggtgggcctggtggcaaagggcctcctactcaagggggacttggatctggagctggtgctgctgtgtaaggagaagcccacaaccgccctcctggacaaggtggccgacaacctggccatccagcttgctgctgtaacagaagacaagtacgaaatactgcaatctgtcgacgatgctgcgattgtgataaaaaacacaaaagagcctccattgtccctgaccatccacctgacatcccctgttgtcagagaagaaatggagaaagtattagctggagaaacgctatcagtcaacgaccccccggacgttctggacaggcagaaatgccttgctgccttggcgtccctccgacacgccaagtggttccaggccagagccaacgggctgaagtcttgtgtcattgtgatccgggtcttgagggacctgtgcactcgcgtgcccacctggggtcccctccgaggctggcctctcgagctcctgtgtgagaaatccattggcacggccaacagaccgatgggtgctggcgaggccctgcggagagtgctggagtgcctggcgtcgggcatcgtgatgccagatggttctggcatttatgacccttgtgaaaaagaagccactgatgctattgggcatctagacagacagcaacgggaagatatcacacagagtgcgcagcacgcactgcggctcgctgccttcggccagctccataaagtcctaggcatggaccctctgccttccaagatgcccaagaaaccaaagaatgaaaacccagtggactacaccgttcagatcccaccaagcaccacctatgccattacgcccatgaaacgcccaatggaggaggacggggaggagaagtcgcccagcaaaaagaagaagaagattcagaagaaagaggagaaggcagagcccccccaggctatgaatgccctgatgcggttgaaccagctgaagccagggctgcagtacaagctggtgtcccagactgggcccgtccatgcccccatctttaccatgtctgtggaggttgatggcaattcattcgaggcctctgggccctccaaaaagacggccaagctgcacgtggccgttaaggtgttacaggacatgggcttgccgacgggtgctgaaggcagggactcgagcaagggggaggactcggctgaggagaccgaggcgaagccagcagtggtggcccctgccccagtggtagaagctgtctccacccctagtgcggcctttccctcagatgccactgccgagcaggggccgatcctgacaaagcacggcaagaacccagtcatggagctgaacgagaagaggcgtgggctcaagtacgagctcatctccgagaccgggggcagccacgacaagcgcttcgtcatggaggtcgaagtggatggacagaagttccaaggtgctggttccaacaaaaaggtggcgaaggcctacgctgctcttgctgccctagaaaagcttttccctgacacccctctcgcccttgatgccaacaaaaagaagagagccccagtacccgtcagagggggaccgaaatttgctgctaagccacataaccctggcttcggcatgggaggccccatgcacaacgaagtgcccccaccccccaaccttcgagggcggggaagaggcgggagcatccggggacgagggcgcgggcgaggatttggtggcgccaaccatggaggctacatgaatgccggtgctgggtatggaagctatgggtacggaggcaactctgcgacagcaggctacagtgactttttcacagactgctacggctatcatgattttgggtcttcctagagcgtctaaaagtattgcacacaaaatcaactttttactccaatttcctccaactccaaaacccaaagtgtccgtgctgtgtccctgtgcttcactgggtttctcaaccgtggcttttcaccgcagcttgtctgaaactcttagcctgcagaatttaagacaatggcagtttttatcgtgatttgcctttgaacttggtcctattgaagttcacaataagtggaaaacaattttttcagagaatgtatttttgtgcagaattgcacagaattctagagacagcgttgttcggcatcaaggcaaaagcccacctttgctttttatggaaagcattactttatttaaagagacagacaatgacgcattttaatctacctttgtcttaatttacagcaggttttgtatgaatttttaaccttttaacaaactcccaaatctggttgatgcctttgacagtgatgaaaacgatttcaccacatctgaatccagagaaaccggctttttttcttattgcgagcatgttaaaacgttgggaacatgtggggaattgtatattgcgctgaattaacttctcccgcctcttgtaatgctctggtgggttcttgtttgggaatgcgatattttgtggctggtttagctagagagtgaactctcaaaggtatcaaaactgtgcttccattattagtgcaagaaacagacaggctttaaggggtagatgacgtgaaattttgcaagtcttaattacagctgcagatgcatgggattctggatttttttgttgctttttagtttaatgggactttaaaagtaattgaggagaaagaaccgtgatgttccctgtttctccagtaaaggactggcttttgcttgggcagaggtggtgctgctgggtgtgcagctgccacagactccaaaggcgtagaagtttgtgccaacacacggagtcattctggctctctgctgaggcccctgttttctggcaggtgccctccttggaaactggttttggctctgatcagcggttctttttgcagcaaagcctgcatctgtgttgacttgcaagattttgcgtttattcaggcaaaaactggtcaaaatggttactacatgatttgttcccagaggtttgaaacattcagtgaaactttttaaaactttgattgcatgatgtattttttttttagaaagttattgtttgagaataatgtctttttataccaggaaaatagttatcctgaatgacgttgaaaactccccctcccctttatttttttttaatcaatacatgtgaaagtaacaa

SEQ ID NO: 23944 - DNA, 3756 bp, Homo Sapiens
gcggtcgcgttagttcggcccaatggcggcaccgctgcttcacacgcgtttgccgggagatgcggccgcttcgtcctctgcagttaagaagctgggcgcgtcgaggactgggatttcaaatatgcgtgcattagagaatgactttttcaattctcccccaagaaaaactgttcggtttggtggaactgtgacagaagtcttgctgaagtacaaaaagggtgaaacaaatgactttgagttgttgaagaaccagctgttagatccagacataaaggatgaccagatcatcaactggctgctagaattccgttcttctatcatgtacttgacaaaagactttgagcaacttatcagtattatattaagattgccttggttgaatagaagtcaaacagtagtggaagagtatttggcttttcttggtaatcttgtatcagcacagactgttttcctcagaccgtgtctcagcatgattgcttcccattttgtgcctccccgagtgatcattaaggaaggcgatgtagatgtttcagattctgatgatgaagatgataatcttcctgcaaattttgacacatgtcacagagccttgcaaataatagcaagatatgtaccatcgacaccgtggtttctcatgccaatactggtggaaaaatttccatttgttcgaaaatcagagagaacactggaatgttacgttcataacttactaaggattagtgtatattttccaaccttgaggcatgaaattctggagcttattattgaaaaactactcaagttggatgtgaatgcatcccggcagggtattgaagatgctgaagaaacagcaactcaaacttgtggtgggacagattccacggaaggattgtttaatatggatgaagatgaagaaactgaacatgaaacaaaggctggtcctgaacggctcgaccagatggtgcatcctgtagccgagcgcctggacatcctgatgtctttggttttgtcctacatgaaggatgtctgctatgtagatggtaaggttgataacggcaaaacaaaggatctatatcgcgacctgataaacatctttgacaaactcctgttgcccacccatgcctcctgccatgtacagtttttcatgttttacctctgtagtttcaaattgggattcgcagaggcatttttggaacatctctggaaaaaattgcaggacccaagtaatcctgccatcatcaggcaggctgctggaaattatattggaagctttttggcaagagctaaatttattcctcttattactgtaaaatcatgcctagatcttttggttaactggctgcacatataccttaataaccaggattcgggaacaaaggcattctgcgatgttgctctccatggaccattttactcagcctgccaagctgtgttctacrcctttgtttttagacacaagcagcttttgagcggaaacctgaaagaaggtttgcagtatcttcagagtctgaattttgagcggatagtgatgagccagctaaatcccctgaagatttgcctgccctcagtggttaacttttttgctgcaatcacaaataagtaccagctcgtcttctgctacaccatcattgagaggaacaatcgccagatgctgccagtcattaggagtaccgctggaggagactcagtgcagatctgcacaaacccgctggacaccttcttcccctttgatccctgtgtgctgaagaggtcaaagaaattcattgatcctatttatcaggtgtgggaagacatgagtgctgaagagctacaggagttcaagaaacccatgaaaaaggacatagtggaagatgaagatgatgactttctgaaaggcgaagtgccccagaatgataccgtgattgggatcacaccaagctcctttgacacgcatttccgaagtccttcaagtagtgtgggctccccacccgtgttgtacatgcaacccagtcccctctgacggcagaaatttgtgactgagatgtgacatttgggattccccatcacttgtcatgccctcagcacccagcttgtgccattgggcattgatggcattgaactagagcgagtgcctgcctcggctgtggcacttccaggttcgactgaatcaagcatctgaagactgggttttttttgttgttgttgttccccttacagacaaaatgaagactatcatgtgcaatcttttacagtggggttgatgatacatttggaaggatttgcttgtttaatatgtacattttttgtgttaacagctttttgacacaattactgggtaatttctaatataggcagcagactgttttacgggttgctgttttaacatgggtttttgtcagatccatggtcttaggacttgactgatgagctttcagtgaagaatcctctaagataaaacttctatttaaagactttaactagaaagtgtttattttggctacattgttcaccttctgctgtattggtatttgtctgttgggatttcaagggagtgtagagaagacagaaggaaagctgagagctggcccgacatggtctgggacacagagttggagctggcactgaagatctccagggacttcagagaccaataaaagcccatagggaagagagagaggatatagggaaacagaatcagatgtgtaatatacttggcacagcgaaaaaatggatttaaaagacaaaaatggaggtccaggtagatgtaattcacacagactgaaagtgagttcgggcttgtgtaaaacacatgagattggatttgaccccttggctctcaagtgtccccttagatctagaactgctccttggtggccattagatcgagtcagttttgatctgcatcacttagttattgggaatttctttgttggaaacaggaaaatttttttagattatttggtgtacggttttgctcacaacaataggtggaagttgctagtgcagtcttggtctgatggctgtgtgcatcgcacattcggcttggtgaaatccttctctaaagcctctttttgtatttttataactaaacagaggaagtcttcagaagacctcgctttaaaacaaatttgtgcaaacactgctagagtcattttgaagctcaagcattttcactttgtttcttacatgtgtacttttttgtttacttgtgaaaatggccatctttaagcatatttattttctgccactttatttaaaggcaagcaatattttcttgatcataaatattttgtaatgaaatacttcctcttttccagggctttgtatgcacttgtataattacattgatggcaatgtagagtttgaatttcagtctgtaaatacttttttggaaaatagaaatttttattgctttaaagttttggatatgggtggttttcttttccgggtttggtggaaagtaatttgagaactttaaggttgtctttttaactgctggcaaaatgttgattttttaatattagataaaacgagtaaacgaaattccccagaaattagtagtaagtggggtctttgtgggttgggaagtagttttaatgtagaaagacatttacatataagtctgtttaatttcaaaggagtttgtgaaaaaaaatccatggtgaaaatgaaacaatgacatggttaatctggaacttacgttcttataccaataaaaggtacctcaatamawrttctttcaaaaaaaaaaaaaaaaaactgcggccgcaagcttattccctttaggagggttaattt

SEQ ID NO: 23945 - DNA, 377 bp, Homo Sapiens
ggcttcttccggccgggccgagaggtggttacattcgttgaaggacaccagctgcggaatttgcggctttggcagattgaaatcatggcaggtccagaaagtgatgcgcaataccagttcactggtattaaaaaatatttcaactcttatactctcacaggtagaatgaactgtgtactggccacatatggaagcattgcattgattgtcttatatttcaagttaaggtccaaaaaaactccagctgtgaaagcaacataaatggattttaaactgtctacggttcttaacctcatctgttaagttcccatgcctggagaagctaatgccaactcatcatgtgataattcaatttgtacaataaattatgaacctgg

SEQ ID NO: 23946 - DNA, 876 bp, Homo Sapiens
gtagtgtgtagggcatatatctcagaggccaattctggactgtggaactaatcttattctatatcatcgtaatctaaacctgttataaactcatctttgtacactagcatttatttaagcaagaatcgtacaagtatgttcatcctggagctttctctcagcaatcaaagttgtcctagtgtattatagacctaaggaaggatttactttgattctttactttctaaatattaggtcattataatctttgtggctccccttcagtaatatcagttactgtaattatttccatatgtttcatgctagtgcagctgagaacaggctaggtcatccaattggaatgttattttttaaatcactatttccataattcctcagagcgaatgtaggaaatctttccagatatctgtcaccttgacagtttttataaagtataattaatgtacaatattatttctttaaattttctgttttcaatactagaacagtcttactgttttccttctagtacaatcatgtttgaaattaagaagatctgttgcatcggtgcaggctatgttggaggacccacatgtagtgtcattgctcatatgtgtcctgaaatcagggtaacggttgttgatgtcaatgaatcaagaatcaatgcgtggaattctcctacacttcctatttatgaggtaaacatattaaacatctctttgtttttatgcttttttcttactgtctttattatatcatttatatgcactattaatataaaaatctataacagcaactggtaagaaattaaatgaaaaaaatctggatacaaaacacatggacattaaaacacattacttcgggtaatgtgggtaggaaaaatgaccagaaagaagt

SEQ ID NO: 23947 - DNA, 4074 bp, Homo Sapiens
tccgtggttaacagcttatgggcggggagctcggcaaaactcagactaaaaacagaaaaagagaaaagaaaggacaaattcgatgcacccgcgtcggtcctccagagtttgtgaaggggtgtaaacatgtcggagtctggggagatgagtgaatttggctacatcatggaattgatagctaaaggcaaggttaccattaagaatatcgaaagggagctcatttgcccagcatgcaaggagctgtttacccacccattgattctcccttgccaacatagtatctgtcataaatgtgtaaaagaactcctgctgactctcgatgattcattcaacgatgtgggatcagacaactccaatcaaagcagtcctcgacttcggctcccctcccctagtatggataaaattgaccgaattaacagaccaggctggaagcgcaattcattgaccccgaggacaactgttttcccttgccctggctgtgagcatgatgtggatcttggagaacgaggaatcaatggtctgtttcgaaacttcactttggaaactattgtggaaagatatcgtcaagcagctagggcagccacagccattatgtgtgacctttgtaaaccaccacctcaagaatccacaaaaagctgcatggactgtagtgcaagttactgcaatgaatgcttcaaaattcatcacccttggggtactataaaagctcaacatgagtatgttggtccaactactaacttcagacccaagattttaatgtgcccagaacatgaaacagagagaataaacatgtactgtgaattatgtaggaggccagtttgccatctgtgtaagttgggtggtaatcatgccaaccaccgtgtaaccactatgagcagtgcctacaaaaccttaaaggaaaagctttcaaaggatattgattaccttattggtaaggaaagccaggtgaagagtcaaatatctgaactaaacttgttaatgaaagaaacagagtgtaatggagagagggctaaagaagaagcaattacacattttgaaaagctctttgaagttctggaagagaggaaatcatctgttttgaaagcaattgactcctctaagaaactaagattagacaaatttcagactcaaatggaagagtaccagggacttctagagaacaatggacttgtgggatatgctcaagaagtgctaaaggagacagatcagtcttgctttgtgcagacagcaaagcagctccacctcagaatacagaaagccacagaatctttgaagagctttagacctgcagctcagacttcttttgaagactatgttgttaatacctctaaacaaacagaacttcttggagaattatcctttttctctagtggcatagacgtgccagagatcaatgaggaacagagcaaagtttataacaatgccttgataaattggcaccatccagaaaaggataaagctgatagctatgttcttgaatatcggaaaatcaatagagatgatgaaatgtcatggaatgagatagaagtgtgtggaacaagtaaaataattcaagacttggaaaacagtagtacctatgctttcagagtaagagcttacaagggttcaatctgtagtccttgcagcagagaattgattcttcatactcctccagctccagttttcagcttcctctttgatgaaaaatgtggctataataatgaacacctcctgctgaacttgaagagagaccgtgtagagagtagagctggatttaatcttctgcttgctgcagaacgcatccaagtgggttattacacaagcttagactacatcattggagatactggcattacaaaaggaaaacacttctgggccttccgtgtggaaccatattcatacctggtaaaagtgggagttgcttctagcgataaactacaagaatggctccgttctccccgggatgcagttagtccaagatatgagcaagacagtgggcatgacagtggaagtgaggatgcctgttttgattcttcacaaccatttaccttagttactataggcatgcagaaattttttatacccaagtcacctacttcttctaatgaacctgaaaatagagttctccctatgccaacaagtattgggattttccttgactgtgataaaggcaaagtaaatttctatgatatggatcagatgaaatgcctttatgaacgccaagtggactgttcacatacactgtatccagcatttgcattaatgggcagtggaggaattcagcttgaagaacccatcacagcaaaatatctggaataccaagaggacatgtagttgaaacatctgatgtgactcaggataaaaactgtaaacaaagcaatgccttagcgttaaccttcgtaactaattacatatcgctgagtgttctgtcaccccacttgtgtttgagtatgattcttcttgaaatacagaaaatctaaacagccttgtgtcttcatgtcgttgttctgcctttcacaaatgatgaaagtgaagatgttctttccaagttaatactgaagtggttaactttgcaactggactgtcttttactttatgtacaggatatctaatttatttctgtbagctggtgttgctgaaactttccttatggtgggggggatacaaaagtatttattatgattctcttctgtttgacttttcatttttatatcatgtttatgtcctaagagaagatattttttaaatgccttatggataggaattagtactaagcaatgtgtcttgcatttgttttcaataggaaaacaaagttctagataggttaaaagaaaaacaccataaaagtggtagtatatttaagtggaaaattatgtattttaaagtgtgtaactattaaaaatatattgcctggaaaaggaatactactgttttgttttgttaagaccacaaactgtattgctaaggacattttaagagtstgcttagccataacactcatttaacagcatgggtagtaagcatggtttcttgcagaaaacacaaagttctcagctaacacattaaacttctcactttatatactttttttcagagaaatttatctttagtttttcttattctgtgaaaatatttgttcttatgtgaaagaattatttttcagatatattggtaaagatggactgatattaaaagtcatatttattcttttacccccttactgtgttttgtgattttcatttttggcccaattattacatatcaggttttcctgatttatatttacatgtttgaaaagttcattatatattttagtagcgttacatatattataaatttttgtaacatttaaatgttcacttatgtggcattttctgtttctcattggtaataagcatttctaatataagcaagtaaaaatacaaatttaattacttagaaatgataactaagatcacaatgactgtgtaccctttaaaatatcttttaatttgaggaattacattctatctaaattgtgtgtctgtttttgaaaggtgtgtgctttcaagtaggtggtttttatttaaagtacttatttttttgaggttaaaatattcagaaactacttttatgcattgtagcagtaatcatttatggaatgcttttgacatgttttaacagggtaaccaaaacttttaggcctgttttttttggttgtccttgttgttatatttttaatggaaatctgttactcaggctggtagcattaaattagctttttaccctcaactcaagtagcaaatatcatggagaacttcagtgtttagcaggctgttaatttcccatctatgaatagcactttatgatgtaggctaaactaagcaaataatgcagcgttatgtggatcattatgcaataaagctgctaaagtcacatttgtggttgatactcaagccttgtacaagcacatatcatgtagacatttttaaatgtgaagctttaacaggaataggatagctgtttcaaaccttgtgcaattgtaaataaattgtttagctgtgtttctttcatttttaataaaaaattaaaaagaaaaaaaaaaaaaaaaaaaaa

SEQ ID NO: 23948 - DNA, 3791 bp, Homo Sapiens
gttgaaggaagaaatagctcttctcctaagatggaatctgtggtttgggaatgtggttgatcaacttgatatgttggccaaatgtgccccatgtaataaaatgaaaagaagagacaagatgatgtcattttcccatattgtgaaaccaaaaacaaacgccttttgtgagaccaagctaacaaacctctgacggtgcgaagagtatttaactgtttgaagaatttaacagtaagatacagaagaagtaccttcgagctgagacctgcaggtgtataaatatctaaaatacatattgaataggcctgatcatctgaatctccttcagacccaggaaggatggctatgacttggattgtcttctctctttggcccttgactgtgttcatggggcatataggtgggcacagtttgttttcttgtgaacctattaccttgaggatgtgccaagatttgccttataatactaccttcatgcctaatcttctgaatcattatgaccaacagacagcagctttggcaatggagccattccaccctatggtgaatctggattgttctcgggatttccggccttttctttgtgcactctacgctcctatttgtatggaatatggacgtgtcacacttccctgtcgtaggctgtgtcagcgggcttacagtgagtgttcgaagctcatggagatgtttggtgttccttggcctgaagatatggaatgcagtaggttcccagattgtgatgagccatatcctcgacttgtggatctgaatttggctggagaaccaactgaaggagccccagtggcagtgcagagagactatggtttttggtgtccccgagagttaaaaattgatcctgatctgggttattcttttctgcatgtgcgtgattgttcacctccttgtccaaatatgtacttcagaagagaagaactgtcatttgctcgctatttcataggattgatttcaatcatttgcctctcggccacattgtttacttttttaacttttttgattgatgtcacaagattccgttatcctgaaaggcctattatattttatgcagtctgctacatgatggtatccttaattttcttcattggatttttgcttgaagatcgagtagcctgcaatgcatccatccctgcacaatataaggcttccacagtgacacaaggatctcataataaagcctgtaccatgctttttatgatactctatttttttactatggctggcagtgtatggtgggtaattcttaccatcacatggtttttagcagctgtgccaaagtggggtagtgaagctattgagaagaaagcattgctgtttcacgccagtgcatggggcatccccggaactctaaccatcatccttttagcgatgaataaaattgaaggtgacaatattagtggcgtgtgttttgttggcctctacgatgttgatgcattgagatattttgttcttgctcccctctgcctgtatgtggtagttggggtttctctcctcttagctggcattatatccctaaacagagttcgaattgagattccattagaaaaggagaaccaagataaattagtgaagtttatgatccggatcggtgttttcagcattctttatctcgtaccactcttggttgtaattggatgctacttttatgagcaagcttaccggggcatctgggaaacaacgtggatacaagaacgctgcagagaatatcacattccatgtccatatcaggttactcaaatgagtcgtccagacttgattctctttctgatgaaatacctgatggctctcatagttggcattccctctgtattttgggttggaagcaaaaagacatgctttgaatgggccagtttttttcatggtcgtaggaaaaaagagatagtgaatgagagccgacaggtactccaggaacctgattttgctcagtctctcctgagggatccaaatactcctatcataagaaagtcaaggggaacttccactcaaggaacatccacccatgcttcttcaactcagctggctatggtggatgatcaaagaagcaaagcaggaagcatccacagcaaagtgagcagctaccacggcagcctccacagatcacgtgatggcaggtacacgccctgcagttacagaggaatggaggagagactacctcatggcagcatgtcacgactaacagatcactccaggcatagtagttctcatcggctcaatgaacagtcacgacatagcagcatcagagatctcagtaataatcccatgactcatatcacacatggcaccagcatgaatcgggttattgaagaagatggaaccagtgcttaatttgtcttgtctaaggtggaaatcttgtgctgtttaaaaagcagattttattctttgccttttgcatgactgatagctgtaactcacagttaacatgctttcagtcaagtacagattgtgtccactggaaaggtaaatgattgcttttttatattgcatcaaacttggaacatcaaggcatccaaaacactaagaattctatcatcacaaaaataattcgtctttctaggttatgaagagataattatttgtctggtaagcatttttataaacccactcattttatatttagaaaaatcctaaatgtgtggtgactgctttgtagtgaactttcatatactataaactagttgtgagataacattctggtagctcagttaataaaacaatttcagaattaaagaaattttctatgcaaggtttacttctcagatgaacagtaggactttgtagttttatttccactaagtgaaaaaagaactgtgtttttaaactgtaggagaatttaataaatcagcaagggtattttagctaatagaataaaagtacaacagaagaatttgattagtctatgaaaggttctcttaaaattctatcgaaataatcttcatgcagagatattcagggtttggattagcagtggaataaagagatgggcattgtttcccctataattgtgctgtttttataacttttgtaaatattactttttctggctgtgtttttataacttatccatatgcatgatggaaaaattttaatttgtagccatcttttcccatgtaatagtattgattcatagagaacttaatgttcaaaatttgctttgtggaggcatgtaataagataaacatcatacattataaggtaaccacaattacaaaatggcaaaacattttctctgtattcattgttgtatttttctacagtgagatgtgatcttgccaaagccaccagaccttggcttccaggccctcctgtagtgagttgattgtctgcacttgccttgcccaatagccagtaggctacagcttttgccccacacccttattttcagattctggatcattcttgtttacaactgaaatatatataacctcagtccaaagtggtgattgatttgagtatttgaaaattgttgtagctaaatgaagcatgattagtcttagtatgaatatcatttaatctttaaaaaatcaagtaaaaatgtttatctgataatgtttaaataatttacaatataaactgtaaaccttattaggcatgaaatcaatcagaagagaaagaaaaatgctggaacatgcttgatgtattatgtaaaaagcatatttaaacaagggtcctcaaccctgactgcagataagaatcacttgggttacttcagatgcctaacaccttcctctcatacaaataagaattggtagctttcttaaaaaaaaaaaaaaaaaaaaaaa

SEQ ID NO: 23949 - DNA, 5350 bp, Homo Sapiens
actgccgtgccggacccccgagccggagccgagcgcgccgaggccggggccatggagaaagcgcggccgctgtgggccaactcgctacagttcgtgttcgcctgcatctcgtacgccgtgggcctgggcaacgtgtggcgattcccgtacctgtgccagatgtacggcggaggtagtttcctggtcccctacatcatcatgcttatcgtggagggaatgccgctcttgtacctggaactggctgtggggcagcgcatgcggcagggcagcatcggcgcctggaggaccatcagcccgtacctcagtggtgtcggggtcgccagcgtggtggtctctttcttcctctccatgtactacaacgtcatcaacgcctgggccttctggtacctcttccactccttccaggatcccctgccgtggtctgtctgcccactgaatggtaaccacacgggctacgatgaggagtgcgagaaggcgtcctccacacagtacttctggtacaggaaaaccctcaatatctcgccgtccctccaggagaacgggggtgtgcagtgggagccggcgctgtgcctcctcctggcctggctggtggtgtacctgtgcatcctgcgtggcaccgagtccactggcaaggtggtgtatttcacggcgtcactgccctattgcgtgctcatcatctacctcatcaggggcctcacgctccacggagccaccaatggcctcatgtacatgttcactcccaagatagagcagctggccaaccccaaggcctggatcaatgcagccacccagatcttcttctcacttggcctgggcttcggcagcctgatcgccttcgccagctacaatgagccatccaacaactgccagaagcacgccatcatcgtgtccctcatcaacagcttcacctccatatttgccagcattgtcaccttctccatctatggcttcaaggccaccttcaattatgaaaactgcttgaagaaggtgagtctgctgctgaccaacacttttgaccttgaagatggctttttgacagccagcaacctggagcaggtgaagggctacctcgcatctgcctacccaagcaaatacagcgagatgttcccgcaaatcaaaaactgcagcttggaatcggagctagacacggccgtccagggcactggcctggcattcatcgtctacacagaggccattaaaaacatggaggtgtcccagctgtggtcggtgctctacttcttcatgctgctgatgctgggcattgggagcatgctggggaacacagcggccatcctcacccctctgacagacagcaagatcatctccagccacctgcccaaggaggccatctcaggtctggtgtgccttgtcaactgtgccattggcatggtgttcacgatggaggctgggaactactggtttgacatattcaacgactacgcggccacactgtccctgctgctcatcgtgctggtggagacgattgccgtgtgctacgtgtacgggctgaggagatttgaaagtgaccttaaggccatgaccggccgagctgtgagctggtactggaaggtgatgtgggctggcgtaagcccactgctgattgtcagcctctttgtcttctacctgagcgactacatcctcacggggaccctgaagtatcaagcctgggacgcctcccagggccagctcgtgaccaaagattacccggcctatgcactggctgtcatcgggctgcttgtggcctcctccaccatgtgcatccccctggcggccctggggacttttgttcagcgtcgcctcaagaggggagacgcagaccccgtggcctgagatgtgggcttcccagccgctcacggttttacagatactatttacaggcggaaactcctcggctgctttttcaaatgcttaagccaggagtgctcagcccatcaacttcctgagtgtctaaagaagatgaggaaggtgtgcaggaagaaaactcccttgggagaacgcacaccctcccgtggtggctgttcctccctgtcacctgcctcctcatcatggaagggggtgggctatgaaagccggtctcaaagataactgcatccttcattccaggaaagccctagaattagggcacattgcaaactgaaatatgactataattcttatgggaccaaatttaagcaatttttgtttttggctgaagagacaccaaaatattagaggacaaatatttttagatccatttaaggagttttgaagtgcctaagatgacctatttgtcagtggtgcaaaattaattctcttcttttttgagttgtagtgaatatgcaatttctgtgttccccttccaccctttaaatcttaggatgacaagttataaagaaagaagatctttgtctgggacccccaaagggatcctttctctaaggtctctgacagtgggtccaggaccagacctctctacaaaaaattgccccaactacagtttgcaaccccaaaccacattagaagtctgtgcagacatccctccgtggtgtgtgtcttggtgcattggaaaaggagtcaggagccactgtgaggtgagaatgaaagtggatctcagctgggcacggtggctcacgcctgtaatcctagcaccttgggggtcaaggtgggtggatcacttgaggtcaggagtttgaggccagcctggccaacatggcgaaaccccatttctactaaaaatacaaaaaaattagctgggagtggtggcataggcctgtaattccagctactctggctgctgaggcacaagaatcatttgaacctaggaggtggcggttgctgtgagccaagatcatgccactccactccagtctgggcgacagagcaagactctgactcaaaaaaaaaaaaaagtggctctgactttcccataggcttaatattacatttggacatcgtggccaactctatcaagaccacaaataccacttacaattaattttaaattattcatctgtacatagttttctaaaatgtatataattcaaacagagcatcttgtaactgaagacacaccatatctatgatatcgcattagtccatgtggggaaaagaaagatcagattgttactgtgtctgtgtagaaaaggaagacataagaaactccattttgatctgtactaagaaaaattgtttctgctttgagatgttgttagcctataactttagccccaactctgtgctcacagaaacatgcgctgtaatgaatcaaagtttaatggatttagggctgtgcaggatgtgccttgttaacaatatgtttgcaggctgtatgcttggtagaagtcatcgccattctccattctcgattaaccagggacacaatgcacagcagaaagctgcagggacctctgcccaagaaagcctgggtattgtccaaggtttcccccccactgagacagcctgagatatggcctcatgggaagggaaagacctgactgtcccccagcccgacacctgtaaagggtcggtgctgaggaggaatagtgaaggagggaggcctctttgcagttgagataagaggaaggcttctgtctcctgcttgtccctggtaatggaatgtctcggtgtaaagctgaccattcccattcgttctattctgagataggagaaaaccgccctgtggctggaggtgagatatgctggcagcaatactgctctgttactccttgctacactgagatgtttgggtaaagagaaacataaatctagcctacgtgcacatctgggcacagtacctttccttgaacttattcgtgatacagattcctttgctcacatgtttccctgctgaccttcttcccacctgttgccctgctacactcccctcgctaagacagtaaaaataatgatcaataaatactgagggaactcagaggccagcgccggtgcgggtcctccacatgctgagcgccggtcctgggcccactgttctttctctatactttgtctctgtgtcttatttcttttctcaaaaaaatttttctttttttaactgcaataaagtaggtcgttacccctaaagtgagcgagtcccttcctgctctaacgtccagtgcttccttgagatcatggaattctggagagtttctgtggatatatttgcacagatatctttgaagacacaaacactcacctgggacgttggccggagatgtctttttatttttgtgctgtaaaattctcttacagcaaaaataggctttagaaaggtcttctactgtcttcagcaaccatctcatcttccagcttcacctgattgtccagttatcatacatttgactttcaaatgtatgaaccagcatgtaccccatggatttaatcttatctaccccgtggattcaatcttcttatcagaaggttcttttatgtcaaaaaacctgctgtcaaggcttgaagagccggcacactcaatggcaaacacagcaccgagtctgctctgaatcctggaggatctggccctcctctcaacccccactcacagtcaccgtcttacaactcagggccacctgggatcagtcatcagtcagggtgcgtaagccttgaataccaggtagccgcaggagtgaaaagataaatgtcctagatcattaccttattcagtgtccccaccttgcagcgcattccaaccacctgggagcatttaaaactccagatgcccacaccacaccctggggccacccatcagaccttctggaagcaagacctgggcctccatggccccaaaaactccctaggtgatccgatgtgcagccaaatttgagaggccccatttaaaaaagaaagaacatgggtggtacattgaggagtatttacattttataaaatgacttaaaaatttgaaggcatttttgagcatttccaattatatggaagagttacttctacggaatagtttttgctcatggaactcaaacagatgaagcaccactgttacagaataatgtgctccagatgaaaatgtctcgtttctgtgaatttcatgaagagcagaacatttctcaagaatcctcttgagccagtaatcaatcctgtctcaaaaaatgttctttgccatttcctagatactgcacaaaagtggccatgtcgacatttgtccacccaccctccaataagctggagcgacaaagggacattccatccctgtacccttagtggtagccatgacacgatggccagatcatggactccggaaagctttctgtttttactggaaacatagcaaaccttgatttagctccaagaaattgagtagggaaatatttgttttttagcaattgtcatagtaaataaaactctaagcaaatgtgtgtac

SEQ ID NO: 23950 - DNA, 5239 bp, Homo Sapiens
actgccgtgccggacccccgagccggagccgagcgcgccgaggccggggccatggagaaagcgcggccgctgtgggccaactcgctacagttcgtgttcgcctgcatctcgtacgccgtgggcctgggcaacgtgtggcgattcccgtacctgtgccagatgtacggcggaggtagtttcctggtcccctacatcatcatgcttatcgtggagggaatgccgctcttgtacctggaactggctgtggggcagcgcatgcggcagggcagcatcggcgcctggaggaccatcagcccgtacctcagtggtgtcggggtcgccagcgtggtggtctctttcttcctctccatgtactacaacgtcatcaacgcctgggccttctggtacctcttccactccttccaggatcccctgccgtggtctgtctgcccactgaatggtaaccacacgggctacgatgaggagtgcgagaaggcgtcctccacacagtacttctggtacaggaaaaccctcaatatctcgccgtccctccaggagaacgggggtgtgcagtgggagccggcgctgtgcctcctcctggcctggctggtggtgtacctgtgcatcctgcgtggcaccgagtccactggcaagatagagcagctggccaaccccaaggcctggatcaatgcagccacccagatcttcttctcacttggcctgggcttcggcagcctgatcgccttcgccagctacaatgagccatccaacaactgccagaagcacgccatcatcgtgtccctcatcaacagcttcacctccatatttgccagcattgtcaccttctccatctatggcttcaaggccaccttcaattatgaaaactgcttgaagaaggtgagtctgctgctgaccaacacttttgaccttgaagatggctttttgacagccagcaacctggagcaggtgaagggctacctcgcatctgcctacccaagcaaatacagcgagatgttcccgcaaatcaaaaactgcagcttggaatcggagctagacacggccgtccagggcactggcctggcattcatcgtctacacagaggccattaaaaacatggaggtgtcccagctgtggtcggtgctctacttcttcatgctgctgatgctgggcattgggagcatgctggggaacacagcggccatcctcacccctctgacagacagcaagatcatctccagccacctgcccaaggaggccatctcaggtctggtgtgccttgtcaactgtgccattggcatggtgttcacgatggaggctgggaactactggtttgacatattcaacgactacgcggccacactgtccctgctgctcatcgtgctggtggagacgattgccgtgtgctacgtgtacgggctgaggagatttgaaagtgaccttaaggccatgaccggccgagctgtgagctggtactggaaggtgatgtgggctggcgtaagcccactgctgattgtcagcctctttgtcttctacctgagcgactacatcctcacggggaccctgaagtatcaagcctgggacgcctcccagggccagctcgtgaccaaagattacccggcctatgcactggctgtcatcgggctgcttgtggcctcctccaccatgtgcatccccctggcggccctggggacttttgttcagcgtcgcctcaagaggggagacgcagaccccgtggcctgagatgtgggcttcccagccgctcacggttttacagatactatttacaggcggaaactcctcggctgctttttcaaatgcttaagccaggagtgctcagcccatcaacttcctgagtgtctaaagaagatgaggaaggtgtgcaggaagaaaactcccttgggagaacgcacaccctcccgtggtggctgttcctccctgtcacctgcctcctcatcatggaagggggtgggctatgaaagccggtctcaaagataactgcatccttcattccaggaaagccctagaattagggcacattgcaaactgaaatatgactataattcttatgggaccaaatttaagcaatttttgtttttggctgaagagacaccaaaatattagaggacaaatatttttagatccatttaaggagttttgaagtgcctaagatgacctatttgtcagtggtgcaaaattaattctcttcttttttgagttgtagtgaatatgcaatttctgtgttccccttccaccctttaaatcttaggatgacaagttataaagaaagaagatctttgtctgggacccccaaagggatcctttctctaaggtctctgacagtgggtccaggaccagacctctctacaaaaaattgccccaactacagtttgcaaccccaaaccacattagaagtctgtgcagacatccctccgtggtgtgtgtcttggtgcattggaaaaggagtcaggagccactgtgaggtgagaatgaaagtggatctcagctgggcacggtggctcacgcctgtaatcctagcaccttgggggtcaaggtgggtggatcacttgaggtcaggagtttgaggccagcctggccaacatggcgaaaccccatttctactaaaaatacaaaaaaattagctgggagtggtggcataggcctgtaattccagctactctggctgctgaggcacaagaatcatttgaacctaggaggtggcggttgctgtgagccaagatcatgccactccactccagtctgggcgacagagcaagactctgactcaaaaaaaaaaaaaagtggctctgactttcccataggcttaatattacatttggacatcgtggccaactctatcaagaccacaaataccacttacaattaattttaaattattcatctgtacatagttttctaaaatgtatataattcaaacagagcatcttgtaactgaagacacaccatatctatgatatcgcattagtccatgtggggaaaagaaagatcagattgttactgtgtctgtgtagaaaaggaagacataagaaactccattttgatctgtactaagaaaaattgtttctgctttgagatgttgttagcctataactttagccccaactctgtgctcacagaaacatgcgctgtaatgaatcaaagtttaatggatttagggctgtgcaggatgtgccttgttaacaatatgtttgcaggctgtatgcttggtagaagtcatcgccattctccattctcgattaaccagggacacaatgcacagcagaaagctgcagggacctctgcccaagaaagcctgggtattgtccaaggtttcccccccactgagacagcctgagatatggcctcatgggaagggaaagacctgactgtcccccagcccgacacctgtaaagggtcggtgctgaggaggaatagtgaaggagggaggcctctttgcagttgagataagaggaaggcttctgtctcctgcttgtccctggtaatggaatgtctcggtgtaaagctgaccattcccattcgttctattctgagataggagaaaaccgccctgtggctggaggtgagatatgctggcagcaatactgctctgttactccttgctacactgagatgtttgggtaaagagaaacataaatctagcctacgtgcacatctgggcacagtacctttccttgaacttattcgtgatacagattcctttgctcacatgtttccctgctgaccttcttcccacctgttgccctgctacactcccctcgctaagacagtaaaaataatgatcaataaatactgagggaactcagaggccagcgccggtgcgggtcctccacatgctgagcgccggtcctgggcccactgttctttctctatactttgtctctgtgtcttatttcttttctcaaaaaaatttttctttttttaactgcaataaagtaggtcgttacccctaaagtgagcgagtcccttcctgctctaacgtccagtgcttccttgagatcatggaattctggagagtttctgtggatatatttgcacagatatctttgaagacacaaacactcacctgggacgttggccggagatgtctttttatttttgtgctgtaaaattctcttacagcaaaaataggctttagaaaggtcttctactgtcttcagcaaccatctcatcttccagcttcacctgattgtccagttatcatacatttgactttcaaatgtatgaaccagcatgtaccccatggatttaatcttatctaccccgtggattcaatcttcttatcagaaggttcttttatgtcaaaaaacctgctgtcaaggcttgaagagccggcacactcaatggcaaacacagcaccgagtctgctctgaatcctggaggatctggccctcctctcaacccccactcacagtcaccgtcttacaactcagggccacctgggatcagtcatcagtcagggtgcgtaagccttgaataccaggtagccgcaggagtgaaaagataaatgtcctagatcattaccttattcagtgtccccaccttgcagcgcattccaaccacctgggagcatttaaaactccagatgcccacaccacaccctggggccacccatcagaccttctggaagcaagacctgggcctccatggccccaaaaactccctaggtgatccgatgtgcagccaaatttgagaggccccatttaaaaaagaaagaacatgggtggtacattgaggagtatttacattttataaaatgacttaaaaatttgaaggcatttttgagcatttccaattatatggaagagttacttctacggaatagtttttgctcatggaactcaaacagatgaagcaccactgttacagaataatgtgctccagatgaaaatgtctcgtttctgtgaatttcatgaagagcagaacatttctcaagaatcctcttgagccagtaatcaatcctgtctcaaaaaatgttctttgccatttcctagatactgcacaaaagtggccatgtcgacatttgtccacccaccctccaataagctggagcgacaaagggacattccatccctgtacccttagtggtagccatgacacgatggccagatcatggactccggaaagctttctgtttttactggaaacatagcaaaccttgatttagctccaagaaattgagtagggaaatatttgttttttagcaattgtcatagtaaataaaactctaagcaaatgtgtgtac

SEQ ID NO: 23951 - DNA, 6440 bp, Homo Sapiens
gtctgctcctcacactgcagctgctgggccgtggagcttccccgggagccagggggacttttgccgcagccatgaagggggcacgctggaggagggtcccctgggtgtccctgagctgcctgtgtctctgcctccttccgcatgtggtcccaggaaccacagaggacacattaataactggaagtaaaactcctgccccagtcacctcaacaggctcaacaacagcgacactagagggacaatcaactgcagcttcttcaaggacctctaatcaggacatatcagcttcatctcagaaccaccagactaagagcacggagaccaccagcaaagctcaaaccgacaccctcacgcagatgatgacatcaactcttttttcttccccaagtgtacacaatgtgatggagactgttacgcaggagacagctcctccagatgaaatgaccacatcatttccctccagtgtcaccaacacactcatgatgacatcaaagactataacaatgacaacctccacagactccactcttggaaacacagaagagacatcaacagcaggaactgaaagttctaccccagtgacctcagcagtctcaataacagctggacaggaaggacaatcacgaacaacttcctggaggacctctatccaagacacatcagcttcttctcagaaccactggactcggagcacgcagaccaccagggaatctcaaaccagcaccctaacacacagaaccacttcaactccttctttctctccaagtgtacacaatgtgacagggactgtttctcagaagacatctccttcaggtgaaacagctacctcatccctctgtagtgtcacaaacacatccatgatgacatcagagaagataacagtgacaacctccacaggctccactcttggaaacccaggggagacatcatcagtacctgttactggaagtcttatgccagtcacctcagcagccttagtaacagttgatccagaaggacaatcaccagcaactttctcaaggacttctactcaggacacaacagctttttctaagaaccaccagactcagagcgtggagaccaccagagtatctcaaatcaacaccctcaacaccctcacaccggttacaacatcaactgttttatcctcaccaagtggattcaacccaagtggaacagtttctcaggagacattcccttctggtgaaacaaccatctcatccccttccagtgtcagcaatacattcctggtaacatcaaaggtgttcagaatgccaatctccagagactctactcttggaaacacagaggagacatcactatctgtaagtggaaccatttctgcaatcacttccaaagtttcaaccatatggtggtcagacactctgtcaacagcactctcccccagttctctacctccaaaaatatccacagctttccacacccagcagagtgaaggtgcagagaccacaggacggcctcatgagaggagctcattctctccaggtgtgtctcaagaaatatttactctacatgaaacaacaacatggccttcctcattctccagcaaaggccacacaacttggtcacaaacagaactgccctcaacatcaacaggtgctgccactaggcttgtcacaggaaatccatctacaagggcagctggcactattccaagggtcccctctaaggtctcagcaataggggaaccaggagagcccaccacatactcctcccacagcacaactctcccaaaaacaacaggggcaggcgcccagacacaatggacacaagaaacggggaccactggagaggctcttctcagcagcccaagctatagtgtgattcagatgataaaaacggccacatccccatcttcttcacctatgctggatagacacacatcacaacaaattacaacggcaccatcaacaaatcattcaacaatacattccacaagcacctctcctcaggaatcaccagctgtttcccaaaggggtcacactcgagccccgcagaccacacaagaatcacaaaccacgaggtccgtctcccccatgactgacaccaagacagtcaccaccccaggttcttccttcacagccagtgggcactcgccctcagaaattgttcctcaggacgcacccaccataagtgcagcaacaacctttgccccagctcccaccgggaatggtcacacaacccaggccccgaccacagcactgcaggcagcacccagcagccatgatgccaccctggggccctcaggaggcacgtcactttccaaaacaggtgcccttactctggccaactctgtagtgtcaacaccagggggcccagaaggacaatggacatcagcctctgccagcacctcacctgacacagcagcagccatgacccatacccaccaggctgagagcacagaggcctctggacaaacacagaccagcgaaccggcctcctcagggtcacgaaccacctcagcgggcacagctaccccttcctcatccggggcgagtggcacaacaccttcaggaagcgaaggaatatccacctcaggagagacgacaaggttttcatcaaacccctccagggacagtcacacaacccagtcaacaaccgaattgctgtccgcctcagccagtcatggtgccatcccagtaagcacaggaatggcgtcttcgatcgtccccggcacctttcatcccaccctctctgaggcctccactgcagggagaccgacaggacagtcaagcccaacttctcccagtgcctctcctcaggagacagccgccatttcccggatggcccagactcagaggacaggaaccagcagagggtctgacactatcagcctggcgtcccaggcaaccgacaccttctcaacagtcccacccacacctccatcgatcacatccagtgggcttacatctccacaaacccagacccacactctgtcaccttcagggtctggtaaaaccttcaccacggccctcatcagcaacgccacccctcttcctgtcaccagcacctcctcagcctccacaggtcacgccacccctcttgctgtcagcagtgctacctcagcttccacagtatcctcggactcccctctgaagatggaaacatcaggaatgacaacaccgtcactgaagacagacggtgggagacgcacagccacatcaccaccccccacaacctcccagaccatcatttccaccattcccagcactgccatgcacacccgctccacagctgcccccatccccatcctgcctgagagtcccctatggggcagacgccggggacctggagttcgtcaggaggaccgtggacttcacctccccactcttcaagccggcgactggcttcccccttggctcctctctccgtgattccctctacttcacagacaatggccagatcatcttcccagagtcagactaccagattttctcctaccccaacccactcccaacaggcttcacaggccgggaccctgtggccctggtggctccgttctgggacgatgctgacttctccactggtcgggggaccacattttatcagagcaacacctaccaagccatcctctccacggacgggagcaggtcctatgccctgtttctctaccagagcggtgggatgcagtgggacgtggcccagcgctcaggcaagccggtgctcatgggcttctctaggcctccaagggctgcagttctacgggctacaccgggaagaaaggcccaactaccgtctcgagtgcctgcagtggctgaagagccagcctcggtggcccagctggggctggaaccaggtctcctgcccttgttcctggcagcagggacgacgggacttacgattccaacccgtcagcataggtcgctggggcctcggcagtaggcagctgtgcagcttcacctcttggcgaggaggcgtgtgctgcagctacgggccctggggagagtttcgtgaaggctggcacgtgcagcgtccttggcagttggcccaggaactggagccacagagctggtgctgccgctggaatgacaagccctacctctgtgccctgtaccagcagaggcggccccacgtgggctgtgctacatacaggcccccacagcccgcctggatgttcggggacccccacatcaccaccttggatggtgtcagttacaccttcaatgggctgggggacttcctgctggtcggggcccaagacgggaactcctccttcctgcttcagggccgcaccgcccagactggctcagcccaggccaccaacttcatcgcctttgcggctcagtaccgctccagcagcctgggccccgtcacggtccaatggctccttgagcctcacgacgcaatccgtgtcctgctggataaccagactgtgacatttcagcctgaccatgaagacggcggaggccaggagacgttcaacgccaccggagtcctcctgagccgcaacggctctgaggcctccgccagcttcgacggctgggccaccgtctcggtgatcgcgctctccaacatcctccactcctccgccagcctcccgcccgagtaccagaaccgcacggaggggctcctgggggtctggaataacaatccagaggacgacttcaggatgcccaatggctccaccattcccccagggagccctgaggagatgcttttccactttggaatgacctggcagatcaacgggacaggcctccttggcaagaggaatgaccagctgccttccaacttcacccctgttttctactcacaactgcaaaaaaacagctcctgggctgaacatttgatctccaactgtgacggagatagctcatgcatctatgacaccctggccctgcgcaacgcaagcatcggacttcacacgagggaagtcagtaaaaactacgagcaggcgaacgccaccctcaatcagtacccgccctccatcaatggtggtcgtgtgattgaagcctacaaggggcagaccacgctgattcagtacaccagcaatgctgaggatgccaacttcacgctcagagacagctgcaccgacttggagctctttgagaatgggacgttgctgtggacacccaagtcgctggagccattcactctggagattctagcaagaagtgccaagattggcttggcatctgcactccagcccaggactgtggtctgccattgcaatgcagagagccagtgtttgtacaatcagaccagcagggtgggcaactcctccctggaggtggctggctgcaagtgtgacgggggcaccttcggccgctactgcgagggctccgaggatgcctgtgaggagccgtgcttcccgagtgtccactgcgttcctgggaagggctgcgaggcctgccctccaaacctgactggggatgggcggcactgtgcggctctggggagctctttcctgtgtcagaaccagtcctgccctgtgaattactgctacaatcaaggccactgctacatctcccagactctgggctgtcagcccatgtgcacctgccccccagccttcactgacagccgctgcttcctggctgggaacaacttcagtccaactgtcaacctagaacttcccttaagagtcatccagctcttgctcagtgaagaggaaaatgcctccatggcagaggtcaacgcctcggtggcatacagactggggaccctggacatgcgggcctttctccgcaacagccaagtggaacgaatcgattctgcagcaccggcctcgggaagccccatccaacactggatggtcatctcggagttccagtaccgccctcggggcccggtcattgacttcctgaacaaccagctgctggccgcggtggtggaggcgttcttataccacgttccacggaggagtgaggagcccaggaacgacgtggtcttccagcccatttccggggaagacgtgcgcgatgtgacagccctgaacgtgagcacgctgaaggcttacttcagatgcgatggctacaagggctacgacctggtctacagcccccagagcggcttcacctgcgtgtccccgtgcagtaggggctactgtgaccatggaggccagtgccagcacctgcccagtgggccccgctgcagctgtgtgtccttctccatctacacggcctggggcgagcactgtgagcacctgagcatgaaactcgacgcgttcttcggcatcttctttggggccctgggcggcctcttgctgctgggggtcgggacgttcgtggtcctgcgcttctggggttgctccggggccaggttctcctatttcctgaactcagctgaggccttgccttgaaggggcagctgtggcctaggctacctcaagactcacctcatccttaccgcacatttaaggcgccattgcttttgggagactggaaaagggaaggtgactgaaggctgtcaggattctt

SEQ ID NO: 23952 - DNA, 4989 bp, Homo Sapiens
  misc_feature (13)..(13): n is a, c, g, or t
  misc_feature (15)..(15): n is a, c, g, or t
  misc_feature (23)..(23): n is a, c, g, or t
  misc_feature (107)..(107): n is a, c, g, or t
  misc_feature (157)..(157): n is a, c, g, or t
acagaggtcattnantctttggnaattattatttataaagcactggactatggtttgaaggagaatgaagaaagggaattaagccctcccctagagcagcttatcgntcacatggccaacacggtggaagctgacggtagcaatgatgagggctatnaggctgcagaagaaggcctgggagatgaagatgaaaagagaaaaatctcagctattcggtcatatagagatgtcatgaagttgtgtgctgctcatctccctactgaatcagatgcaccaaatcattatcaggcagtatgtcgtgcactgtttgcagaaacaatggagctccatacatttctgaccaaaattaagagtgcgaaagagaatcttaagaagattcaagaaatggaaaagagcgatgaatctagcacagacttggaagagctgaaaaacgctgactgggcacgattctgggtacaggtgatgagggatttgaggaatggggtaaaacttaagaaggtccaagagcggcagtacaaccctttgcccattgaatatcagctcaccccttatgagatgttaatggatgacattcgctgcaaaagatacaccttgcgaaaagtgatggtgaatggtgatattccccctcggttaaaaaagagtgctcatgaaatcatcctcgacttcatcagatccagacctcctttaaatccagtctcagccagaaaactgaaaccaactccaccacggccacggagcctccatgaaagaatattagaagaaattaaagcagaaagaaagctgcggcctgtatcaccagaggagattagacgtagcagattagatgtgactacccctgaatctacaaagaatcttgtggagtcatctatggtgaatggaggtttgacatcacaaacaaaagaaaacgggttaagtacctcacagcaggtgcctgcacagcggaagaagctcctcagagccccaactctggccgaactggacagctctgagtctgaggaagaaacgctgcacaagtcgaccagcagcagcagcgtgtctccctctttccctgaagagccagtcctggaggccgtgtccacaaggaagaagcctccaaaattcctgcccatatcatcaacaccccagccagagagacggcagccaccccagagacgacattccattgaaaaggaaacgcctactaacgtgaggcagttcctgccgccttccaggcagagttcccgctctcttgaggaattctgctacccagtggaatgcctcgctcttactgtggaagaagtgatgcatattcgccaggtcctggtgaaggcagagctggaaaaataccaacagtataaagacatctacaccgccttgaaaaaaggaaagctctgcttttgttgccgaaccaggaggttttccttcttcacttggtcttatacctgtcagttctgtaagaggccggtgtgctcacagtgttgcaaaaagatgcggctgccctccaaaccatactccactcttcctatcttttcattgggaccttctgctctgcaaagaggggaaagtagtatgaggtcagaaaaaccctccactgcccatcatcggccacttcggagcattgccaggttctcctcaaaatctaagtctatggacaaatcagatgaagaactccagtttcccaaagagttgatggaggactggagcaccatggaggtgtgtgtggactgcaagaagttcatttcggaaatcatcagttcaagccggcgcagtctggtgttggccaacaaaagggcccgattgaaaaggaaaacgcagtctttctacatgtcctcgccaggcccctcggagtactgcccttcagagaggacgatcagtgagatctgagcctcgtgcctttcagctgcttttgtgctacgagtcagcgtccgtgcgcgaggacactgagccgggctggctctcctttctgtggttttatttaatgggcttgaatttgcattagatcagatttttgccgcatcacattgttccacagactgaatgctgtgttcgtatcgattgatgaaacgtgacaggtccgccaattgctcgtttgcactgagagaggacaacagtttgaaacttacttttgtgtgtgtgtggctttggaagccagtagctacttccttagttcagttctttactgttcctcgaataatctcctgactaaggcaaaaaaaaaaagcttctcctacgagaatcagtctaacagagatgccgatgtcagcacagccctaagcagtaagtcatattggcatttccacgtgactgtgtttctatcccgtgtacagagagatccagagccctacactccacgacctgggggctcacagcacagaacctagaagcacctgctgacactcttcaactgatttttaaatgttgttgcttggagataaaaattacataagggactttttgcctgcattctagtgcaaaacatctgaagagctgtacacccacaagggtgactatttcccctgagtggccgtgttgtcccagtgccctggttcagtgtctcctgagtggatgacaggtcttcattctctatcttgaatgtattatggttactaatagttttataatggaggtctaagaattaaagttgtgtgggagtttcaggacaaaggaaggctaaaagtttgtcaagacgttgagcgtattttggttacctatgagaagggttgtgacagtgtacagtggcagctgttggccacgctgcagaaatgagctggagctcatgggttttcagctacatttttcataactttgtagtacatccatcttgagtaaattaagccacaatttggtacctagggtctcaaactaaaatttatttttataaatgaattttaaaagaaaaaatatctacttcttttaaagttagaagaaaattaacctgctgacaggcaacatttttggggtgctttctgcactagttttccttgtaaatgatttgagtgagtaggtttggtttctgacgaaagtagactggagggtagcattgtatgcctcaaatgtctcagtgtgtttggctcatacgtgggctatactttattattttggtatgcttacaaatgactaaccaatcaaattgtcattaatgtttggaaaatctgttaatgcacatgcacaataatttcctgaaagccataggacatgtctgtagtcagcaccacgatagcaccgtttcatgaaaggcatggcggctgcatttcataccacatcaaaatacagtaacatttctatactaaattaacagtaatacctcaaaactgctccggtagtagtttttaatggattgaaatttacagtttagtaaaaggcttaaaattacttatacttatgaaataaactttaccagttgactaaaataatgcatgttaacagttggtctgtatttgcatgtaaaagtgggccaccagagaacccttattgattacttaagtgtttacattattttaaagactcctgtttaagagctttcagaattgtactgggtgaatctcatttataaaacttcctaagagactatctgaactctatactccagacagttaggtgggagtataaatctaccccttttgatgaccccaggcttgagtttttaaaatgactacccagaagggcacaagggggaaggaaatggtatttgtatatgtatataaatatgcacctaggagaatgtgctttttaaaataatgactactgtttttattaaaacataagaaactacacccccaaaataagactttcattcacattcacaaagcaaacatctagtacatgtctttcacttcactttatgatagtgtattggatgatttgggcattacgatcacctcttaccacagcacagaacatacattcttcaacagcattaacggagtttgccaagtgcattaaagaggtcacgtggagggtacgttcatatgaaacaatctgcagaaagtggggtaagaaagggcacatggcacagttaaagttgtagaaatcaaattactatcattttttgttgccaaaacaaagtcttacatttaacccccctttctaccaccccccctccacacttcacgtcagctacatagtttccacagggtaattcactaagagcttgtggagcttggttttaaaatccttagcctggtctgactttaggcatagcttccagttcttccttccttgtcctggtttcttgttcagcttttacttctaatccaacaacaaaagaaatgtctggctggtctcagctagagtctgatgtgtcttagagcatgtgtgcgtatctgaaccatcatccctgctctcatctcagctccctccaggcctgagcaccggttccttttgtcccatacgtcatgaagtcacactattgggaaacctgtgcttccctctccatggcttaactccctgtcagtgtcggagtgtataagaatgcttgtaaatactgtaatatatttattaatatttgaaaggcattcattcagtggacagtgggaattaactctcccaaggcaagtgaaaatgaatgattgacgtacgttgatttaacaatcttactagattttaattcttaaggatttcaaatgaaaccagaaggtggttatgtaagaggcttaaaatgatcttatgtttaaagagattctgttattagcaccatgaactcgtactatgaaatttttaagccttttatttttctaactatattactgtaggactggatattaggtgtcatataggaaacacaaaagttattgctgtttgctaaagcaaaatagcagaaaattttgtatatgaaaaactgttgaaggaccatagagaaatgtgtactactgacggggcttttactaggcttcctgcgtgtgtaaaagtcgaggtattgctggcattcagggtgacatgatggtactaaatgttttccattaaagtcttctattttaaaatttagagaaaaataaaatggctttccatcag

SEQ ID NO: 23953 - DNA, 294540 bp, Homo Sapiens
aagcttaataaatatatttatttatttatgtcctttaatgcagtagaatgcttttcaaaaaccattcaacttgtgtgtacactgaccagaaaatgttctatataaaaaactgtattttgcttaggttttgagatgaatgtttcatgagatatctgtatatgtattaaaattatttaaatatgaggaaaatgtggtatttgtggtgtatttctctaaagcaggatttttcaaccttgatacaaggttgacatttgggactagataattctgtgtttttggggggttgtcctatacactgtaggatgtttagcagcatttatgggttctacccactagatgtcattagcacctccaccctcagatgtaacaaccatgatgtctccaaatattgtcaaatatcccctggcagaaaatcatccctggttgagaaccactatttaaggaaacaagatagcataagcttggtcaagattacacactggtgttttgtcagtacaattcagaaaataaaatccagcaaataatgtgctcttcacaaagctattttactgtttcttaattattgaaactttttcttatttttgttcttcttaaatggattagttatcctgggtagattactaaatagttttaagtagttgaataaatttgttatgagagctaaaattcctgacataccactgccctgacatatcagcaaaatgataatgatgatgttcaattaaatgtatcaaataaaagcctgcaaaattcaacagactgaagtctatattctggaatttgacagcaaaaaaagttgtgtaggttatcattttttggcaaaaaggcccctaagtacacttgcaatcaatggctacatgcgtagttccaaatgtcatctttattacttctgtttaaatctgtctctagaatagtctccaagaatgtagcttttttactttggaaactcttactcagacagatccccagtaaagcttggtaatttagtagcttaagaacaagttcctccttctgtctgcccttctttctcccttatatgtgaggaaagtggaatttcacaagatgactctattcaagagtcttgataaaagtcgcctttacaaatgcttttacactgttttggggagtgtaaattagttcaacaattgtggaagacagtgtggtgattcctcaaagatctagaaccagaaataccgtttgacccagcaatcccattactgggtatatacccaaaagaatataaatcattctgttataaagatacatgcccatgtatgttcattgcagcactatttacaatagcaaaaacatgaaatcaacccaaacacccatcaatgatagactggataaagaaaatgtggtacatatacaccatggaatgctatgcagccataaaaaggaatgagatcatgtcctttgcagggacatggatggaactagaagccattatcttcaggaaactaacacaggaacagaaaaccaaacaccacatgttctcacttataagtggtagttaaacaatgagaacagatggacacagggaggggaactacacaccttggggcctgttgagggttgggggagggagagcatcaggatgaatagctaatgcatgtggggaataatacttaggtgatgggttaataggtgcagcaaaccaccatggcacatgtttacctatgtaacaaacctgcacatcctgcacatgtatcctggaacttaaaataaaattttaaaaagtcacctttatgggttttgtttttgtttttacttttgcttttggtttttcagtcaggggaattattgatcattgctagacattaggaggtggtaagaatgcagtaaaaagaaatttgacattgtttagaaagacttctgaaaacgaacacattgaaaatattgcatatgtgggccaggtgcggtggctcacgcctgtaatcccagcactttgggagactgaagggagtggatcacctaaggtcaggagtttgggaccagcctggccaacatagtgaaatctcgtctctactaaaaatacaaaaattaggcaggcatggtggcggatgcctgtaatcccagctactcaggaggctgaggcaggagaatcacttgaatctgggaggaacaggttgcagtgagtggagattgtgccactgcactccagcctaggcaacagaatgagactccattgaaagaagggagggagggagggagggagggaggaaggaaggaaggaaggaagggaggagggagagagaaatagaaaagagataaagaaaaagagaacgaaaatattacacatgtgtatcttagcaacttcaaatttccttttccttttagtatgaagcaaaattctaacgttcctagaaagtgttagacctgtcaacctccaggaaggatgagatctgcttccacactgcacagtgtccagaagatcaggaccatgtgtcacttggttcaaagatgacttctaagtggtacctggagatactgaagtaggtcatgtggttttgtctttattttcagaagaatatattgtgtttcataactctatgtttttctatattatccacagaaaaagagcatgagtctttctgattctaggaagtacttctgtcctaaaccaacagtagtttcagctaaattcttatatttgaggccatgttctcaggtatacaacacataaatgaatgaaatatttattcacaagacaatatgcacccttttctcttaaagaaataaacatgtggcacatttcagacagaagctaaacacaaaagtttttgcccaaaaatacaacacaggaaacaaaagtactagaagtatgaaaaagtactagcaagaaccagttgtccacttaggtaaaggggcaggaactaaaactcttttgtggaggttatcctgtttctaagtataaatactcatatgtggaaatatccataacccatgtgaatattacatattttgttgtcctttctacttttagagctattactgtaaaattataagtacattagaaatctaatgtgcagatataaccttaatgagtaacccaaagttctcattccttatttctcttaggtgcagattttaatctcatcctagaaagctagaatatgaaaaccaatgatttactcagggaatgagcctggtctaccacccaggagccacgtttaaagttattgttttatttccctcattctcttcttattgtagaatacaccctaattatcccaaagtacttattttattatggtaaaaaatgggtcagaatacatacctattagaatggctaaaatccaaagcactgacaaagccaaatgctagtgaggatgtgaagcaccaggaactctcactcactgttggtgggaacgcaaaacggcagagccactttggaagacagttcggcagtttcttacaaaactgaacatactcttgtcatacaatccaggaattagtttccttggcatttacccaaatgagctgaaaacttgtgtccacacaaaacctgcatgcagatgtttatagcagctttattcataatggcgaaaacttggaagcaaacaagatgtcctttaataggtgaatggataaacaaactgagatacatacatacagtagaatcttaggcaataagaagtacacgactaaggcatggaaagacactaaggaatcttaaatgcatattgctaagtgaaagaagttaatctgaaaaggctacatactgtatgactccaactatatggtattctgaaaaagaaaacagtacagagacaataagaaaccagtgattgccaggctttagggagagaaggaagaagatgaagaacaagtggagcacagaggatgtttagggcattgaaactactgtgtatgatactgcaatggtggatacatgtcattaaacatcaatcgaaacccacagaatgtccaaacaacagtgaaccctaatgtatattatgaactttagtaataatgcatcaatattggctcatcatttattacaaaggccagcttctggatgccaggacttacttttatctttttcaaagcttactgttttttaaacttacatatactcttacaacagttgttactcaactaacctctaatgaatgtagtctctgatgggttaacaatacagttgcctctccctactcacatgttctgcatccatgaattcaacaaaatgcatatcacaaatactgaaaaaagaaaaaccccaaaataaaaaaaatacaaataaaaaatacaacataactatttacatagcacttacattgtattaggtattataaggaatctagagatgatttaaagcatatgtgaagatctgcatagtttaaatgcaaatactatgctattttatataagcgacttgagcatccacatattttgatatccgctgggggttagggggtcctggagccaatcccacaaggatactgaaggacgactatactgcaagtgtccccaaatcacaatctatcagcagagatggagggagacaaagattcacattacaggtgataagtgttccttcattttgacaaagaatttgccaaaggtgaaactgttgctaaagcttcctcattttaaatggaagagtacacattaacacttagatccaaagtgaaggcctagagatgagcagttttttgctgctgagatatggtaataagcaattaggaagtcctgtcctctccagcctgctccactctcatttccttaaaatatgattcagggattctgagaaagttggtcaccaaaagctcaaattgtcatcatatttatctgataaagttgttcatgtccttaagatatatgttatggagcatatcattagtttgctagcactgccataaaaatgtactacagactgggcaacttaaacttactgaaatttattttctcacagtcctgaagacttgaagttcaaagatcaaagtgccaacagagctcatttcttctgaggcttctctccttcacttccatcttcctcctgtctccacatggcctttcctctgttcctgttttgtcttaatctcttgttcttttttttttctttatttttggagatagaatctcactctgtcacccaggctggagtgcagtgttgtgatcatggctcactgcagcctcaatctcccaggttcaagtgatcctcccacctcagcctcctgagtagctgggtctacaggtgaacgccaccatgcccaggattttttgtttttgtttttcttttttaagacagacaagatcttgctatgttgcccagcctggtgttgaactcctgggctccagcgatctgcccacctccatctctcaaagtgttgggattacaggcatgagctactgttcctggtcctatctcttgttgttataaggacaccagtcatattgggttagggcccaccctaatgagctcattttaacttaatcatctctttaaagacctaatctcaaaacactgtcacagtgtgaggcactaggagttagaatttcaacatatgaattttggagggttcacattttagcccataccaaggagctactatgtgtcgatcgttgttctagtcagtgctgcaaaaaggcaatgggctgggcaaaatcaaaacaggaccaaaaagccaggagtggaggataatagattcagtcagtatcttgggtgatgtagggctcccaagactagctgaagatttaaatcagagaaattatgtgaaatttttatcatggagtgcttattgggctttgaggtggacttggattggaggcagaaatgaacggttaagaggctaaatccaatagaataagtgagaaataaggacctggaaacggtagtagcaataaacaagttcacaaagattcaagctatttttaggtggtagaattaaaagaatttattgacatctcagaggcaggtaataaggagaaggaagcattaagaaaaattcccagagttctcacttaggtgattgaatagattgtgatgttattaactcagatggaaaaatccaggagaaggacagatttataaggagtctaatctgggtgttttaagtctgagattctcttggagatagccagtaagagtgaaatgtaagtctggaacatgcgagcgatgaatagggcagagataatcatcttgaagtgatcagaatgtagttgaagccttgaaaggagatgagctaaccccgggaaaacacaagagtaagaagaggtagaacctgatgaagaccaacaggaggagaactgctcatgaataagtcagaactgtatgagtccagagaggctggtgccatggaattcaagtttggagagagcttctagaaagatgaagtataaaagttagtaggtgaactggtgaaagtgatgggatgcagaaaaaatgtatcttgggtgattcttcctggctgttttatcaaaaagccaaggccaaaggaagacatagcctgagaaatagttcaagtttagtgctatgaactcattgacttttcagtcactcaacacaaatagttgtcctttaagtgaatttatttgaagagtttcctaacacatcacttactattatgcattatgaaaatacaatttttaagtatccactggattaataagtgacaaccaaaaatgttgcaaaaaagttaaaaaaaaaactctgcctattggatttggaaataagaaaggcagtggaaaacacaatatgaatagtgcaagaacaatgagaaaagaagctgaaagagggttcagaaagaataggtgtctcagtctattcaggctgctgtagcaacttaccttaccctaggtaatttataaacaatagaaatttattgcttacatttctggaggctgggaagttcaagatcaagccaccaacagattgtatatctaacaagggcacttttctcatagaaaaggccttcttgctatgacctcacatagcagaagagaaaaaggagctctttcaagcctctttcataagggtacaaatcccattcatgagggcaaaaccctcataacctaatcacttgccaaaggccccatctcttaaaaccatcacctttggggttagatttcaacatgaattttggaaggaaacaaacatttagaccatagcaataagaaataaagaaattaatacagcaataagctcagttataattaaatgggaaaacaatgtatcaagtagagtggctggtaaggggaagaagcttctagataggagaagttaaacatattatatggaatagtgtgtgtcttggaagaaacaagagtagaaggatcctgaatattggtctagccttgaagagtaatagacccattttcccctgacactggaggaagacagataagcatatgtatatggttatagagtaaatgtttacgctctactcatgataatactgatgaaaagagatgtatctttaacttctctgttgatgttagaagagaagcaactccacagaagaaagacctgaagagggcaagacccaaagtatggtcacagaggtaaggtgctgaagtgggaaagaagaaatgaatgccatttcagacctgccaggcaggaactgtgtggctaaaggtgtagaaagggctattcaaataacaacaataaccagcaatagcttccacattgagcatttgttataaaatgtgctatgaaaaaaaatactagtatgtaaaactatttgtaaaaataaaaaatcaaataagaacttacaaaatctagttaatgaaaaccaaaacaacagtaaaggagaatattcactacgaagaagtgagtattcccattttacaaggaagaaatgaagcttcaatgattaatccagggtcattttgctaataactggtgcatctgggatttgatccaaagtcggtctgatttagaaactgtgctatccatcattttcctctagtgtggttacacatggatgtgggagtccctcagggtgttggcaaggcttacactaggggttctgatgctgatgtcttcaggaaatgttgagaaggcctttgaagaaaacaccctgaaagcctggagaagataggtagaaagtggtagctaaagaatctttagcttcaaaggaagaatagactttgtttagaaataaaaaagtaaacttctggaggtgataatggaagctggagaaaaatcagcacttggctgtgtgggcactgagtagtttcctttactttaaaaaaacaaagattaacctttgttttttgagactgtagagcttttagggccatttttagatttttgtcccacagagactgtttcagttttggaaaatccatccctgagcttgtcagacgcattgaaatataccaatctcaagtgcagttgactagttgacatatcttcttttgtaggtatttgataaatatccattattttcattgttgcagatttctttttgtatttcaaagcaaaacttatttttcagctcccaaacatgtttttggccctgaaagagcccttaatccctgtccccaggtgccgtgtctgcagtggttactggaaaaaatgagcctggttgcctcccttcagcatgtgtaaagcttgatatttgacagcagtatcacctccaatgagcatttgctggtggttagatctaatcaggtttatagattactgccacaggccttcagaagtccaacttatttcttttttaagattccagtatttcttgggctttgctttaatccacatataagtgtcatgtcaccttctgagggccttcagggaaggacgtgacatgtgctttattccatgagctcacttttggacttctcaaagatttcttagaaaatactatcttgtatattttatcaggtagtcagagataattgagcaaatcaatactaccaagcacagaaattattttcttagtgtcatgcctggcagcagcaaacaaacaaaatgcctaccatgtgtcagattctcatggtcctggacactgtcacgttcattctgtcatttaatattcctaataactctttgaagtcgagataataatctccaatttgcaactgacaaatctgagacagagattcaagtgagttgcctaaacccaggtagaataggagagaaattccaagtgcccctaacagcagtgctactgagacattcaagactttaatttttttatctttcttactttggtaaaaatatcttacgtgtctgaaataatctttttgtattcgatgtggtgttaaatgcatctgtgactattcgtacacttgtaaatagttgtggaaacctaatttgatcttgcttctaaagaaattataactggatgtagaaaaaaatgggacaataagtcttttaaattgtaagcaacaatttcttgcctcccacattcccagtgtagctttttccgcctctataactcaaagaacacgactgtcttccattagaataaattgtttttgtcagcacgcttttccctgtgcacttcttgaatttgcttttctatttccttgtttaaaaatagctccatgatgagcctatatttcagctttgatatattttatgagtggaaaggaaattacagatattatatcacttaatattactgtgttaacaaaaatgtaaactcttagagggcaggtatttttgtgtgttgtgtgcattgctatgatctctgtgcctaaactgtgtttaatacaataaaagaacacacaaaaaaatttaatcagtcataagatacattagttttactctcttctagtatccttgcattggccttcaaaactgtacccatttctcgaataactcccagtaagtccttcctttgtaaatggtcctatataaggtaaacaaagtctgactatgtagttggagttactgcctgagttttacatatatcctagacttggtctcagtcacagattaatgagcattcactaagagttgatgtagaccatgatctctaagagcacaataattctaactgtcttttcttggtcagctctgcctagccatcactagcacaatgcccagcacaaagtcaccactcagtagatatttgtcaaatcaataaataatgacagaatccaaaatcgtaataatttatcccagtgctcagcactgactatatgtttaataaatatttattgaatttcattgaatattgtgcttaaagagagaatcatgccatgcattccaaattaagtaggcattacatttgaattatcagctgtttgggattatctgtgtggctcctccccactgttagggtggtaaattgagatcttactccatcagcaaactccccacatctgcctagtatttggtttccacaagactagtttactaattctaacgatggcatatttaattttaaaactaatgcataccatgatatcatatactgtccattactattccaataataagaactctttttcagagcagcatattagttatttactaactggtcccttctttccttttctttcttcttttttcttttgttcattcatttttttcttttcttaattctgaatgtcacataaacatataaaggcctaaaggcaaggatcttgacaatattgcaaggtgtattagggttctctagagggacagaactaatatgtatatagggaagaatatatacatacatatatatatttatataaagggaagtttgttaagtattaattcacacaatcacaaggtcccacaatatgctgtctgcaagctgaggagcaaggagagacagtccaagccccaaaactgaagaacttggagtccgatgttcgagggcaggaagcatccagctcgggagaaagatgtaggctggcaggcagggtctagaaaagtctaagaacagtgactagacaatcagcttaagaggacagacacttgactttatgtttataacatatggtccatcttcttggctcttgagttacctgaattgcatcatgtcaagatgacgcaggcttccagattatagtcacttcttccctctagttcccgtaagaattaaaatgatttgactttagttccaacaaacataacgtaacattaatgtgcttcacattaggtcaaatgagtctaaaaatacacacacgcacactacatacccacacacaaatatgcacaaacgtatcttaaatagatagccaattggtgaacactccaaaacagaaagatcatacatttctagtgtttctttgccttatgactggcagattctttgtaacacaaatctctcagtgggaataattttcaaagtatataatatgaaaccagttgtttctgaataaagcaatcaaatagaattatagcagatgccatctatgggggtggaaatggtgccaccaatacagataccaccacttaagtaaaggagaaaaatgtttaaataagtacatggcgtcatcttgttaacataactatactacattagttgtcagtaaatttaaactgttaaacattaacatattaatcactatataaataaatacaagatatgaaatactcaagaaattgaaaagtttaatgcatggccaaattcttccataacagggaatatttttattacagacataaagaaatttaacttaaattaaaaattttagtctcttttattgataaaagtctctttccattatcaacaagacaattttcctccctctaagtagagtttcacaaatctctcagctgagtcattataaagatcttttggtgtgctcttttttatttgaaatatctcttgcttgaaattaaattcagtcctaaaatagcaactatatcacctcctatccacttcccattagtaacagcaaactccagagattagcagaacagcattcatgtgtctggaaaaggaaccttatggatgatttaagcataagacctggctacttactaaggagcagtacacacatatttgtaaatattaatgccagacaaaaatgaaatctgacaaaggtgaaatcattgtactgtacagactaacctaagcagagttccaattttgcctttcaacattatatcttgcagggttgtataagcaataagctcattaacatcagtgtaactgtccccgaaatacaagtggattctggagaatgtaggtagtacaaatgagctctcttcaacgttaaggtttatagcaactgattcttcagagaacatgaagccttatgcttgagataaatttcctcatctgctgtcatgattgacaggtccatttggtttgttttatgggggaagggaacaggactggggcctgactcagggcacagtcctcaggtttggggctcttttgtatgaccgcccacaagtgctatctactgtcacacctctttaaacctgcattttcggattttaacatcagcaaccaatgctcttctctgagcctcaacacagttattctttaaatacagttctatttccttggtgaagtctcctttgaggtactaaatttagcactgtcaatcagaagaacaggtggtatgtgacactaccaaataggtcctctcccatcatgctttcctaagacagccaatcacccagggccctgcctaaggatgtggggctgtcagcagatctggtgaatataagggcaggccagaccctggctcttgagcagtcgtgcattcccagcctcgcctcgggtgtagggattgcatagaaaagcaaaactacacagtcttgactgtgtagttttgtttttaggattagaggctcaccgattcatgtcggagatggtcagaaaaaccaactctccataggacgtcgtttcagaagcaaccttgggcttagtcccaccctttttaggcactcttgagaaatcaggtgagcagcaacttttcttattttaatagtagagtcactttcttattgatctctggctctggattatttgtgtgtgctaaatgcctatgtacaagtgtttgtatgactatttcttgccagtgctgacccattatttaaatctgcttgttaaattctattttaaaatgtctgaacatttttccttaaaaagttgaaagctttattatatcagctaaatgattccatgattcaaattgtttaagttcacttaatattctaaaagttgaggtctgaaatgttgagagaaatgtttacttcttttctagactctctttgcctgttgagaatgttcaaggttatattactcaatgataaagttaagcacaccaagaatagctctgataaaatgcatgtggtatcagctacaccctgatgactttttaagggaatcaactgctgaggtatcagttgcaggacagtgacagaacacttgcctgctgtcagtcaaccttggagagtttaggagagtttattttaagagcatgacattttagacgcataccttcagccccagttagacaaaggcctgtgaagagcaagtgctaaggcaataaaatttacctagacaataggaatgtaagatcaatttaagctggttaattgcaacatagttggagatttggaataaaatgatataattgttttctaaaatattcagaatctcttcatgcattttaactcagcacacagtccaattatatattttgagataaatgttgacactaagaagggtaagaaataatgtttaaaggaaaggtttcttacttctaaatacactttgatttctcatcttcctagaatttgattactaattgtcaatgcctgtaaatacatagatatataattaggtattctatgtctaagaggacagctatttttagatatactaacttataaacagacaaagttagacacagaaagttgttcatcccaaagataatatgctacaaaaaggagtttctgacaaaaaaaatttatgaaagcttttggatattatctgatttttccaaatataaattttattgtctcagagaatgctggtttcatttttttaactaagtagaaggttacagtaaggaacagaattatcactaagaagattattgctccatgaagttttagtaaacaaagaatttaatgaaaaatagtaatgaagtgattgacaattcagaaatgttctatttcagaacagaatagtcatgttgaataattaggtatttatgcatcagaaaattcttcacataatgtctctgaaactgataggcaaagtactttcttgcacttaacaaaatgacttaactgcaaattttatattcgtttctttgatgttgaatattttactttatgaaagcataggccttttcacttcatctacattttacaccagccttccattattcaaagtttgcaaattgttccatattaagaactcaagccagcatttttctttcagaactataataaactttggcctgttcactaaaatttaaatttttctgaatatttacttcagcagtaacaacatttactgcacagttacagtatgaagaaatgttaagaaatagaaagcaccgtatgccgtctacaaaaagcttgcatatttgataaggcttgccaaagcttttccagtcaggaaagagattacaaagttcagatttttacttctggcaactattttaagtaatcagataatgtctgaatcaatgtcaactttataaatatagagtgaacgaaaaatattggggagaaggaaaatttttaaaataattttcacttactaagctgatgcagaggtttatttattttaatttttttttttttttttttttgagacagagtctcattctgtcacccaggctggagtgtggtggcaccatctttgctcactgcaacctccacctcctgggtttaagcaattctcatgcctcagcctcccaagtagctgggactacagacatgggccaccacgcctggctaatttttgtatttgtagtagagacaggggtttcaccatgttagccaaactggtctcaaactcctgacctcaagtaatcctcccgcctcggcctcctaaagtgctgggattaccagcatgagccaccacgccaggcccagaggtttattttacatttatcacatgtcttgtctctctaattacacttcactaaccctgcattgctgtggttttcttcttcaactctgaacctggttttccaccattggtaagactgtatattccctctttgaccactagggttcattccttgttctgtttggctaatacttttttccatttccccttacacttgctactttgggttaggctttaagtcaactcaatgatgaactatgcaaaactgttcaagccacaaaagagaagacctgcccatcactctaggcccacagatgacctatggagcaatccatttggagaaacgtgtgtctctgctatctgcaaagcagctccagagtgacccttagctgggacaccctaatttattttctcttctttttcagagtgcctagaaagatgacaactcaagcaccgacgtttacgcagccgttacaaagcgttgtggtactggagggtagtaccgcaacctttgaggctcacattagtggtaagctcacacattcacacttttgtttttttttcctttgcctcctctccagtaagttaacgttgctgcaggacttgacgccaagtttaagccctgctttcacttcggaaaattagtccaacactatggaaaggtcattttaagggtataccattcacagagtactgacaaaatctgacaatataatggcttgaaatgttttattcatatttattattccacaaagcaaaaataattagtgttggattaaaattgccgttagaatccagcaactaaataggaccaaatttagtcattctatatttgggctcagctgcagagccagactggaagccaagaactcaagcccaatagaagccagccacagagccatggggtaggcagtctgggctgcctgctctggacacctgaacttcagttggttcacacgcaaaataacagtgcatctaattttcctcagaggcagagctgttcagtaattaaccaactcctcattattttattattttattttcaatctttattgagtgattctaatgaattaaaagactttccaatcgttttgaaatgacagaaaataatatgcttctcgggtgtctctatttaaaaggaagcaaacactaaccctagaattttatctgaaaggaagttcatctcttttttgccttctttttcttcctcataactcagtttatggatggttcaaaaaaatgcatggtatcatcttatgaaaaaatggagagtagtgtatgaactatattgtaaataattttaaaattaatcaatattttctctttctgtagtattgtaacgagccatgtaagatggatacggattaaaaaaaatcatgcttaattcttaatttagtgcacttccatggttcattgcccacttcttttttaaaattttatggcttataataaagatataaaataaaatttctttttttctctttttttctattatatgcaccaatcttattcataactggataatactttcttttacattgtacaaatatcatataatcattgcttattttctattgtacatatatagaccaatgaaattcccttttcattggtctatatatgtacaatagaaaataagtcttaccgacttccaaataatttacctatttatctggtaacactcagtaacttctgaactgagcagaacacatatgacttcagtgggaatttgcctccttgagaagtagtggaatctggctacttcatatcttcttgttccttcaaactatatgcaaataaattattacaaagacactactgaaaatatccaatacccataaatcagtccaataaactatttaattggccatagtgggagatgggctaatgtataaacaacaaaatagactttctctagattatctttacctaccagcgtaagtagatagagcatcaacctttatgccaagtgtgaaataaatcatgccctgaatgtgcctcgtacattctcaatgtacagagttttaatatatttaaaacatcaaaccatggacatgtagttcttggctctacaatttatggcagataaagagaatttggctttctacctgcaattccaatgatccatgttgttctggaagactaggtttggattagtctcttatgagaaattgcttgtccatgttacaatgtttttactgattgcacttgtgaaagcagaagagtccaagaagacagtgtccctgtaaccacagaggagggaggagggcatgcctcctgggcttgtcaggcagaaactggagatcagtttgctgcttttgttcttcacttgctctcaaagaggacaacaatcactctttatttcaaattttccttggttcttcatttttataagtccctttcatgattttaatgttgtctattaaattgcatcagatagagccctaggcaggcaggcaggagatggaaattctagtcccctctgtgtcactgctagctgaaggaccttggaaaaatcattaggcctcttttggtctcagtttcctcccttcctgccttcctaatggtctgcaggtttacacactgatcatgcaactgtagggttttccctatcattaagtggcattccatgctggaaagcttttacagattcggacaaggcagtgaacatgatgggacagagcagaggactttgtggtgcccattcaaacataaagatgaattgttcttgctcttcaggttttccagttcctgaggtgagctggtttagggatggccaggtgatttccacttccactctgcccggcgtgcagatctcctttagcgatggccgcgctaaactgacgatccccgccgtgactaaagccaacagtggacgatattccctgaaagccaccaatggatctggacaagcgactagtactgctgagcttctcgtgaaaggtaggctgctggggacctgccaatcctctgctcccccagaggacatctccagcaaattgggaaaggagtccagaaaaagctatgggcagaggtagatgcagctcttaaactacagaagggtctactggaggctgaattatttataaccaagttgtttgccttttggaatttaattttcctctagagtacatcgtaaaagtgactgagaatcagtttctcaatacacatattaaacactcaaaagtatgttaaggaaatattaaaaatcatgtttctcagcaagtagaaaagcttggagccttgtttataagtcctttaaggaataagacatattctccagggaagtgtgaatctccaggaattcacactttaacaagcatccagataattctgatgccggtagtctacagaccacccatttaagaggcatgtaaacatatccagaagaaaataaatgcttgtttattattcaaatgcatgacactgtttccccagaaaacttatcaccaatcttagtggcctctgttgtttttctctatcctttactacctagtgagacattagtatacagaatattgcatgcctttacatgttttataacaatatcttacatgagcttcgtaaagttacatatgcttatccaataaactttaccttcaatgatgttcaattatagggctataattgacctaagcagaaaccacatcaagtaacatcaggtagaactttagcatgcacccagaaaattcacaaatggaaaatgcacagggttggcagcacctgctgttgtttattactcaaaatcatgtcaaagttaattccactcactcctcacacttataaaaaatttccttcaacataaccaaaaaaatcccctttctgtaacacaattaaaatgaagtaatgttattattgggattaacgttttaaatgcaagtaaatatttgggttatttgaatacctatcaagttggagaaggtttagaattttaaaaattaaattaaaaatgtaatgattctttaagtaacaggtacacccatcgtagcaaccactggaattcattttaatgcaacttactggaatatgcaacatggctttcacatattaatagagcgctagatgtgaggtagagggggaagtaccagaaagattctcaagaaatgttataacaaaatctagagcttttatttaaaacaaagaaacaaaaggtggtggcctaaactgctcagcaaaacaaagcaaataaaataaaatatggtggtgagaaagccttctgtaatctcctggctcccattcttgctgtcattgctgggtgagctgggttcaaggacattcaaggatgtttagattggcgagtcatcacctggttttggaattggagctgtgattatttaaaaataccttgtagggagcaccctggctctcactcttgactttgttctcttgtccccgcagctgagacagcaccacccaacttcgttcaacgactgcagagcatgaccgtgagacaaggaagccaagtgagactccaagtgagagtgactggaatccctacacctgtggtgaagttctaccgggatggagccgaaatccagagctcccttgatttccaaatttcacaagaaggcgacctctacagcttactgattgcagaagcataccctgaggactcagggacctattcagtaaatgccaccaatagcgttggaagagctacttcgactgctgaattactggttcaaggtacgtgctggaggttgaggaacagagagaaggggagagagctggtttgtgtctaaatggggccaagcgtccacttgccacctctcacagccctgggaagaatgctgtgagctgatataaaagctggcttttcgacacccatgaaaagtccctgagattctagtcaggagcgcagaatagaagcaatctgtgcttatgaatctcattataaactggaaagggtttcaattaagtgatctacatttccaaattattggcaaataatgaaattttaaaaaatcgttctaagtaaatttttatcttgtaatgaacattttctatttttaaacctaatttatattcatgcaaaatccaaaactttctgcaattttctccattgggatatccagaaaatctttttgactttgtagtcagaattaacagaatctcttttaaaatgggtcattgtgccccctcccaaacattcatctttcccttcccacaggtgaagaagaagtacctgctaaaaagacaaagacaattgtttcgactgctcagatctcagaatcaagacaaacccgaattgaaaaggtatttttctatactgttggttttcaagcctttcaggctgttgcgtccccagctattcctcctcaacgtgggctttgttttaatcttttacagaagattgaagcccactttgatgccagatcaattgcaacagttgagatggtcatagatggtgccgctgggcaacagctgccacataaaacacctcacaggattcctccgaagccaaagtcaagatccccaacaccaccgtctattgctgccaaagcacagctggctcggcagcagtccccatcgcccataagacactccccttccccggtcagacacgtgcgggcaccgaccccatctccggtcaggtaaagctgccatagagagagcagattattgcacattttggaactaggttttgaaacgagaaagattcccttgtccccctcgcagggcatgcgacgcggagagtggttcgcttcttcagtgtcccgctgctcaaacctctaggggagcatacaaacgggcaggttgtggggctccgtgttcctctggacatccagccgcttgtgtgtctgcctactagggtctcaggggtttttataggcatagggtgtgggcgtggcaggtcagggtgatcttgggaaatgcaacatttgggcgggaaggcaggagtgtttgtcctcacctaggtccatgggcacaggcctcgctagggaccacgcacttctcttcccagcacttccctgccctcctcccgtgtaagtttcatgcactcaaaaatgtagcaggtgacaaaggaggtaaaccaagaagttactgaatatgattttcacaaatcctcactgtccacaggtaaattgaagacccttataaacttctgaattcttatttatatttcatgtaataaatatctactttaggggccaaaatatggcacagtgaaaggagaagagcacagaagttagagttcaaagccctaaggacaaatcagcctgatcacttaacagtttgatttagggcaataagtataaataataaaataattgttattatatatggatcacttcctctatcagattggaactatacatacattatctcattaaatgttcacaacctgtaagaattattatcctcaatgttattgataggtaactggaattaaagaagttaagcagtttatttaaggtttcagttgtgtcatctgtaaattaaagagagtcacaataagaatgatctcaagctgcattttggggcttcaatgagataattagttgaaagtgccttgtaaatagaaaataattatgccaatattcttatattcagatggtaagtaaaaccttttaaatattttgcatatgcttgtgttattttatctagaaaataaaatggacttctatgcttacttaatatggaagtattttagaaggtgatcatgtatcatgatcagggctcagaaattatataatcaagtgtaaattgtccacaacagttttgaaagtttgggatttagtttatcatgatgaaacttttaatatgatgaaatgaaaaatgtacaaaatttgagcaaagaagtgtttattgatcaatttaaatgaaataaaaaacacatggatgttccctgccaagaaaattttttataaaagaataataaggagatagttgacctaaataatattcaaacatactgtaaagttactataatcagaacagtatggtattggtaaatgaatagaaaaatacaccaggggaacaaaacagagagtccagaaagagatccaagtataatagatccaagtatatagggaattcaaaaagcaaagtggcctttcaattcaggggagggagaggtattttaataaagaatgctggtccaattagctatccatctggaagcaaacaaacataaacctctgcctctcactatttacagaataaatttcagcttgattaaatagttaaaaaatgaaaaaaaaagagaagacaatctgcaaaagcatttatgggtgaaagcttttaaaaagacagttacagattcaactacataaaaatcaacatgtatgtatggcaaaagcaaaaagtcatttctaaaccaaacagcacttgtgaaaaaattttaagacctttctcctcctcaaggtacttcattgcctctgccataaaagtatcacaataaacataaaatggctacaaggtagacaacaccagcctagaaacagtatataacatacaaaattacgtaagcttatgctggataagacccataaacaagcaaaatattgaaatggattaaaagaaatggatctgggggaatgtttgcaacacttacgacaaataaccaataaatgcactaaatgcattaaaaatcatccacaaattaatttttaaaggaaaaaaatgcaacacaaaaaaagacaaaagatacaaaaaagtatttaacataagaggcaatgtaaaagtccaataaacatgtgaaaaaaaatgctagatgttttccaatttttattgttttagccacaaaaatgtaaagatattggcaaacactaacatgaaaccttgaacaaaaagcttactttaaaaaacatgtctagcagtcgaataaaaaaaaaatgttcagtctcaggctaaatccaagtttgcacaccatgaaatcacaacacaagccaaatgcaatttcttgaggagataacaacctaactatattttaaaacccaagcctaagggtcatttagaatcatggagtgtccctgatcccatggagcattttgaccatcttagcagttttgaaagttcattaataaccatccaaattgccccaaaattttgctttccaataattaagaaataaaatgccaatttgcagagaaaataatggttatcaaagatagactgcttcctaaatatctcatagtttaatcttgatttttgttgtagagtaaggcaaacatatttcattgaataaggtgcattgtatctcgctgtgaccaggtgattattttttgttgtaagtacagaaataagcactctcctataatgaccaaaattacaatgattttcacagttatgggcttacctgtgtcctgctgttaatcagtcatgtcatgctaatcatgtctttaactctttttgaattaaacccatttactaagtacagcaagaacaaggcacagggtgaaacttaaaagcacatgtctctttgcttttcttcagttagtggaaaccacacattattctaacttggtttttgttatatttcaaaggcagtcatgttcagaaaagaggcttattccctagatttccctttagtttgattacaacttcatttacaaaatgtaaatggattttcacacaaaaaaagccattcttcgagaaaataaacatttcttcgtgaaactggttaatgttgtaatgtactgttagggtactctgtaagttagagaaaatatcaactgtaccttgagcttaattagaataatcatttcatgtatgatcagtgtaagctaaatatcctagatagtgacaagatgcatttataaacattttcttatatgcagaattaataaaatgcaatgatagggcaatactgccacctagagaggaaaatgtaataagccttattaagaataaaatcagttctgaaaaaaattttaccttacaatagttggccaatccccagaattattgctatagatcagaaatagtcttttttggccatcagtgctgggatttagcacccaaattcttcaactgatgctacttgcactttggatacacctaaaagcaaacaatgaaaactattctggaagaagcaactttatcaatttacccaaaaatcacagaatcattagtttttaagttagtcaattcccacaataactctaaagatatttaaaataagtccagagtgcaatacaaggggggcgagtgtaaacaaatatggaggaaattaaaagtagctgtccacaaacacttcggctaaagcagcaatttgcaaagtgcactgcacaacctgtacccagcaacatgctgcagaaagcttcctgaggatgtgtccccctgtcctggaaattcacaaggcatactgacatagtaaaggctgtgggaagtcctgcaggggaaaaaaaaaatggcttaagctgcttagtcaagagtggcacaagcattttgattacagaaacctttcttcttataacacctatttgacatcctctaacccccccagaattggaatacagagatgaatttggaatacagaggttgctggatttgacatgtctttcctttggctgcatattaaagaagtagctttttctgttgtgatttttttttttttttaatgtgagaaggtgcaaggcacaaaatctccagcttatttggaattaaagctgattctcttacagggttacagcagataagaataggtttattgagatttaaaacaaattacttccaagtacattatttaccctctgaatgggttatggaggcacacattttaaaactctgccttaaagcacttccagcttttcatctcatgattcacatccagttacccctccttgctttgacattcttgacctctgccttttggttttcaggtccgtgtctccagcagcaagaatctccacatcccccatcaggtctgttaggtctccattgctcatgcgtaagactcaggcatccaccgtggccacaggtcctgaagtgcctcccccttggaagcaagagggctacgtggcctcctcatctgaggctgagatgagagagacaacgctgacaacctctactcagatcaggacagaagagagatgggaagggagatacggtgtccaggagcaagtgaccatcagtggtgctgcgggtgctgccgccagtgtgtcggccagtgctagctacgcagcagaggctgttgccactggtgctaaagaggtactgtcagaatggttttgtttttccttatttcacattctagtttctccaactggatttctgccatgaaactcagtctgtataaattggaggaaaaatgcatatgaacataaaaatatagcagcaactgaagaccaaattcagtagtcatgctttgtaaaaccatttttaattaggacaaaagctccaatctgtgaagtttccataatatacaggttttaatgatacagtctctgtatttcttggcaataataaatgcttatgtatgagtgtattttgctctaggtggctcagttttccagtatgcttttttattttctactgggcatgtcatttaaaaaagtaatctacttggtcatttctaatctaggtgaaacaagatgctgacaaaagtgcagctgttgcgactgttgttgctgccgttgatatggccagagtgagagaaccagtgatcagcgctgtagagcagactgctcagaggacaaccacgactgctgtgcacatccaacctgctcaagaacaggtacgtgcgaggctgccatggggcacccgcagagccacgtccttcagtgcacattaactcaaccaccatccactgagcttggcatgcagctgtgctcaattcattctgaagacagccttgagcccagcagggcccagacttttagaactttctgagcaaaaggtggtcggagatgtcaaaggtgttgacaatgtgagtatcacaagagcagagtaggccagaaatacctgggctatatgagcaggcaaaagtcaactatggtattcaaggtaggaaggcaaagagtggccagagaaacagagaccagtcaattccagagctcagtcactgcacacactggatgtggaaactactatttcagggaaggcattacatttctctaagtttccccaaaggacttttgtttttacttttctcaaaacaaacatgacacttgattcatagctggaacagtgtcataaatccaggataatgtcccacctcgcatttgaatagattttctgttacagtttaaaatcattccagctttcctccttatcctcttgtgtgacatttatgtctaaatcctgacagattattgtaacttttttttcttttctgagacagagtctcgctctgtcacccaggctagagtgcagtggcatgacctccgctcactgcagcctccgcctcctgggtttaagtgattcttgtgcctcagtctcgtgagtagctgggattacaggtgtgcgccaccacacccagctaatttttgtattttttagtagaggatttcaccatgttggcgaggctggtcttgaactaatttttatgtaagatgcattaaggtgttttcttcctttctctatgaaaagcaggtaagaaaggaagcggagaagactgctgtaactaaggtagtagtggccgccgataaagccaaggaacaagaattaaaatcaagaaccaaagaagtaattaccacaaagcaagagcagatgcacgtaactcatgagcaggtgaaaatgggtttgtattttaaattcactgaggttcttacaggggtcaacacagataatcacctttaccatgaagagtgttgttccttgggccacatggttgttagcatactaataagatccccttgttgtatgtgtaaatttctgggtactggataccaaagtttggtagtgtccctgaatgctccccttgtgagtatgaaaaagaactctgtgaacatacaccaggagtagaaacaggggtctcatcacattgatctggggatgcactaagtataagactatagggagaggacagatggctaaaaccaggaggaagaaatagatgctgaggcaggaatggggaaaagtggaggagacactgaactcactttgctttagaaatcttagcaactgcttcctggctccttcggaagacatttgcacatgagtttgaagtggaatggacagcatggctttaacaagccaaatgaccagaaaaggtgaaaaggacagccccatggttggcggcatttggggacagattggaaaatgccagttagtagagctcttggccagtggaaccagttggcagttgggtggtttgagaagatgaatttcaagtccctttcagccttgagatcctgtgtttcagtgatgagatatttgagaatggcaaagaggcaaatagagaaaactgtccccctacatacgcatataccttaggtgcccagatggaaacagcattcttcacagtatttaggaaaactgacaaaacaaaaatattgtataaatgcagattataaattatccatgcttgatttctcacatgtaaaataaaaagatcagacaaaattacttctaaagtcttccattctgatatatattctaagattacctttagatgacagaattagtacagaataatattgccatagatctatttgtaaacattggaagtcattttaaagaagactacaattctgctgttcaaaacaaagtgttgaattcaactttgttttctctaagcagcctacataatttacagtttaaggagagaaagagcatgatcttatttatgaacatgggattatttattttatttagtgacatctgcagaaaagggattttacatcttcaaattcctatgttgttatatttaataaacaccatattatttcattgggcatcaggaaataaagttttttcttaaatcattctttgcagataagaaaagaaactgaaaaaacatttgtaccaaaggtagtaatttccgcagctaaagccaaagaacaagaaactagaatttctgaagaaattactaagaaacagaaacaagtaactcaagaagcagtaagtctgattttctaaatattttgtagtttgttgacaatatcacattacagccagctgcaggtagcttatagtcaaaacccttaaatggagaagtctttggttgtatattttttgttattgttcctctatgtctagtattgaaactcaggatggaaattatgttcacattgcactattttccactcacttgatcagttttcaggagattgtctacagaacagtttagggcacatctatgaactttctagaacatacataaatggatgatagatatcatgccagtccagttacccaccgggacagttggtttcttcgtgcatagcctaagccctcagtcacttagattgtaatgcacaaactttacatgcacacacacatgcacacacacacacacacacacacacacacacatatacacatacatcagccataaacaccccgaataaatagcaagggaaagtgaggatatgccagacatcggagaaagcaaatacttcctcaaaaaaaaaaattccttcaattcacggttgataaacagtgacctagaagcatttgctgctgttgtgccgtagagctgtgtgaggacaatctcagtgtcactaaaatccacatctctcccgtatgtgaaatcaaacctttaagtgtcaggagagaggcatttatcttgaattcttccatgtcaaagagggcgcctgtgctcatcctccttgaactcaagctctttgctgatcttagagctactttctttaaaggtccagttgagaaccttgtacacttaaaaggctgaccagaggctgctgactgaatttccctctccttactgtgagtgagacattttgaaagcagcaagaaccctacttaggataatcaaaggcatagaaatccccattgccattgcaatgctggtgactggcaagttcagctggcctatggttttccagccacttgtcagcagccacccaccgggttccctaacacgttgacatgtctcaagatgagatatgttcagttctaggacaatttgctaaggcgcatgtgggcagaaaagaagcccattcctcaggaaagcagtctatgtattaagcacaagtgtaggcccctgaaatggaaatctgacattttatcgttcaccactaagcatcctgtattttcctgagtgtttcaaggatgtcttcccattgcttttgtatcttttgaaactcaaatctttattttactctaaacatcagataagacaggaaactgagataactgctgcatccatggtggtagttgccactgcaaagtccacaaaactagaaacagtcccgggagctcaagaagaaactaccacacaacaagatcaaatgcacctaagttatgaaaaggtgatgacttcctgccaatgtgaaagtcactcttgcaccatttcatttgcaaatcacctacattttcatcatggatcttaatcatcacttcttcacttccacctcttcttataatgcaaatagaaaatttcttttcccacacagctacctttcactgtcaattcattcctaactttcagactttctttggcttgttactaatataatataataattcactttaatatcttcctattgaagcagatgtccgtaaacaagtcaattcataatacaaaaaattatgtgctatttacagtgctactgaaatgtctcagagattgcagttttaaaaaatgtgaaaagtacaaaatagcactcattagtcttttattgctaatcacatttttttcttttaaactggacttattgttttgatatttttgccagtgaaacagtatggatgatcaaagtaactcaaatgatatattttagtgcaattaaaatttccttgaataggaagaaattttgcctcctttctttttgacttacgtttcttttattaaagatttatggaatttaatgactattttcttactttcttttgtatgatcagataatgaaggaaactaggaaaacagttgtacctaaagtcatagttgccacacccaaagtcaaagaacaagatttagtatcaagaggtagagaaggcattactaccaaaagagaacaagtgcaaataactcaggagaaggtgaatacagatatttgagctgtgaaaagttcatctttaaactaatttctagtaaactattaactacaatatggtatgaattattaatctgtatttgccttttaaaatccctaactaaaaacaaaatggtaaatatgagactgattatcattaattttatctgcacatttgattttcatccatctgtaacatttataattcattttattcaccattattctttgcatgaagattagcattttttagcttaatttttaaaaagtgacacagggactcatctagaggttttttaatagctaacatttctaagttttgtgattctcagtcagtatatgtagacattgccggtgaaagtttatttctcttgtgtatttaaccctgaataaccatcttgcatccccatgaggaagggggaagggtcatactatgtgtgtttgaagccctgttcaacttaaatcttgattttactgtaataatcagatgagaaaggaagccgagaaaactgccttgtctacaatagcagttgctactgctaaagccaaagaacaagaaacaatactgagaactagagaaactatggctactagacaagaacaaatccaagttacccatggaaaggtgactattgttgttccaagtgtgaaatcccctattataatacattaataccacatatcatgtgaaattccttattgtaatacattaatatcaagtctctgaatttcttatgtatgagtcactattaaccaaatttattttttagacaattaaataattggaaactaaaaaaatttattattgttaatattactacatatccctttctccacttatctcttcaccattattgtcaacattttattaacatctgggaatcttccagaagttgattaaaattgcatgcaggctaattttaagaggcccatgaacattttttaaaaacacggaagatgtataagtaaatgatgactcttactcactgtcaagaagatgtgtgttttgaagggtcataaattcagtatattatgttatggagtatgacttatttcagtaaattacccataattttctttgtatgaaactttatcttttttccctcctgtaaatatcagaggagaagataagctgaaaaaattataatgcatgctgtagcagctcccactaaagctaaacaagatgcatattaaaatctagagaaggaagtatccaaacagaacaattacacataagccatgaaaagattaccgtatctatttgtagctatgaaatatccatgaattaaactgtttcccatgactctgtcatttactccaaatgagccatttacctaattgtattctttattgctaatataccacttgaaaattagcaactaaagtttttccatttcattagcaggatggcctgaatcctatttgtatttccctcagtgtcattttctgactctacatcttttttttctaagatatgatttaagataaactttttaaacctttactcaaatctaacatttaatggcatatcagcctttcagaagtctcataaatgacagaaattccactatgcaacatacttcatgagtgattaactttttacttttgtttccattcaaattttgtcatgaattgactatcttgtttttgttaaaaattagctaaggatggaagctgagaaaatgtttatacctgaagtagtagttaccactgcaaaatctgctgaaccagccacaccgccaatgactagagaaggattcactattaaacaaaaacaaatacatctttttcgagaagagatgaaaactgatgctatggaggtgaaaagtattgtttcatcccatttcatcatcaactctcataacttttcatccgtcgtgaattgtgcttctagtgttccatctaattgcttaactgatcaataaaacaatagagatggttagattcagtccatcctccagttgaacagtgagcatttctagtagtgaaaagtcagaccaaataatactcttctttatgtctcctaaatttattctcagcatttaactcgtatgaattggagtattctagtccaatttgtcttcctgcttctctaggttacaaacatgtgagagatatcaaagtccactaagaaataaaagcggttaccagcatactcatttgtagtccaccaataagtgtgtgtatataaatctgatatacaataattcaaggaaaaaacagacagatgcttcctcaatttaaaatattttaccatgattaagatttttccgtatgtttaaaatcaagaacaaaatttaaatatttcagttgtgtgatatttagtcatatgacagtttctttgacagtttcttttatcattgttaaaataaaattaagacttaagctgactacttcatagcagactggctaaaaggttcaaatgagatatagtggaaatgtgatcacactacaatcaaaataatatttatttatttagtgttatctgtcgaagatgttaacattttaaaatgtctatacaattaaagtcagctcattgccaatatagtttttaaaaaagaaaaaaataaatggacaaacttaactcacctaagcctcatgtgtattttatgtttttttctgagatgatgcaatctaaagtgaagatggtatttgcagtccttcgaggcagatgaaattgtttgtgtcttcctaaaaggaagccctggataaagcccatgatcactaaagacccaattccatctcagaaaaatctcatttatatcttgaatggttcagagaataatttttaaagatatgcaggtagcatagttgaagaatgtttctgatgcattctagattctattcacaggtatagaaaactgaatattaataaaattttccaatcttacttttaaaatgcacttttaaaatgtacttttaaaatgaacatggctatgtgatttttgaggtatgctgtttccaagtatcacatagaatcataatatctaagccacatcagctagtttgccttctttaaaagagaacctcctctgcaaattgtatttccattaatgttcatcagactcagaaacgagaaaataatatttgtttcattctttgctttaactctccataataatgaaagtaaattaaacttcaatgtgaaaggttgttctcttgaatccaaacatgataacactttcattttaatcacaatatttttatttgcacggggttctctttgtcatctgtgtgttttaagaaaggtattttctgatagattaaacaatcttacccttagggaatcataagtaaattcatatgctcactctgtgtttgtgagctttcatgttatgtccgatttgcatgcaaccatataactctgtagtcactgatttttctggacaggatgatgacggtatttgagtgcacttatatcatcactgtcactgcattaataccagactaaatggtcaacaagataataaaaataatcagtgaaaagaaccagctccaaaattctgattttccaattgctgattgattgtctgcctggaaaaattctagaaaatttcaaaatcttcttgtgattttatgttcatattgtgattgtcctatgttgtgtatatgtgatttaatgtctagtataattaagtaggtgtacagagagtatatctaaatagatgtctgtacaatataataatcaatgaaatagtccctaaaagtgtttctgagatacatttctagacacgttaacactgctgtataatgtggatgccatctgcctgtcctgatgcccaggagatattccagcctgatctcgatattcctatgtattaattctggaaaccttgtctccaggtggacgttggaaaaaaggctgaagctgtagcaacagttgttgctgcagtagaccaggcccgagtcagagagcccagagagcctgggcatcttgaagaatcctatgctcagcagaccactttggagtacggatataaggaacgcatttccgccgcaaaggtagctgagcctccccaacgtccagcctcagaaccccacgttgtccctaaagcagtcaagcctagagtaatccaggctccttctgagactcatatcaaaactactgatcaaaagggaatgcacatatcatcacaggtgagtctatacctgctgatttttcaccttgttcatggtaaagcaagcctcactgctgtggtcatctggtgatcaatggtatcactgagtttcatttcaatgcagatcaagaaaactacagatctaacaacggaaagattagtccatgtggataaacgcccccgcacagctagccctcactttactgtttcaaaaatttctgttcctaagacagaacatggatatgaggtaagaagttacagagcatgatacagaaatgtttaaaggaaataagtatctaacctgtgaaacagagcatctctggggtaggccaatggaggattcttttttggtgatgtgtgtgtgcgtgtgtttgcattcacagtgggcccagacaccctaaagatttggtttctgaaactcgcccaggggagtgagcctagagtcacaagtggttatcttatacctctgaggagagacaaatccacacaggcttctctctagttcacatttcagggacagctcaaactcaattgttttgattactattgttctaatgattttgtgaaaggtagtgtgttacacagcatagttttacttatgctgtgagacatttcagagtaacttaactgtgaatgtgtttcaataataaagacagacattgagaaatcatatatttatatactcaatatagcaagatggagaggtggtactgtatggtggtcgggttggattgtggaatcaaatagctctggattagtgccctatcttctcccttataatctctgtcatcaggagaaagtaagcatacatgtaaaatgcaagtaaaaaggacataaaaaccttcagttgtcagcatgtaataaatccttgatattagtcactattgttattatacacatccaagaaatagaacccaaaccttctatgccttcaaagaactgtaagttacatataatgcctatatttgatttagtcccaaattacaaaacaaataaccatagaccacaacagaataaaagcagtaaggaaacctttaaaatattttttctgaatgtcttcatgtttacctttcacatagatttgtggctaaaacccaaatgtactattgcaaagtagttcttaggcatttaccaacaatttcaataatttcttaattttgaatctcccactgtggtattttcaaaagtggcattcatcggaatggttaagtgaaaattcgtgactaagctttagaagatcctgtccttttatgataaaagctgtaaaataaggagttctgaatacaactctttaaaaaagatattttaaaatttgttttacaaactaacaggcatgacaaggagctttataattggcttatctctaaatgacttttcattaactgtgtgataatgagtgctaatgagaacattaaagaacagaccttatagaaaataggctcagactcagtccaagagggctagccatcggaggatggttaaatgactttattttctgactctgtttccatgtaggcatcaatagccggtagtgctattgccacattacaaaaagagttgtcagccacatcttctgctcagaagatcaccaaatcggtgaaggctcctactgtgaagcccagtgagactagagtaagggcagagcccacacccttgccacagttccccttcgctgacacaccagatacttacaagagtgaagctggcgttgaggtgaaaaaggaagtaggggtgagcatcactggcaccaccgtccgtgaagagcgctttgaagtactgcacggacgcgaagccaaggttggtcactggttacccgctgttacatggtccactcccattgagcagggccaggtggttggctagtttgtactgaaaagtagccagtggagtcttgcctttctcctttgccatactaagacttgatttttatggagcatagtatgggtcagagatcattttctcaaattatttttataattatttttatatttttataattatataatgttgcatgagctaagagtttatgagatttcccttaatttcatgagcattttgtaatataatttgtaaaaatctaggtaacagaaacagcaagagtaccagcacctgttgaaattcctgttactccaccaactttggtctcggtgagtaaagaagttgataatgctggaccctattcatatctcctcaaatcattttaatacacgtttgcaaagatcagtttctcaaattaatacaaaaatgacattagtgagcttacagatgctcattttaagaccgtatttggtctggaagaccatatttgaccatatttggcaaggaagaagggaattctatgtggtacatcattcatggattcaaaagatttaatgagcttctaatatgcagaaggcattattgcaggagctgtgcagacataaagaccaatccatccctctttgaaatattttctttgccatcagagaaaatgtacacaaacaagcataataaaatatataaggtgataaacatcacaacagaaggagaatccatgggaggcatagattcattccagttggtgataccatggcaaagctttgttgaataggtagcatttgctattgagccttacagctctttactaatatattagtatattatataaatattagtttctctactactatttctggagtcctgattaaaaggccattttgtggcagttgaaatgcataagttcaaactctacatttgttacaaaacagaagtgattaatgaatatgcacacgtatcattatttattttttctcctctcttcagggcttaaaaaatgtgactgtcatagaaggtgaatctgtcaccttggagtgccacatctctggatacccatccccgacagtgacatggtacagggaagactaccaaatcgaaagttccattgacttccagataaccttccagagtggaattgctcgtcttatgattcgcgaagcatttgcggaagacagcgggcgatttacttgcagtgctgtaaatgaggctggaaccgtcagcacatcctgctacctggctgtgcagggttagtggccaccctcccacagtcctaatgcacatgccatcactttcatctgacactcttttccacaatatggtttctgtgcaccttgaaatgatgtccctttttggaacttggggggagattatatggtcaatttaactgtcagtgctaagcaggggtcactaaacatctcatctcaatgagaaacttttgtcttcttttagtgtcagaagaatttgaaaaggaaaccacagccgtgactgagaaatttactacagaagagaaacggtaaaatattttgctaattagtagctgttctagtaccattttgactttcagccccaccagtattggcaaattgcaacccggaagctaatatgaggggaattctctttccagctttgttgagtcaagagatgtggttatgactgatactagcctcacagaggaacaagcagggcctggagaacctgccgcgccttactttattacaaaaccagtggtccagaaactggtggaaggtgggagcgtggtgtttggatgccaagttggcggcaacccaaagccccatgtatactggaaaaaatctggtgttcctctaaccactggatacaggtattttgatggctgaatatagagttctctgtgacttgtataatacgtgcatgaagcctagagtagaatttactcaccccaccgaccctgagcataggctctttcattgtggagccttcttagtttgttttgaggtatttttacattttttttgtgcaaagtcttcctaagaaataaagctatgtgacaaaagtggatggaagatatatttctttacattatagtttaattcattgagtttgtgaaagtagagaaaatatggattttcacacaaacacacccacacacacacacacacacacacacacttccagaaaagatttgagacaattttcaataaaaacatgtaataactaagtgactaaaagatagaagaatagccatgtaatgaagaagaaagctagttatgcccaaaaatctatgctagtaatttttcttcaattcaatataaaatttagctctgaatattttgcaatttaagataaaaagagcaacctggtaatctaaaaatgtaggtgccgtaccttcataataataaatataatgtaccagagagttaatactgaaatatttgaaggaatttattgttttaattattcatttgatttctgaatgaaataatgagaaaaaataacgaacaaagagaaaatacctgttgtttaagtgacctgatcatttgctaacataaacactgaaaaccacttaatttcatgactgattctagcaataaatattctttaaaatgaatattttaacttatttggccctaattactcatgttcttgcatttttctcaattttcagcaatcttataatctattgtggagcttagtcatatgtttagggtcattgaattttataccacagatccactcacagataagtccaattattttacccacagaagagttgttgataactgatttttaaattttgtacatttacataaagatacaaagtgagttacaacaaacaaaccggtgaatgcaagctggtgatttctatgacttttgctgatgatgctggagaatacactattgttgttcgcaataagcatggagaaacttctgcatctgcttccttgcttgaagaaggtaagtgcaactccagtttctatgtgcatgataagaactgaaatacaaggagatagcagtgctgtccgtttgctgaaaaacctgttgccacttactggttctgatactttgccccattgtctttgcctcagttgtatggaaaatgttttagaccacatggcctcaaaaactatactgtcattaaacttctgaggttctagcaatagtttctttttgttgtatttgtttctaggcatatcatgcctctgaaaatgcagagattctaaatccggttgccttccaggcccaggcaggtaacagtgagctcaatgaaaacagtagcaaactggagagtaggtgccctgcctcaaagagacagtagctgtgttgttgccaggcatgcaccaggctgttaccaggctcagtgttgctagagctcctgatatcttaaagaaaacctggaagtcaggattttcaatgtttataacttgaaaacaaatgtaacagctttcatgctagactgttcacatttacagtgaactggctcacactctgtttcacttgacctacacagtatcccttacaggaaattacaatattatcttcatttagcagataaagcactcaatattcaggaaggtaaatgaattgttaaaagacacacagcaaattaggaagtcctccgtggtagatccccccaaaactgactgctaatataaaattctttctacaattgtaatggctggttggatttgttagtgtaagtttggtttccaaattccatctagaaaatattgagcacttcaatagtagatatttggaaaatttggtttttggttatcaactttccccagtgtagagtttacctgaatgcatagtggtatgactgttttctaataagagcattaaaaattaactgatgttcttaactcttagctgattatgagttactgatgaagtcccagcaagaaatgctttatcagacacaagtgactgcatttgttcaagaacctaaagttggagaaacagcacctggatttgtatactctgagtatgaaaaagagtatgaaaaagaacaagccttaattaggaagaaaatggccaaagatactgtagtggtcagaacttatgtagaagatcaggtgagtataaaagtaatgaccaaccaaacaatttcataaattatactttcctttttttatttgatattttcattttcaagtgatgagctcggggttagacagctattagaaggtccaagttcactgttgctaagtttccttaatcttcatggtatgttgcacctgtgagtttagaaatagagattacatataggccataaatgtgactttaaaaatagggcttataatatattaaggaaaacaccaatattagcacagctgagttcattcatgccaagatctcttcatctgtgtgataagctaatgtaacctctaacccaaatctaactcctgcttttggaatacctttctacccaagatgccacaacattcactgggaaagatgaccataatgcagattaaaacaaacaaaccaaaaagtcttctagattcttctcccagctaaaaacttcaacagtctagctcagatacatctccttaaataatttatatcagtaaggatatgtatttttaacagaccataatctttttgcataggaattccatatttcttcctttgaagagaggcttattaaagaaattgaatatagaataataaagactacattagaagaacttcttgaagaagatggagaagaaaagatggcagttgacatttctgaatctgaagctgttgaatcaggatttgatttaagaatcaagaattatagaattcttgaggggatgggtgtcacttttcattgcaagatgtctggatatccattaccaaaggtaaaatataaacatttatcacagctccttgccacagtaaagatacaaattggttaaaatataactattcgatgtaaattttattcatacatgcatggtattctttgcagattgcttggtacaaagatggcaagcgcatcaaacatggagaaagataccaaatggactttctacaagatggcagagctagtctgcgtatacctgttgttcttccagaagatgaaggaatctacactgcatttgccagcaatattaaaggaaatgcaatttgctcagggaaattgtatgtggagcctgctgcaccacttggagctccgacttacattcccacactagagccagtgagcagaatcaggtaagacttgtaataatttgggttatttagtatgtaaattgttttcaaaacatcaaatagtagcaaattgctattgtgtaagaagaaaatcgagggctaaaatggcacagaaacttaccattggcaacaccaacaattgccagaagtttttatttcttgcccctgtgtaagatgagcaaagaattttcatcagtgtaacatactgtttattttcctagtgctatagctaatatcacaatagctcttatttgacacctgatttttacatatgtaaatttatacaacagccctgcaataaaaagatgactattattggtttggaaataggaacactgaggccctgggaatctatgaaaattgtcttaattcatccagcctgtaagcggtggtgccagcattcaaactccaagtcagtctggctgcaatgtgtagatggagtcttgttttgctttgttttgtttccaaattcatttctatgttttcctcctctgagataaagaatgtgtattttttatttttccataaatgtattcattggtttacttatccaaccaacatttattaggatgttttagtagttaaatcaaaaaagtctagtgactgattaaatccaagtggtaaggaaaagagagtattgaggattattccaagatttttgagcctgggtacctggatgtactgaatgactaccagctaaaattgagaatataggaaaaacatagttgtgggggcaacaataatatattctattttagatctgaatgagtttgaggtgccttctaatacgtgcaagaagtaaattctaaaataacatgaataatgaataagacaaaatgaagtttgttttgctgagttttctttatgcctcacgaaagtattgtgtgtctttgttttgcagatctctctctccacgttcagtgagcaggtctcctatacgcatgtctcctgcacggatgtcacctgcaaggatgtctcctgcacggatgtcccctgcaagaatgtcccctggacgtaggctggaggagacagatgagtcacaacttgagagactatataaaccagtctttgtgttaaaacctgtttctttcaaatgtttagaagggcaaactgccagatttgacttaaaggttgttggtagacctatgccagagacgttctggtttcatgatggtaagtgtgataagtttttgctcatgaatcataaaaacacaaaaacaagcttatgtatgcatctaacaatttttaaaaactattttaaaatctactttcttttaaacatattttcacaggccagcaaattgtcaatgactatacccataaagtagtcattaaagaagatggtactcaatcactaattattgtccctgccacacccagtgattctggggaatggactgtggttgcccaaaacagggcaggcagatcttcaatttcagtgattttaactgtggaaggtaaaatgagataaaataaaaataaatgaattttcttatcacttgggttataaacaggtatttcagccttactccctctaaatcatgacctttctctttcagctgtggaacatcaggtaaaaccgatgtttgtagaaaaactgaaaaatgtcaatataaaggaaggttcccaacttgaaatgaaagtcagagctacgggtaaccccaaccctgacattgtatggttgaaaaacagtgacatcattgtgcctcataaatatcccaaaatcaggtaagtatggaaataataaagctaagctcattatacaaatccaataaccagggaagctataccactatattgattattccctcccccaactttttatagaattgaaggaaccaagggagaagctgcccttaaaatcgattccactgtcagccaagattctgcctggtatactgcgactgctattaataaagctggcagagacactacaagatgcaaagtaaatgttgaagttgagtttgcagagcctgagccagagagaaagttaatcatcccacgggggacatatagagcaaaggagattgcagccccagaactggagcccctccatttgcgatatggccaagagcaatgggaagaaggtgatctctatgacaaagagaaacaacagaaaccatttttcaagaaaaaactcacttccttaagacttaagcgctttgggcctgcccactttgaatgcaggctaacacccattggtgacccaacgatggtggtggagtggctccatgatggaaagccacttgaagcagccaacaggctccgtatgatcaatgaatttgggtactgcagccttgattatggcgttgcatattctagagacagtggtatcattacttgcagagccactaacaaatatggaacagatcacacatctgctacccttattgttaaagatgagaaaagtcttgtggaagaatcccaattgcctgaggggaggaaaggcttacagagaattgaagaattagagagaatggctcatgaaggtgcacttacaggtgtaacaacagatcagaaagaaaagcaaaagccagacattgtcttgtacccagagccagttagagtacttgaaggggagactgcaaggttccgctgcagggtaacaggctaccctcagcccaaagtcaactggtacctcaatggacagctcatccgcaaaagcaaaaggttcagagttcgctatgatggtatccattacctggacatcgtggactgcaaatcatatgacacaggtgaagtgaaggtcaccgcggaaaatcctgaaggtgtgatagagcataaagtgaagcttgagattcaacagagggaagattttaggtctgtccttaggagagctcctgaaccaaggcctgagtttcacgtacatgaaccaggaaagcttcagtttgaagtacaaaaagtggatagacctgttgacaccactgaaaccaaagaagttgtgaagttgaaaagggctgaaagaattacccatgaaaaagtgcctgaagagtcggaagagctgcgcagtaaattcaagcgcagaacagaagagggctattatgaagccattaccgctgtggagctcaagtctcgaaagaaggatgaatcctatgaggaactcctcaggaagacaaaagatgaacttctccactggaccaaagagttaactgaagaggaaaagaaagctcttgccgaagaaggcaaaatcacgattccaacttttaaacctgacaagattgaactaagtcctagtatggaggctccaaaaatcttcgaaagaatccagagccaaacagtgggccaaggatctgatgcacacttccgggtcagagtcgtggggaaaccagaccccgaatgtgaatggtacaaaaatggtgtcaaaattgaacggtctgaccggatctactggtactggcccgaagacaatgtttgtgaattggtcataagagatgtgactgctgaggactctgccagcatcatggtaaaagccatcaacatagctggagaaacctccagtcacgcattcttacttgtccaaggtaatttgcatgtctttcctttgatggacctgtctttgtattcaagaatatccatgagtgtgtttacttttattttctttccccattcctcaggttgagaatttaatttaatataatgtgctctcccctttttcccccacctttttcttgtagccaagcaattgatcactttcacacaggaattacaagatgttgttgctaaggaaaaagacactatggcaacctttgaatgtgaaacttcagaaccatttgtcaaagtgaaatggtataaagatggtatggaggttcatgagggagataaatacaggatgcactctgacagaaaggttcacttcctctccatactgaccattgatacgtctgatgctgaagattacagctgtgtacttgtggaagatgaaaatgtcaaaacgactgctaaacttattgttgaaggtattcaacaacgaaggatttcattgtttacctaagctctaaagtcacccttagcatgtggtaaaattagctatgcaatttttctttcatgaaacaattatttggaaattgactataagtttcatagccagaatcataaatttatgttcctaattaagaatgttaacaatttgaccatttggattttttaaagtagtattatcttgatttttagcttttaagttttttattgaagcataattctttactttcaaaaatatttaaaaattaaaataaaataactgcttcttattgaaaatttatctctcagcccatcagcgggtagatattaagaatacacctgatagtataggggagataaaagacatacaagacatcatctctatcctaagtctagatgcatacctctccaaaaaaattgatttatctttctgttatacacttcaggtgcagttgttgagtttgtgaaagaacttcaggacatagaagttccagaatcatattcaggagaattagagtgcattgtatccccagaaaatatagaaggaaaatggtatcataatgatgtggagcttaaatccaatggcaaatatacaattacatctcgtcgtggacgtcagaacctcacggtcaaggatgtaaccaaggaggaccagggagaatacagctttgtcatcgacgggaaaaagacaacctgtaaattaaagatgaaacgtaagtcctcccattcctgtcagcctgcagtgagcatcattatggtttattgataaaaaatgatcataacattctttttctccccatatttcacagcccgccccattgctatcctacaaggacttagtgaccaaaaagtctgtgagggtgacattgttcagcttgaagttaaagtctccttggaaagtgtggaaggcgtctggatgaaagacggccaagaagtgcagcccagtgacagggttcacattgtgatagacaaacaatctcatatgctgctcattgaagacatgactaaggaagatgctggaaattactctttcaccattccagcccttggcctctccaccagtgggcgtgtctctgtctatagtgagtcctaattataaaattttatgtttacactattaagcaacataaagaacttcaaggagcagacaatttcaacaaaattcattcatcttgtgtgtgtatgattttgcaggtgtggacgtgataacacctctaaaagatgttaatgtgattgaaggcaccaaggctgtgcttgaatgtaaggtgtcagtccctgatgtgacttctgttaagtggtacttaaatgatgaacaaatcaagcctgatgaccgtgtacaggccattgtgaaaggtactaaacagcgactagtcattaaccgaactcatgcttcagacgaaggaccttacaagctgatagttggcagagttgaaaccaactgtaatctctctgtagaaagtaaggattattctacctatctaataattactttaagcattctactttcccagtgtaacaataaccaagagattattttattttttccccagaaattaaaattatcagaggtcttcgtgaccttacctgtacagaaactcaaaatgtggtgtttgaggttgagctgtcccactctggaattgatgtcctgtggaattttaaggacaaggaaatcaagcccagttctaaatataaaattgaagcacatggaaaaatatataaattgacagttctaaatatgatgaaagatgatgaaggaaaatacacattttacgcgggagaaaatatcacatctggaaaacttactgtggcaggttggtatatttattaacctaaattcttacgaggagtgattgttattttaagaaattattattcatttcccccaaaattcctttcagtttcccacttccatgcctctgcttatgctgttcccaaagccaatagtacttgcaacaccattcccaccagcctaaattacaaatgttcttctaggcctacctcaaacgtcaccttctccattaaaccttccttaatctctccatttgtatatgatctcttcctcatccaaccccaggatcactttatatgtgcctctttcctagtgtttattatgcacttgtcttattccccatttcctctttcaatatcagtgtataaactcctgaaatctggaattctatttgtatattccaatatattgcaaatgacagataatcaattggtgtttgctgtattgagctttatttaaacttccttactctaaagaattatttccttttttagccattcttgcttctttagcctttgtgccttttattttcttcctactttttaatgaaatcaataaatattttcaaaatacagcttaatgtaactgtatctcttatgatatcatgtagaaataagaccatcattcagtagaatttcttagctttacaatgaagaataaaaaatgtaaatcaattgccagaaaaaactagaagtcatcattaatttgtttggttcattacagtttaaattttgaggagttgagatgttacattcagatcgtgttgtccattacatctagtattgaagcaagtcatatggtaatgatttgtcttatttggtatgaaagtttcatggtttatacttacttacgttataagatttcttcagagatcggaccatgaaaagacttgtaaaacaaaatttcagattcagcatttttatacatttaatataaattacatgttttaaatgtgtggaaacaggaataaactatgaactcctctgtgatttcacccagtgtttttaaagtacctaccattggtcagacacttgtagaaactcaggacacaaaactaaataagaaatgatttttttcttgagaaattcataatttagagaggacagatacataagcaactagcttgttaaagcagtaattatttctgctaatggatgataagagtggaggcaatggggtgaaacttcatggaatgggcgacatttgccaacacagtgatttttaatatatagaaatcctcaatgtagtagaaacattgatgactcgtacattttgtttagcaaatttttatgtagtcaaaatatcagattcccaggaaataatcattaaaagaccaagtaaaatgcttttgaagaagaaggaattgggttagagactatcctggtggtatactgttctaagaatttcctattaattcaacagttattttttcttcacaaaacttttctgattccagtatttctcctaattatcagttatgcatacttagaataagggatttctttggtaccttctcaatatgggtaaaaacaatcatagacatttcatgatttcaaaatcatgttcttaaatttgatattttatatttacttctgcaaagtttttcccattgtgtgaatatgtttaaaggactcatactgtacatctcttgttccaaaggtggggccatctccaagccactcacagatcagaccgtagctgaatcccaggaagctgtgtttgaatgtgaagttgccaacccagattccaaaggcgaatggttgagggatggcaaacacctaccactgactaacaacatcagaagtgagtctgatggccacaaaaggagacttatcattgctgccaccaaattagatgacattggagaatatacctacaaggtggccacctccaaaacatctgccaaactcaaagttgaaggcaagtaacataggatttgtccttttcaaatcatattacaatcttgatcgttatcattttaaaagacaaacgatatggccattttgggtaccataaattttcatttcataaagtcattctagatcctctaaaccttcctgagacacataccacaaggtacaaaattgcttatcaaatgcgtttatgcaaaaaagccatttcttaggttaaagctctgtgaaacagctaaatcagacactgattctccattcgtctttcacccttctccaatcagtctattatgctgctaatacatagctatgcaaacttcatactactaaagcatagaaaaatcatttcacgatgtacatgtccagttggatcccaggttcccctaaataatctcaggtgttttttaaaacagaggtgctgcataactgtaaaatgtttggtagccattcttttgcagggtgagtaagcaatgatcttgttcaggacttcttttccttgatgatgtcatctatattttctaacccaatcataaatttgtctttagctgtcaaaattaagaagactctgaagaacctcacagtgacagaaacacaggatgctgttttcactgtcgagcttacacaccctaatgtcaaaggtgtccagtggatcaaaaatggagttgtgctggaatccaatgaaaagtatgctatctctgtcaaaggaacaatttactctctgaggattaaaaactgtgccatcgtggatgagtctgtttatggcttcaggcttggaaggcttggagccagtgccagactgcacgtggagagtaagttgatttagaaacacttttcaagcagtcagcccatggttaccattaagttaaccctatcactgaattgctccaattttcctcttagctgtcaagatcattaaaaagccaaaggatgtgacagccttggaaaatgccactgttgcctttgaagttagtgtttcccatgacactgttccagtaaaatggttccataagaatgtggaaattaagccaagtgacaaacacagactggtctcagaaaggaaagtccacaagctgatgctgcagaacatctccccctcagatgctggggaatacacagctgtggtcgggcaattggaatgcaaagcaaaactgtttgtggagagtaagtatcaggcagccccctacagccctttccttaatgaaccccatgtatctatttgtttggtttcatctactttttaaacaaattgtattaactgaagtgctctttgattttaccaagcattacatattacaaaaaccatgaaaaatatcgaggtgcctgagaccaaaactgcctcttttgagtgtgaggtgtcccacttcaatgtcccttccatgtggctgaagaatggtgtggaaattgagatgagtgaaaagttcaagatagttgtgcagggaaaactccatcagctgatcatcatgaacaccagcacagaggactcggcagaatacacatttgtctgtggcaatgaccaagtcagtgccaccctgacagtcacccgtaagttaaaaaatatatatatatatacacatatatataaaatatcaaatattcagtagattcattgatattctatatcctacactttgctgaccactcaaaaatccttgattgggtgggcagggtggctcaagcctgtaatcccagcactttgggaggccaaggcaggagaatcacttgagatcaagattttgagaccaggctgggaaatacaatgagatcctgcctctagcaaagacaaaaggaaaaaaaaaaattagctgggcatggtggcacacacttgtagtcccagctactcaggaggctgaggtgggaagatcgcttgggcccagaaggccaaggctgcagtgagccacaatcacggcactgcactgcagcctgggcgacaaagtgagaacctgcctcaaaaaataaagaaaaaaaattgttaattgaaacatctagtatgtggttacactgagtaaagcactagtatctccacctggataaaatgttccagttagagtagcattgaaaggctacctggaaagatgcctcagtgtctatcacttgatctttctgttcctctgtgagttggcactgtcctgtatagtacatggaaggtatcaaagcttatatctctaaactgtaatctcctcaacagacgcactaaaaacattccaaatttttattctgcacctgttataacccacatcatatttacgtaaagtctccttgggtgttttttcttttctcctttgcagcaatcatgattacttccatgctgaaagacatcaacgctgaagaaaaagacactattacttttgaggtgacagtgaactatgaaggcatctcttacaaatggttaaagaatggtgtggaaatcaaatcaactgacaagtgccagatgagaaccaaaaagctcacacactcactgaacatcaggaatgttcactttggggatgctgctgactacacctttgtggctggaaaagcaacatcaacagccacactttatgtggaaggtatggtttcatacatattagatccatagaaaaaatgtcatacatgctttataaaatttagtgtatcaattaatgaatggataaataaaatgtgggatagccatacgatgggatatcattcagcaataaaaaggaagcactacgatatgctacaacatggatgaacctttaaaactttatgctaagtgaaagaagccagagaccatacaaagaccacatattgtatgattccatttatatgaaatgtccaagatacacaaatctatagagatgtagattggtggttgcttaggtctacaggggagacaacagaaaagtccttggggtgatggctaagggttacatgatttcttcttggggaatgagaatgttctaaaattatggtgatggctacacaatgatgaatacatggaaattcattgaattgtatactttaaattggtggattgtacagtatgtgaattatatctcaataaagctgttaaaaatgttaatttttctacatgctattttccagctcgtcatatagaatttaggaaacacattaaggacattaaggtactggagaagaagcgagccatgtttgaatgtgaagtttctgaacctgacatcactgtacagtggatgaaagatgaccaggaactgcagatcacagacaggtcagttgttttgtcttgctacattccagtaattcccagtttcctctgaatcaccatacggtaaactcgaatttccatttcatccatagaataaagattcagaaggagaaatatgtccaccgccttctgatcccatccacccggatgtctgatgctgggaagtacacagtggtggcaggaggcaacgtgtcaactgcaaaactctttgtagaaggcagagatgttcgcatccgaagtattaaaaaggaggttcaggtattgtctacatactaaatgttttgaaaaatcatcagtagtccataatctatcattttatattttaatgtttcccttttacattttctaaccaccatcctttaaagaattaaatcagctcattcttacttggcttagactctcttatgctgacctcaatttagtcacagtttccactcagggaataagggtgtccctagcagctgtctaaatacgttaattaaagcagctgtagaaatttcactgtctaataaatggctgcttgccaagcagcaccaaccagaaaagaattaaaatgtaaatcgtgaggttcacacatcaattagaattaaggaaatttagaacaaggtgacattttctcagaaggtttctatctgtggagaggcaagtgtcaaggaacttagtggctagaaatactttctgtgaagtctaagagaaagccctgtccaagccgtgctgggttcctggcaaggatgctgggcactcttgctgtcggctgcatttacagagcttgtcctcataagtgtccaccatcccaaatgatataatggaggaaacatgtctagagaaataccagttgagttcagctttatcatattgctcatccaaagaaaaccaggctttacagactgtgtactataatgaaaaaggcttcaatgaggactcagataacctggagatgtcttccatcatttatttgccaattctgaacctcagtgttctcactcttaaaatgaggataataattcctacctagcccacaaagttattattcatataaaatgaaatcaaattaagtaataactttttagacaataaaaagcccccaaaggtaaagcatcattatatcccttattagtaaataagaagcaaacatttaaggatgaaataattgtctctttggggcagctcctttcctccatgcagctgtaaacacaattctctacaagagaagtttatgtaccatttgtccaatactaggcaggaaaaattagagagtgctataatcagccaacttattacattataatatattggtttcacatgccattcattgaccagttttagaaattgattaactgggaggaaaccagagcttcaagtttttgttgttgttgttgttgttttatgttgttccatcaacaggtcattgagaaacagcgtgctgttgttgaatttgaggtcaatgaagacgatgttgatgcccactggtataaagatggcattgaaatcaatttccaagttcaagaacgacacaaatatgtagtggagagaagaatccaccgaatgtttatctctgagaccagacagagcgatgcaggagaatacacctttgtggcaggaaggaacaggagttctgtcactctctatgtcaatggtatgtagggacagatttcagcatattttgtggatccatcagaaataatcctcctgtttaagtcactaaattcttgtaacttgaaggaaatttctaaagaacctatggtattcatgtggttccagctacattttttttcacattatatctatggaaaagggagggcagctgttaaaagacctattgagaagttattttcagaaagcacctgatggccagatcctcatctggttgctcaaaactattgaacacccattgggtgtccattttcatataccccagatgagcttctagattcgctgttaaactattttagttctctgccctctgcctgaactgctcaagtcctagcagcactaccaagtgaaaggggtgtttccagcctctgatatggagtgcctgggagaactcaaaagtcctctttgagaccctggaaggcctagagagcctcaggcaatgtggaactcgatcctctctaccccaagctctaagaacaggggctcttactttggacagggaattccacatgctaccaagcactcctgaggagcctctgagcagtccccagggaagtgctgttaaacctctgctctcctcattagaaatcttaaggctgaatctcaagctgaccttgttttgagtctaacctagatgcaagagaaaaatggaacctcccttcctattctcatcctaggccatatctctttgaataaaatacccctgaggcagatgcaggaactccaggggtaatctcaagattcacaaagatgaaccatatcgccagcattccctaggttcctagaagaccaaatggtcatggcatccagttcttattatctctgtattagtagtggagaaactgaggcacagaaaagtaaagatcttttctatgatagtgtcagaaaccagcctcacagaagtcatttcttctaatttctgggttccatgaactaaccaggtcccctcactcatcacagcactgagaatatgctttagttagcaaaacaggaaagctgaatttgttaagtctacctaatggcatttaactagatctgaaatagtgttaattcagtcattcattcaatacttactgattgcattttactggcactggtacataacaaaatgactatgacataaacacaaatacttgcaaaacaaacaaactggaatgatatgagcctcttcaccacatgatttgtccaaatgaattttaaaaataggtagcacacggaagttattgtataattcattcaggtgtccatcgctaagcccccaccacaaacagaaactgggataatcaggttaactcggcactctcagcatgccccccaaatatcaaaaatatctttctgaagctattccctctgcatgtggacaaattccaagtgctttcttcattcttagcacaaagaatgttctaatattctgaggcaagtaaaaataccacaattccaaaattttgtctctggatgtataactagccagcaacaaattaatgtagagttttgcatgctctcttgtgtttttacactttttcatgggctatttgtcaacatttactcctagctcctgaaccgccccaagttctgcaggagctccagcctgtcactgtgcagtctggcaagcctgcccgcttctgtgccgtgatatccggaagaccacagcccaaaatttcctggtacaaggaagagcagctgctttccactggcttcaagtgcaaatttcttcatgatgggcaagagtacacgcttttgctaattgaagccttcccagaggatgcggcagtctatacctgtgaagccaagaatgactatggtgttgccacaacatcagcttcactctcagtggaaggtaggaatgcctcgctacttccagctgaaaataaaacctaagaagcaggcttttgtcctttcccagtgcatttaaaaatacaatttggagctcataaaagtagattgctacccaactttgaaagcactctgcagtgaaataaattaagataaacctacatgctcccttctgtgaggtctctatggtgacttaatcatgacaaatcttgtggtttctttctttagttccagaagttgtgtctcctgatcaggaaatgcctgtttatccacctgccatcatcaccccgcttcaggacactgtcacttctgaagggcagccagcccgttttcaatgccgggtttctggaacaggtaggtttaagaacaaaaggtgtcattgccaatacttacaaataattacatgggaaaaacattctgtcagcttctcctccatcacaaacatctctcatgcataatttgaagcttaatggaaatctaacagaaaacttatttcaattattaaattaagaattagataagtgtttttcactattttgtgcccttaataatggttgtttatgttatgttatgtgttctttatcacaataaaaaaaattagtgtttttcactaatattaaaaaaggtcatgttccctttatgattgtagctgcactttaatttcttcattgataaaatacaatgacaaaactaaaattattagattataatagcatctacatataattcaaaagaataatacatttatataagacattattcagtctatggacaatgcttgtgtgaaaggtatcctttggaagacaatatcctatagtggtcaaaagtcggggcttcattgtcaaagatgctgaatttgaatcttgccttcaatatatatcatgtctctagttctctttctgtcatgaatacattgagtatgtgattgcattcaatcctagaaaatatattttatgaggctaggaattccgttttagtgcctagaatttggcatctgaaaaatagtacctgctagaaggtaagctctatgaaaacaagagtggatggttgccccagaatatcacctgatacatagtagatactccataagtaattgttgactggactaattaatgatggttaaatgactgttaccaaacyacttaagattattatcaagattaagttaggtaactcaagtcagcacatagcacagtgctcatcatacagtaatcaatcagagttagctgctaccatttttaattggggcatgcttctcaagtaccaccagccaatttcctcatcccaggaatctgatcttggtagaatgagacaatatatgtggaaccacttcaagtcataactgattgtctataatcacaattatttgagagtttcccagccaaagggaaactctcaaagcttgggcatctcccagccctcttattaggctgatgcaaaagtaattgcaaagttgtattgttttgtttattatgcttctcccattagtttataatccaatctctaccttgtcaagatttatttttctcaacaggttagtacttcagttggtcttctgacccaattatttcctcctcaggaatggagatggtgatctagaaatctaatagacctatttgattttatgagcataattaaaagatataatgtatgtaaagcacctataggcatggctgccaggtaactggggctcaatacattcattttattatagccatagagaggaattatataaacatcaatgtttagtattgtatggccagtatggacaaataccatagactgtatatttgagggatagtgttcaagaaatgctaaatattaataaatgaggactgatttgataatatcctactaacacaataatacaaaatatattttaaaagcaagttcactaaagctacactaaataatttatccatttatttaatttttagaggaattttttaatataaacatatatgtacatcattcaaagtagtaatatttgtcttaactatattggtatagtgcttttaagtctataacatattaacatatggtagtattgcctttaaagtgttgtagaaatacacctgaagcactctacaagacaccaattggggtagaaagagaaaaatttcactatcttttctgcataaccaatgtctttaaaaaggtttgaataggctttgtaaactgagaagatcattaacttcctatgtgtggtaatatctgtacacatatagtggttttagcatcctcttataaatttgttttctatatgaaagaaattaaattcattaaatagaatgacccttcaaaaacttgccaactcacgtagtttcataccactgggactaaaaatatttacagaacttcctctggccaggtattgccttaagtaagtgtagccctgctttccacaaattggaaagaaattgggagtcttcagaagctcccatgttcttgggggttgcaatactttctgaagcatgaaacgtggccctgagcaaccaggtgctgtttctaacagcgaaaatgttacctattgaaggtctccagtgccacctactggtagaggagtaatttggaaaagcagaatcttaaaatgtaaaaaagctatttttttgctgtttattctacagatgatgagtcagtgtcatttggagggttacagagtgacagctagctaaacagaaatgatgaataattagtttagcaatgatattgtctgttattcatttaagcatctgtgcaattttaattctaccatttattgtttccctgctattgagatattaccctaggtgctggggtgcagatcttgctcttgcctttaaggagcttgacatgtaggtgaggagatgcatgcacacaactatatcccaaggttgtaagtgctattaacaggcccacgtactcatcattctctgtctgggagagagccagagaaagatgtgtgaactgagcattgaaaaatatgtaggatcattgaacacagtggcatcctatgatgagaaaacaacatctccaagtcatcaaaacttgcaataatgcttcatgtgctagaagcaagtggtttaagtacagttggaaagtgatatcatgagtgggtaagaaggctggataatacagcaaaggccgtgctaaagtttttggtattctatgctgaagattttggaattgatcttgtttacatttaggagacactgcaggatttttaagcccctgggtaccatgatcaggtttactttttagaaatgatactgtgatagggaaagaagggatggacagatgtgggaggcaagactggcagtcaggaactggagagagattattacaataggcctggagagcgtggatgaggccctcagccagggcagtcaggagagacaagtggggtattgcagaagtagtaatatgggagaagaatggcctcaaagaagacacgagaggctaatgagtaacgcagatcatggcatcacagccacaagcaccaagtccactaccaagaaaagttttacctgttaactcacttattgtgtgcagttcatgtccagtggcagttcatgtgtatcctggtgcctcattcagttcaccaaaggaagaagctgtcagtagaaataagcagagaaccttgtaagaggatgtaccattgatgatctcacacacacacacacacacacacacacacacaccccttcacacaaactaaataggggtggtgtttcatgttatatcacatggcactgtcttttggcgtgttattgaagacaacgttgcttccatctgtgatgttagatattcttgctataatgactgacttgtgccagtggcttataaagcccttccatgtgtgttatatcatttaattctcacagcaattatatgcaacgaatagcccataaattattacgcatgccattttacaaatgaaaagactaatccagaaagcttaaatgacatttccaaggccacacagctgacaagttgtagtgtcaagatttcattttctttatatgtatatattttgatggagtcttgctctgtcaccaggctggagatctcggctcactgcaacctccccctcccgggttcaagctattctcctgcctgagcctcctgaatagctgggattataggtgtgtgccaccacacctggctaatttttgtattttcaggagagactaggtttcaccacgttcgtcaggctgttctcgaactcctgacctcgtgatctgcccgcctcagcctcccaaagtgctgggattacaggtgtgaagcaccgcgcctggccaggatttcatcttctactttaccttactatctaaggaactgaacagatttgttactctaagaggagaacctgccatttatacacatctaccatcatgggcaggagagtaacttttatagacaagtattggcattaaaatgcagacaaatgctagatgattggactattagaagatcatcttggatggtattgagaccaagaagtggtatagtgactgtgctccaaaaacaagatggctttgattttggctattcaaacagttaactaaaattaaagtgcatatcacctacaattattacaacacaataacctgctactttactgtaatttgggtttttactttctattattttaagatggttcaaatccttatatagaaatagctagctttattataatgtcttataactgccactctgaaaagagtcaaatgtatctaagatgctcaaataccataataaatcaccctctttatttaaaaaattattttctctacaattatttgtgccatatatactgcgtactgaaaccttttgctcattagtaacaaagatagagattttttttctacagccttcaaaggtatctattttagacttttcatatcttgatcttctcagctctctttttgattgatttttctgcaaaccaaaagtggagatttttctcatttcctgtcccagaaggcaactacaagcccagatcaaacctttcctgatgactcttcttaggactgtctttttctcaaagtcactgaatatgtcaaaatcttgtctctgcttccactgcatgacatgcaaatgtctaaagagaatgtaactgaagttctatcattttaaacattacaaccagttcaaccttaggacaagctatatttttctatcattacatttccttcttgaagatgaaaggaaatcatttaacaatagtagatatggcatgcccagagaaaagtatcatgttattaagtcaaatatgaaatgtaggcactagtattattaacattgtgtttgcaggtaaattgtaaaaatccactcgtttttgtggttgaagtatctcttttcttttgtgtcgcagatctaaaagtgtcgtggtacagcaaagacaagaaaatcaagccatctcggttctttagaatgactcaatttgaagacacttatcaactggaaattgccgaagcttatccagaagatgaaggaacttacacgtttgttgctagtaatgctgtaggccaagtatcaagcacagccaacctgagtctggaaggtaaagtaaaacaactttcagaaccccatttaaatatagatcgaatcttaacaatgtctgtaacaattactcaagagttcatgtaaatcattgttgttcctaccattctcttctaattcaactaattatttccatgttatatgccatggtctcgcctctcctttaccacttttcattgtgaatcatagaccatcacgtttcatttggccccgctttttctctgtaacaatttgtaatgtattgctgctgtcaccagctgtcatgcttcctaatcagcatgaatcagaagggggcgaaatatgctgcataaataggtagatttgttttctcaattggctaagataaaaattaaattttaaaaacatctaagagtgttatcatcctcctatcatgctgacacaattttgatttcacaaaagctagaccgtttcaggtctgtacaccagcgagctatattcatcctcctctcaagaatgtcttagtgttaagaagtccagtcctaaagtggtttaacatttctgttagttggggctcttaaattgtaatcagaaacacttcctcagtaacacggggaatttgattcaaacaaggatagcatttttatatagtggtactatttttcctgagcaaatatagtctatgtagtattaagtacatacaaatacataaggatttagagaaactatttttttcttaaccttacgcattaactgtaactagatgtttttttaaataatgaatttaaagtggtttaaaattaaaaagttgactttacaacaagaggaagaaagaaaagaatatccaaaaccctgttgggtactccactattgccttcatgaacaatgtagtgaagttccttagcccattcatgtctcagcttgcttctctgggaaatggaagtgaacctgtgtgacttcgagtcaatagtgacatacaaggacaaggcagtaggagtggactgaattctagtccattattgaaatttgtgacaaatctgtagacaactccaaatgagttctggtttcagtgcaaggtaagacattaaaaattggtatgcttcttttcaggatttagcaaatttgaagaaaatacatcaaactcccaatggcatgtctctttatcagtttcatttaagaaggagccccttggccaaaagcccagcttcatccagcctctgtcaagcctcagggtgcacaacggggagacagtcagatttcatgcgagggtttctggcattcccaagccagaaatccaatggtttcataaccagcagctaattctaccaacaaaagatgtagttttccattttgaggagtccacaggcatggctttaatgcttatagttgatgcttactcagagcatgctgggcagtactcttgcaaagcagccaatagtgctggggaagccacttgtgcagctacactcacagtgactccaaaaggtaaagcccatcttgcttcaaggactttgatttgctgtatacctctcagtcccactgttactaatgagagtctctgctgtttgttttattgcatactgtggtcagtccataacttactaataaaataacatgcaataactcccgctaggtcctcaattatgggttaacctacatactttaaatttcactgaagtatgtgttctatgcactagagaaccaataattattttattaggcaccacctttgcttggcttctttactcttctaagcaatattgtatcattgcatcattaaatgatctatttgctgattattacttactgtacttaaagtaagtacagtattacttactgtacttaaagtaagtacagtattacttactgcacttaaagtaagtacagtattacttactgcacttaaagtaagtacagtattacttactgcacttaaagtaagtacagtattactgcacttaaagtaagtacagtattactgcacttaaagtaagtacagtattacttactgcacttaaagtaagtacagtattacttactgcacttaaagtaagtacagtattacttactgcacttaaagtaagtacagtattacttactgtacttaaagtaagtacagtattacttactgtacttaaagtaagtacagtattacttactgtacttaaagtaagtacagtattacttactgtacttaaagtaagtacagtattacttactgtacttaaagtaagtacagtattacttactgtacttaaagtaagtacagtattacttactgtacttaaagcatacagtggatggagagcaaatgctaacccaaatacagtcagctagagggagagagagaaagacagactgggtcactttggatagctgaaatgacaacagaaagaaggaaccagatactgcatggcatctgcatgagtcttcatcaaccactcagcactgaatcaccaggaatgaattttcttttgtgtgatcctgacatctagatcatattgcatctggcatgctgctttcaagtgacaactacgtctttcatcttcatcttccatgccattttgtgttactaacatgggcaagtgacaaagcttagatcttaatattcttttctttttcttgtcacttgattatacagtgcaagccctagataggcaaagttctgggaaagatgtaagagagtccaccaagtcccaggcagtggcagattcctctttcacaaaggaggagagcaaaatatctcaaaaggaaattaagtcatttcaaggatcatcatatgaatatgaagtgcaggtttttgaaagtgtatctcaaagttccatccacacagctgcatctgttcaagatacacagttgtgccatactgcatccctttcacaaattgcagaaagcactgagctatctaaggaatgtgctaaagagtccacgggtgaggcgcccaagattttcctgcatcttcaggacgtcactgtaaagtgcggtgacacggctcaattcctctgtgttttaaaagatgattctttcattgatgtaacctggactcacgaaggtgcaaagatagaggaatccgagagactgaaacaatcacaaaatggaaatattcagtttcttaccatatgtaatgttcagctggtagaccaaggactatacagctgcattgtacacaatgactgtggagagaggacaacgtcagcagtactaagtgtagaaggtggttaattgatttttagctatgacttgcttcatttcatcctcatcgctttatgcagcttttctgccatgcaaattcaatcgacgaatatattaattagaatatctctaaattagcaccctattcataagtgacttctgaaagtcagccaagtcattggccatgattatcctgaaaatttaacttaccagtctagattcagaaagtttaatttttaaacgtaggttcgggaagcaaaggtttatttcctatgtgctgcattttctaatatttaccaacgcactaccaagaaagtgtagcaaagttaaaatgttgtattctgagaagtacttattgggtatttattattgtgccagatactgtggtaaatttcagtttaattgttttaatagcaagaggttcaacaattcttatctcctctttattttcacatctggaggttctagttgtttacaaaggggccatgaaaatagaaaattgggaccaagtacagtggctcatgcctgtaatcccagcactttgggaggccgaggcagccagatcacttgaggtcaggagtttgagaccagcctggctaatatggtgaaaccccatctctactaaaaatacaaaaattagccaggcatgttggatgttggtgcatgcctgtaatcccaactactcaggaggctgaggccaggagaatcgcttgaacccaggaggcagaggttgcagtgagccgaaatagggtcactgtactccagcctgggcaacagaactagactccatctccaaaaaagaaaaatagaaaattgaaaattgggcactgaaaataacaaagctctctctggaccaaaattagaagtctctagatatttctccataaatgatgctgcttttacaggcttaaaatcctcctggaattgtataattttctcatggcaagatcacaatttttgtcgttattgggcttgattctccattatgtctggaagagcaggaataaacttgtctgggcaagtaataacttcttcctcttatccatggactttccttttggatattaatgaaatgagaaaaatatttttcaggtgccataagcctgtgttgtgtgcccgtagtcaaaacagcttcactgagtctcatggaaggaagctggtggaataaattcaggcatctccaggggtctgtggaaagctctggcctcaagttcctccctgatcctggccatagtggtgttagggatgaaaagggggcaatgcagtgctatgtaggtgcacagccatctctgcacagaattttgaaacagtggcctttcttcctacccagtacagagaatacagtttattgattcatataatgtatccgcaacacctactcaccaaaaagaggtcttattctttcttaatgagattttgttctatagctatctctcattctgtcaccgtagcctacaaaggcaatatctcaagaactgaggtctagttatgtaaattagatagaaaattccaccagccagagagttgaccctcaatttcactacagctgctggctagcacagtaatcacacagggtgactatttatttggaggtgttgtctacaagtcctgtaggtgacagtgtgacaattttttcagtaatgtaattgggagttggctgtgttgtgaaggtgggagaaatgtagatctcttaactcacttcctaaagaatctagtgctatagtgcggtgtttgactgtcatattcccagaattgatttgaactcggctcttttgccctaggatctccagttcattcagttccaattgataatattattaaagtgttcttgaagcaaaagaatttttttgaacatccaactgccttacttgtacctaagaaagttgaaagataagacatttttagatgtttgaagagtgaaagatcaggcacagttgtctaattatttgacataggccagtctttatatgttccttttttattttggcttaataagttcatataggctacagagttatccaccaagatcaagtaggaatgtcaaacccctggaagtctttttgaatacagttattatgtgcataataaacataaacatatcatatataagtttcatgactaacatgctgcctttccttctcatcctaatgacattccatcttctccacattcagcatgttttttattcttacaaacacagctaatttatgcctttccctaactttattcttacctagcaaaagaatcgcaagccagagcacttacaaaaattactctgggttctgacactaaaagtattaaaacactcagagagtcacaaattaaaacaacccgtgaagtaaaaagagaatcgtcaaagaaaacatcaagtttgtcattaacttcatgccaaaaaccgtaagaaactgagaacaagggaataaagtctactgacaggataccacgtggactgaagactgagagtgatacgagagccccagcctttcccaaggagctgccctagatatgactgtgtctaaaagctgtgcatattccttgtggaataaaaacagttttgataagtctttgttttgtttcttaatatgtaatttggacttcatgtagttcaaagtttgaaaggtgattcaaatcaaaggagtgtttactagcaggaaaaactgagaatagccctctgctaaagtagcaatttagaaaatgcatgttctttctaaatgtgatttcatctcttagcaagtgtttagtcaataggacattttttagaaaataatattccttcggtttgtagattgctttctgcatgcatgtaaaggcatggggaattatagaactaaaagtggaaatttcatgaagaacctaaaataaaaatgttttaaatctttctgtcaacattgtcatgtgttttatcagctcaatagtttgtttggcatggactttttggtaaatttggggaatgtagttttctgttgttataataaaaagaaaactttaatcatacaagtcatgaattgatgcagaaaatatatgcaattaatcactaaaatctctttatatgtttttctattttagctcctgaatcaattttgcatgagaggattgaacaagagattgagatggaaatgaaaggtattgttataatggatgtgagatttaagtagaaattctaaaggattaataggatccttgagttgccttctttctcttagtattattgagaaaaaaatgacatagatatacaaatatatctcttagagtatatattactatgtcgcatgcttggtttagaattttgatggttacatgcatttcacagtaatttattgtaagttaatttaaaattttgtatttaaaatttatcagccaaattcaactttatgtttgcagtcatttccaaaagtgtatattaggaaaagttgtcatcttaatgcatgaaatcatgaagtagaagtttgttttcaaaatcacggtgaattacattgaaaatagacaataacctagctgtcattctcagaatgcaatgtcatgaatgaattatgattgaaatgctactttactgaggttgtgtgaaaacattacattcccatctggtttacacttcattcacatgtatcattttaacattgatatgtctcttacactggcttgcagatagctgccttatgtgatccttattgcctgcttttctttgcataacattgtgactttatggctgtattagttcgaataaacgccttctcattttattttagctaattatttatggttatagttcttgtatatactctttaaatagttgattctcaaaaatataataatttaatctacaatcaaaagaatcagaaagggcgtttattccactctctgcaagtcaggtaagattttccacttagccatcaaaagaacaaagttttcctgctctcaaaacaaatatgcacaggaacatgttattttgaaatgcatttttgcttgttcaagaagaaatttcaacagtttgaagaaaagaccagacaacgaacgattttcgtgtcagaatcttttaaacagagcatggtgttgcgtttattcgaacaaatatggtgagtgaatttttctatggatttgtgagatctgtagcatgcaatttatttcatttcctattttgcaattttatttactttcaactttttcaagttctatggaaaatagtaaaggttttttttttttttccagaattattctctgagggggaatctgaacattcagaaagggatacacgtgacgccttttcagattctgaagacatagaccacaaatccatggctgctaaaagatatgcaagtagaatatcatctacaagctcctggcctgaatattttaagccttcttttacccagaaacttacatttaaatatgttttagagggtgaaccggttgtttttacatgtagattaattgcctgtccaactccagaaatgacttggtttcataacaatcggcccatcccaacaggtcttcgtcggattataaaagctgagagtgatttacaccatcactcttccagcttagagattaaaagggtccaagacagagattctggaagttataggttactagcaattaatagtgaagggtctgcagaatcaactgcatcattgcttgttatccaaaaagggcaagatgagaaatatttagaatttctgaaaagagcagaacggacacatgaaaatgtggaggctttagttgaaaggggagaagataggataaaggttgacctgaggtttactggctctccctttaacaaaaaacaagatgtggaacaaaagggaatgatgagaactatacattttaagacaatgagttctgccaagaaaacagattacatgtatgatgaagaatatttagaaagtaaatctgacataagaggttggcttaatgtaggtgaaagtttcctggacaaggagaccaaagtgaagttgcaacgtttaagggaggctagaaaaacgttaatggagaaaaagaaattatctcttttagatacgtcttctgaaataagctcaagaactttcagaagtgaagctagtgataaagatattctgttctctagagaggacatgaaaatcagatctatgtctgatctagctgaaagttataaggtagatcattcagctgagagtattgtgcaaaatccacatgccctttctaatcaaatggatcaaaatatagaatctgaggaacttcccacaagctttcaaactattgttgatgaagaaattttccagactgaaataagaatgagccaagaagcactggtaaaggaaagtctaccaaaagaccatttatatggtgaaattctagtaaatgaaaatacccaagcaagaggacagctggaagaaattatggccaatactacaattggagagtcatccacatatatcactaatgtatgtgagaaggaggaagtatatgagactcctgaaaatgtgtctcaagctattacaccacatgccagcgaatcttttggtacacttgtaaatgttgaagaaagtgaagaaatagctagtgaaagaataaaaaaggatgatttgagagaattacaactctctgcttctacacgaattgatgaattcaaaaccgaacagaaggaagaaaacatgagattttttgaaaattcttttcgaaaacgcccacaacgttgcccaccttcatttcttcaagaaattgaatctcaagaagtttatgaaggtgacagttgtaattttgtgtgtcattttcaaggatatcctcaacctatagtgacgtggtataacaatgacatgccaatcccacgtaatcaaaactttatcattcattcgttggaaaactattcaatattaactctttcatctgttcatcatcagaatgaaggttctattacttgtgtgctatttaaccaatatggaacagtaaaaacaaccagtatgcttaaagtgaaagcaaaacaaaaacatgatgtcaaagcacataaagtcccagtgttccatgactacttggatgaggaagaagagctagcattggtgtttgaccaagcaaaaggcgcccatccatctatgagtcaagagggccaaacaaatcttcatttgttaaaaactaacccaccagttcctccctctggagacacagaattgctttcctttcctgtagaaattcaggtaacagcagctactcctatcccagaacaggataaagagtctaaagaagtgtttcaaactgaggagctggaacctaaagcaatgcctcaagatcaagttactcaatcaccaaaacacagatttgtatttttgtctgatattactaatgaaccaccaaaaatgttacaagaaatgccaaagcatgccaggtgtagagaaggggattccatcattcttgaatgtttaatatctggtgagccccagccagttgtaacatggtttcaaaatggagtccttttaaagcagaaccagaagtttcagtttgaagaagttaattgtagccaccaattatatattaaggatgttaattctcaagattctggaaaatataaatgtgttgctgaaaacaattcaggggcagttgaaagtgtttcagatctaacagtggagcctgtcacttatagagaaaatagtcaattcgaaaatattggtgaaatttatggaaaatattccagagatcagcaactgcaagaccagggagaatctgtaagggcacatttttatgattatccagctggtccctttactccctggacaaatgtaaaagaatattcagtaagggactattttcaaagccttgagactattgagcaaatagaccagaaagagcaggtgcgttgcataccttctagagaaaaaattcccagatttgtgcatggtgcttcaagaaccataaaaatcagcaagcccatcagggctgaattcatacaatgtcaggctgaagggaaagagagacatgtaagtgaaaaatcaaagctgcaccaagcagagggtactgtttatccatttgttgatgatttcagtgatgtcactattaagaaagaaataagaaataattttggaaaacttggtagatcagaaaaggaaaatgtacaagaatgtgcccaaagtgactatttaccaaatattcactctgagagaatttctgacagttacaatacaaaagattcatctgccattgtatatgaagaatcccttggtgaagagatacactacccggggaaaaaggtgaagcatagaattatcgaatttgaaaaattacatgtagaaaaaggagttctagaaaaaagacctaccagaacatcaattgttaatcctcctcaaaagaagattgatgacaaagccttttcattaaagcaaagagaatcaagatcaagcaatctaaatgcaaatatgtatcaggcagagaaaatgtctccaaatactgaatcagattcatctaacattgcaataaatttaaagctgctttcctctcaaactcataaagaatttgacgcacaagaaagggaacaacaggaaaaaataagtcttatagataaacctgcaatttctaaaagagctgaacatgaatcacctattacatttgacttaaagcagtttcacactcaaataaaacacacagatgtgaaattccaagaattagatagtggtcaaccagaagaagcttattttaaaatccaacatcctgctgacactgagaacattgtatttgatctaaaacaaatgtattctcatataggagatccagctctggagttccaagggcaagaaactagggaacagcaggaaatacattataaagaaaaaattcctagccctgaaacgttacaacctgacacacacaatatctctaaaagtgtgcaaaataatgtatttgccagtcaagaaatttcttccagtcaagagctttcaaatagaactatggtggagaaaagtagtattgatgaaaattccatttctttagaaaaagaagtccgacatgtacaggaacaaaacttagacattttaaaaactgatctttctcttaaatccttttctgaagaaatctatagtgaatcatgtgccctacttccaacctcatctgcagatatagaagaaactgatctttctgagaaaagttgtcctctagaaaatggaggcagaagttccatctcacatttgaaaaaagcagcaagtgaggaaaagcctttaggggttggtgaaatggaagaagaatgcactctagaaccagagttggcagcatttccaaagcaggatggtgggacacaggaatatacagatgccactttggaagaccacagaggtgatgttcaggaagctgacacactccatagacagctctccctgagtcagtgcttcccactcttgatgactgaagaacaacagaatccaggtgaacaaataagtacaaacattcatgcctctggagaagaaaaatgttatgaagaagttcaagttcagaatgaagcttctttctccactttagaaggagaaatgatagaaactagtttttctcaaaatattcctaaattagatgaggcacataccactgaggcagcagaatctgagacctccctaacacaatatttacttgctgctggaaagcgtgaggttcctgaaactaaagacaccagagaccaggcaaagcttgtccagagtgaatcaatcacttcaatggaggtggaagaagtaactttcaacactgtgtatgaatactacaaccagaaacaggaatcactaggtcgtccactttctcctgagtctgacatttccattggtgtgggaagtacaaccagtgaagaaatatctgagttagatcagttttataccccaccatcatctgttgaatattttgaatctccaaagtcccctgacttatattttaatccttcagatataactaaacaatcctcaatacattcaggaggtgagacagttgaaagatattccacacctttaggggaagttgctgaaagatattcaacaccttccgaaggtgaggtaggagaaagatactccacacccccaggggagacactagagagatactccacacctccaggagagactctagagagatactccacacccccaggagagactctagagagatattccacacccccaggagagactctggagagatactccacacccccaggagagactctagagcgatattccacacccccaggggaggcactagagagatattctattcctactggaggaccaaaccccactggtacttttaaaacatatccatcaaaaatagaaatggaagacggtacaccaaatgagcatttctacacacctacagaagagaggggttcagcttatgaaatatggcgttccgattcatttggtacacccaatgaagccattgagccaaaagacaatgaaatgcctccatcttttattgaacctctgaccaaaaggaaggtatatgaaaacacaacactaggcttcattgttgaagttgaaggtcttccagttcctggtgtgaaatggtatcgaaataaatctttactagagccagatgaaagaatcaaaatggaaagagtgggtaatgtgtgttcactggaaatttctaacattcaaaaaggagaagggggagagtacatgtgtcatgctgtaaacatcataggggaagcaaagagctttgcaaatgtagacataatgccccaggaagaaagagtggtggcactaccacctccagtaacacatcagcatgtcatggagtttgatttggaacacaccacatcatcaagaacaccttctcctcaagaaattgtcctggaagttgaattaagtgaaaaagacgttaaagaatttgagaagcaggtgaaaatagtgacagttcccgaatttactcctgaccataaaagtatgattgtgagtctagatgttcttccatttaattttgtagatccaaatatggattcaagggagggagaagacaaagaactaaaaattgatttagaagtatttgaaatgcctcctcgctttataatgcctatttgtgattttaaaattccagaaaattcagatgctgtattcaaatgttcagtcatagggatcccgactcccgaagttaagtggtataaagaatatatgtgtattgagccagataatattaaatacgtgattagcgaggagaagggaagtcacactcttaaaattcgaaatgtctgtctttctgatagtgcaacatacaggtgcagagctgtgaattgtgtaggagaggctatctgtcggggattcctcaccatgggagattctgaaatatttgctgtgatagcaaagaaaagcaaagtgactttaagcagtttaatggaagaattggtcttaaagagcaactacacagacagtttttttgaatttcaggtggtggaagggcctcccaggtttatcaaaggtatttctgactgttatgcaccaataggtacagcagcatattttcagtgcttagttcgtggctctccaagacccacggtttactggtacaaagatggaaaattagtccaaggaagaaggttcactgttgaggaaagtggcacagggttccataacctgtttataacaagcttagtaaagagtgatgaaggagagtataggtgtgtagctacaaacaaatcaggaatggctgagagctttgcagcactcaccttaacttaaaatgtaatgttttagtgcctcagtaattattagcattgatctgagtgctttcatattttccaaattatgtggatctaataaacttccaaacaggtccaccatatttgaattcattaccttggagacccctaaagaaataatctctatgtagaaatctcatctttgtaatacatgtaaatattttgttatctgaactgtggaatcatcacttgtgtcaatcatgctgtgtaatatcaaacacaattaaatctctccttggctacctaattgtttgtacttctatttaccctcatgcctcctccccaaagtgtttcagtggaatggactctctttgagcagataaaccatatatgcaaaagtacaatgtaaaagtggagaccatatcagatgaccacgcagacaaattggtaagggcaaatctctctgctcccattctaagttatttttggaattttaacccctttgcatccaaactcatgtttatttactttgacttagaataggcaaaacaaacaacaaaaaccagcttctcccaattggcaactaactctataatctgtttgacatttcaatcttaatatattaacttcatctcttttaaaaatgttttcgttattaatattcctcttcataagtgctttaattctcactggcttcaagggaccaattgtgctctttgtgggcagggttcacctagacatttgcaaaataagcaaatagatctttccacttttggagataccttatttttctccatttttgagatgacatcaagtgtaaaatgcagcaataatttagtattggcctggggaaaaaagggaaactatcatattgtgtttacatatagattttaaaactgtattctgatttcagaatctttaaaatttaaaaaaaggtgggatatttttagaattgagacaatatggtaatttgtatttcagattatatataaataacaagataacaagctttcctatcagtttcactgaatttcatctttaaaacgaatatagcttaataagcattcaatttttattgtgatgtttatgtttctaaagtaactctttaattttgtcttttaaaattaaaataacagtaaattaacatactccttaatatcttacctatatactaatgtggacccaagtcttctcatataagactcgacaaatataaaaaattctgaaaatgaagggtaggaccaaaagaccttagaggtgatcattcaacaatacaattctgtgttaagctaatagtaattattcttaatacaatttagaataaactttaattttgtaacaaaggatgagagaaataatattacaatgaaagataaattttatctccctccacctcttaaattacttattgttacttaatggctacatttgtcacctgcatttagcaatatttaagtaccattatcatatttaaaatgctaattttaattagaaatgtaaacaatttaaatttaattttcaaaagaattcatatccaattatgtttattatgtttctttcatctatcagtctttattctcaacatgggaattctctaacagctatccaaattaaagaagcaatagagacaatgtacagaaaataggcagagcagccaggcctcccctgcctccctcacaaaaaaaattttgaattatctgtttgagccaccataactcatcagcatagatacactattgtagaacaatcattcctgttccaaccagtgagcacacaatatctgtgataataattatagacataatgtaatatatcacatcacaaattcctgaaataaaactaattctatagattaggaacttagagatttattctgcacttagtcacataatggatgttaaaattaacgagaaactcagattgaggcaaacatgacaagcatgctttactcaaacatcatacagcacagcaacagttcaaaccttgtttcttaaaaaaagagaaagagagaaatagaaaaatgtttttatgtcctactggatttcaggaagagctgaaaaacactcttattcatatagtaaagagggctttgtttggttttgctcattagaattctgtaattctgttagtttcaagtatggtgaacttgagtatacgcagaataacagtgactgaataaagaaaagtaagccttggcttactttaattgtcatagataatgaaatggaattttttattttctgactcaatggcacgtaacataaaaccccaaaatattaatttctctgattctggataaagaatttattgtattgcacatagttgagtttagacaattaatagctgctaccacaacatgtaattttttaaactatgcctttcaagtttcagcacatttgaatttcatttactatcctttttatggctaataataccatggcttgaagtaaaatatttgcaaatagttcaacatagtagtgagtaagggtattttaactgtattcacattcactccctttacagatattttgtgagttcaagtgaagggaaaggtaacgcgaattatgtattgtagattaaatgcgaagttaagtgatcaccattaatatgtaaaattatcaatggttttatggtttacttaaaataataaatacctgaatatgtattctgcatgctatagatgagtttctccagtatttttacagccagcagacacttgagtcctgtcttctaatgcttatatgctagaacagaaaggaattaaggtgtaagtctatttcatgtgatgcaagtgaagtcaccaaataaaatcataaaactgccttttgctaaggcaataaaactactaataacaggcctgttctgcatagctaagaggtttaataaaaaatcgaattccttgtttaaaattacatgtctttcatcctgtcatccaggatactgtttaaagagtctctgttatgcactgctttgtttcttgctcagtggttctgtataggttttcttatacaataaaatacaatgaacttttaatattggagttgttttctcttatttttgattatcttattttcttggctaatgccttattacaaaggctttgttcaagtaatatggtgatttacatagatgaaagaaggcctgcatttctagaaactgaaaacagtggttctcttacaaatccaaattaaacatttcctgtagcctcttatttttaataatgactttagaggcagtaattagaacatcaatggtttattttggaaataatcagtctttaacaaagaagattattcttaacctcaagaaaactctaaatataaataacaattctggatctttttagaagttgatttaaataatgctggattattataactatttaattagcagtttttcaaactttaaaattggaattatatctcaagaaaaactcatgagagcatttttaaaacatgaactctatcacagatgaagtggatcaaaaattgcttttgtacagtatctataattttgcataattttatatgttaagctaagaaaaatttagaaatgtgctttttgatacattaatcttggaataatctaatcattccaggaataaagcagaagaaggccatcaactggtgtctaattctttgatttctatttttatattaaataaaattttatagtaaaataataatcatttttccccatacagagttttctagttcttttctgtctgccgaggaagaaggacttcatagcgccgaacttcaattatctaaaataaatgaaacacttgaacttttgtctgaatctccagtttactcaactaaatttgattccgaaaaggaaggcactggcccaattttcatcaaagaagtgtcaaatgctgatataagcatgggggatgtggctacactgtctgtaactgtcattggcatccccaaacctaaaattcagtggttctttaatggagtgctattaaccccttctgctgactacaaatttgtttttgacggtgatgatcatagcctgatcattctgttcaccaaattggaggatgagggagagtatacatgtatggccagtaatgactatggaaagacaatatgtagtgcctatctaaaaattaattccaaaggagagggtcacaaagacactgaaacagaatcagcagtggcaaaatctctggaaaagctgggaggtccttgtcctcctcacttccttaaggagttaaaaccaattcgctgtgctcaagggcttcctgccatctttgagtacacagtggttggagagcctgcccctactgttacatggttcaaagaaaacaagcagctttgcaccagtgtttattacactatcattcataaccctaatggctctggaactttcattgtcaatgaccctcagagggaagacagtggcctctatatctgtaaagcagagaatatgttgggtgagtccacctgtgcagcagagctgcttgtgcttctggaagacacagacatgactgataccccctgcaaagcaaagtccacaccagaggctcctgaggattttccacagacacccttaaagggtcccgcagttgaagcacttgactcagagcaggaaattgcaacgtttgtaaaagacaccattttgaaagctgctttaatcacagaagaaaaccagcaactatcttatgagcatattgctaaagccaatgaattgagcagtcagcttcctttgggagctcaggaattgcaatccattttggagcaagacaagctcactcctgaaagcaccagggaatttctttgcatcaatggcagtattcactttcagcctctcaaggaaccatctcccaacctacagctgcagattgtacagtcccagaaaaccttctccaaagaaggtattctaatgcctgaagagcctgagacacaggcagttctatcagataccgagaaaatcttcccaagtgccatgtccatagaacaaattaattcattaacagttgagcctctgaaaactttattagctgaacctgaagggaattatccacagtcttcaatagaacctccaatgcattcttatctaacctctgtggctgaggaagtactttcaccaaaagaaaagacagtatctgacaccaacagagagcaaagagtgactcttcaaaagcaagaggcacaaagtgctctcatcttgagtcagagcttagctgagggacacgtggagagtctccagagtcctgatgtcatgatctctcaggtaaactatgagcccctagtcccttcagaacactcatgcacagaaggaggtaaaattttgatagaaagtgcaaatccactggaaaatgcagggcaagattctgcggtcagaattgaggaaggcaagtccttaagatttccactagcacttgaagaaaagcaggtactgctcaaagaagagcattctgacaacgtggtgatgcccccagaccaaatcattgagtctaaaagagagcccgtggcaataaagaaagtgcaggaggtacagggaagggaccttctttctaaggaaagcttgctttctggtattccagaagagcagagattaaacctgaaaattcaaatctgccgggctttgcaagcagctgtggccagcgagcagccaggtcttttctctgagtggctaagaaatattgaaaaggtggaggtcgaggctgtaaacatcacccaagagcccagacacatcatgtgcatgtaccttgttacttcggcaaagtctgtaacagaagaagtaaccatcattattgaagatgttgatcctcaaatggctaacctgaaaatggaacttagggatgctttgtgtgctattatatatgaggaaatagacatcctaacagctgagggtcctagaattcagcaaggagccaaaacaagtttgcaagaagaaatggattctttttcaggttcacagaaggttgaacccattactgaaccagaagttgaatctaaatatctgatctcacctgaagaggtcagttattttaacgtgcaaagtagggttaaatatttggatgccacacctgtcactaaaggggttgcttcagctgttgtctctgacgaaaaacaagatgagagtctgaaaccatcagaggaaaaagaggagtcttcctctgaaagtggtactgaggaggttgctacagtaaagatacaggaagctgagggtggcttcatcaaagaggatggccccatgatacatacacctttagtggacactgtttctgaggaaggtgatattgtacacctcacaacatccataacaaatgctaaagaggtgaattggtattttgagaataaactggtgccttcagatgaaaagttcaagtgtttacaagatcaaaatacatatacgctagtcatcgacaaagtaaataccgaagaccatcaaggagagtatgtctgtgaggccttgaatgacagcggaaaaacagcaacttcagccaaactcactgtagtaaaaagaggttggattttaaggataaaatagatcaaatgctaacattcactggattgtaatgatttagcttgcatcacttaaattttcacttatctgccacttccagaatgtaatttatttagagtaagaatgaaatcacagacataatcatggttatgaactcaccttttcccttactgccctgttgggtgctatgctatcatatccatggtactatttattttaaaaataaaacatattttcatatgtttcataataccaatagataagcttttagttaattttcatatgaagataactttcataatatgtaataaaaagtatcagtgaacacctagccactctgaaatcactggtctcacccttagatttaaaataaccatgattagttgtctgtttcttttttctgtttattttttgttgttgtttcacttcatcactttatttagtatatcatgtttcttcacattattttcagtgttcccattcagcatggtatatttaaagaatatatcatgttgttatgcatataatccaatagcatcacattttttcacaattcactgcaaagcaatgattgaataggttttttttaaaaaaagcttattgtcttcttttgccttcaatgatctttctcattttccagtcatttgccttaaactgctgtaatccatctcaccaatttcaactgttttactccattaacagcaacaaaagttagaagaaaaacaaaaatgtcatatgcctgataaggaggcatgttaatggactctacttccctttgcagctgccccagtgatcaagaggaaaatcgaacccctggaagtagcactgggccacctagccaaattcacctgtgagatccaaagtgctcccaatgtccggttccagtggtttaaagctggccgagaaatttatgagagtgacaagtgttctattcgatcttcaaagtatatctccagccttgaaatcctgagaacccaggtggttgactgcggcgagtatacatgcaaagcttccaatgagtatggcagtgtcagctgtacagccacactaactgtgacaggtaaatgccatacattggcacagatgttgtcacttcatttcatattgttgtcctttttgctttctgtacatgtgtgggaaatgcttgtattaccaactggagagaccaacaaccaagacagtaacatggtaggtaggtactgcagagcctatatgggataagaaatcattatttacagtcacatttctactactgaccaaagaaaaaataatttattatttgagaacaaagttaagtaatcaaatgagctcagcttggcccttcatataaaacatatcaggacagtttggtgccactaaaaaaaaataatgtctcaatgtatttaaaaattttaaatcaaataaccaattaagaacagaattacaaacttaaaaaagtcagtgtctaagtctaaaattaaatcctaatgtaagacagggagctagtataggactgaaaactaggattctctctaggcatttttactaatttaaaaataagacggctgggcacggtggctcacgcttgtaatcccagcactttgggaggccaaggcaggcggatcacaaggtcaggagatcgagaccatcctggctaacacagtgaaacccgatctctactaaaaatataaaaaattagccaggcgtggtgtcacgcacctgtagtcccagctacttgggaggctgaggcaggagaattgcttgaagccaggaggcagaggttgcagtaagccaggattgcaccactgctctccagcctgggcaacatagcgagactccacctaaaaaaaaaaaaagaaagaaagaaaataagacaactacacaaatatcctattcccaattttctaattgatacgtagggtgactttcaaatagttaacactcatcaaatacttgaatgccttcattaaccaaaatattagtagcaagcttttcttcctttcttcctaccttctttccttccttccttccttccctccttccctccctcctctctatctttctttctttcttttctttctttccctcttcccaagagaaagtgtgagtatgaactgtggtttgaggacaggggtagaggtacagtcaagccatacttggactgttggggaaggctgtcccttggtcttctttgtcaatgagaatatcaaggggaagggcaaatgcagcacatctcttgaatgtgaaaacgatgaggttccctatagcttcctcttctctacaatccttttacgtgatcctaagaaaaacccaggcccatgatgacccaaccagtgcttttcactctggtcaaaatgtctccataaaaccaagtacatgatattattcatactgacgcgtttggaagtttctttactcaaattaggtcaatttaggaatgcgactaatattgaagcttcagataataagaggaaaggataaggaggatgacttaaaaaaattaaaaagagaggttctgaaagtctggcttcaagatgcagaatggaaaggggaagttgctgctattaaatatttttacaagtttgagttggcctagaggatgcattcatagttaagccatataagaatttccaggcagttgacatgagggttagaaagacattacaaaactacttcaatcttcttatcacttaatatccctactcttcagaagagtcaaatacattttctttatcttccttacataatcttctaatttgcagaattaaagtatcagctcaatagcttatcaaataattaaacaagcagccactaaaatggacaaatctttagcaatgttacttaataaaggaacgcttgtcttttctttgatagagacaagtaaagtgatgtcttgctcccttataaagaacactctcatccctttcctttgacaatcttttgttcttattaacacattactccattttaaattatggctcatgtctatctaaagacttaactcatcttttctctgtcttggaatatataattacagcaagtgctttggtggggactaaatgtaatgctggaaaaatttcttttgcagaggcatatccaccaacctttctctccagacctaagtcccttacaacttttgtgggtaaggcagccaagttcatctgcacagtgacagggactcctgtgatagaaaccatttggcagaaagatggtgctgcactctcaccttcacctaactggaagatttccgacgcagaaaacaaacacattttagaactctcaaaccttaccattcaagatagaggagtttattcttgtaaggcttctaacaagtttggagcagacatctgccaagcagagttgatcatcattgataagccacatttcattaaagaattagagcctgtgcagtccgctatcaataagaaggtccaccttgagtgccaagtagatgaagacagaaaagtcacagttacgtggagcaaagatgggcaaaaactccccccagggaaagattataagatctgttttgaagataaaatagcaacacttgagattcctttggccaaactgaaagattcaggaacctatgtctgtacagcttcaaatgaggctggaagcagctcctgctcagccacagtcactgtcagaggtaagaaacgtgtgaatgtattttctagtcccttctctgcaaggaatcctcagtagaaaaactgttggcaaacaattcagtcagtacactttgttattaaaataatgtcattcagcaaacattatggtttgggaaagtcctggcattgtttgattttatttttttaatcctcttcaaagttcacttaacttttgttcttttaaattgtctgctattaacaaagcttgcttaaaatttcttctaagaaaaaactccaagtgtctgagcaattcttaactatcttcttttataaaattcttctttgtgtaggtagtctgtttattgttgttttattttaaatcaagagactgggaaagtgtcttagaatgataggaacctattaaatgcaccacagcttttacagaaattttgtggagatattttatgtgtgttgggtctctttgttgtatatgtctacttttcttttgcggagtttatgtttcagatatcttctcctttttcttttttgtaaacttcatgtagagccaccatccttcgtgaagaaggtggatccctcttatttaatgctcccaggtgaatcagcacgcctccattgcaagctgaaaggctcacctgtgatccaggttacttggtttaaaaataacaaagaactcagtgaaagtaacacagtccgaatgtattttgtcaattctgaggctatacttgatattacggatgtaaaagttgaagacagtgggagttactcatgtgaagcagtgaatgacgtcggcagtgatagctgcagtactgaaatagttatcaaaggtttgtttactgagtttccatccagtatttttctgagaaaagatttcccttttaattacttattacccattacttacacaatgctttcatgcttttgtagaacctccttctttcatcaaaactcttgagcctgcagacatagtgagaggaacaaatgctctacttcagtgtgaagtctcaggcactggaccatttgaaattagctggttcaaagacaagaaacaaattcgaagtagtaaaaaatacagattgttttctcagaagtctcttgtgtgtctggagatcttttcgtttaatagtgcagatgttggtgaatatgaatgtgttgttgctaatgaagtcggcaagtgtggctgcatggcaacccacttactcaaaggttagtgcttgaaaaactaatgtctctttaataaattgtcaaactagctttcttaccccatggaagaaaaactggtactttcttctcttgtcctatcctttaaatttgttttgtcttggtttgacctgggaccttgggaacaaagtcagtaactttttcacctggtctttttcccgagactagtgtaaatatctattatctgataacaaaagggaataataagccattttgtcagctgacaaacatgtatcatctatgcctctgtctcttggatggaattataattattcttaacttttatttcttcttctaattaacactatgaaatagtagtattgggacaagataaatataatcttgaaaaaactcttaaatatagatggtgttgaaagtgtttgggaattgatatgttttatatgctctctttccttaactagaacctccaacctttgtaaagaaagtagatgatttgattgcactaggaggacaaaccgttaccctgcaagctgctgtgagagggtcagagcccatttctgtcacatggatgaaaggtcaagaggtcatcagagaagacggaaaaatcaaaatgagcttttccaatggtgttgcagtcttgataatccctgatgttcagattagttttggaggcaaatacacgtgcctggctgaaaatgaagctggaagccaaacatctgttggggaattaatagttaaaggtttgtgtaggaacatttaaacctcaaattgctatttagaattaaagtgaaaccctaacaagcatttagggtgctaactatttcataccattgtagaacctgccaaaatcattgagcgagcagaactgatccaggtgacagcaggagatcccgccacactggagtacacagtggcaggcacgccagaactgaagcccaaatggtacaaagatgggagacccttggtcgccagtaaaaaataccgaataagttttaaaaacaatgttgcccagctcaaattttattcagctgagctgcacgacagtggccaatacacatttgagatttccaatgaagtgggcagcagctcctgtgagactacattcactgtattaggttagtatttttagaaaatgatgctacatatgcatttgaaacccaacaaatggcctaaagtcaatcactgagcactcttctatattgaccttttctcccttcttgtgcaacacacagatcgagacattgctccattttttaccaaacccttgcgcaacgtggatagtgttgttaatggtacctgcagactggactgcaaaattgcaggctccctccccatgagggtgtcctggtttaaggatggcaaagaaatagctgcttctgacagatacaggatagcatttgtggaaggcacagcctctttggagatcatcagagtagacatgaatgatgcagggaatttcacttgtcgagccacaaattccgtgggaagcaaagacagcagtggagccctgattgtgcaaggttggctggagactttgcattttatccttattaaagattatgttcaaattaagtcatcttcccttagatcaaccctcttaactctttgaaattctttcttataccccttcttcagaaccacccagttttgtaactaaacccggctcaaaggatgttctgcctggctcagcagtctgcctgaagagcactttccaaggatctactcctctcacaatcagatggtttaagggcaacaaagagctggtttctggtggaagctgctatattaccaaagaagctttagagagttccctggaactctatttagtaaaaacctctgattcgggcacgtacacatgtaaagtcagcaatgtcgctggaggggtggaatgcagtgcaaacttgtttgtaaaaggtttgcattgttttcttgacatctttgtgctaaccttgttataaattctttcctctttctcacatttcttaataacttccttccttccacagaacctgccacatttgttgaaaagttagagccatcacagctgttaaagaagggagatgccacccagctagcctgcaaagtaactggtacccctccaattaaaataacatggtttgcaaatgatagagaaattaaggagagcagcaaacacagaatgtcttttgtggagtctactgcagttctaagactgacagatgttggcatcgaagacagtggtgaatatatgtgtgaggcccaaaatgaggctggcagtgaccactgcagtagcattgtaatagtcaaaggtttgtgttcactttgcctcttgtgttgccaaagttatggcccatggcacagacccctcctcccttaatgcaaatcattccttttttactgtagagtcaccttattttaccaaggaatttaagccaattgaagtcttaaaggagtacgatgtcatgttgctggctgaggtggcaggcactcctccctttgagatcacttggttcaaagataacacaatcctgcgaagtggtagaaagtataagactttcattcaggatcatctggttagcctgcagatcctcaagtttgtagctgcagatgctggcgaataccagtgtcgggtgaccaatgaggtgggcagcagcatctgcagtgccagggtgactttaagaggttagtgttggttccagtgagggactggcttttctgaagagtcaattcttttttttaagccacttttgctatagggataatattgattgagaattcattcttctgttagaacccccatccttcataaagaagatcgagagtaccagctccctccggggaggcacagctgccttccaggccactctgaagggctccttgccaattacggtgacttggctaaaagacagcgatgaaatcactgaagacgataatataagaatgacctttgagaacaatgtggccagtttgtacctcagtggcattgaagtcaagcatgatgggaaatatgtctgtcaggccaaaaatgatgcaggaatacaaagatgttctgcattactctcagtaaaaggttggttcagaacgtttgccttgggtttgaggaagaaatgcagatgtaagcctttcagcagggtaatgcacaacccacatctatccctttgttttctacagaacctgcaacaatcaccgaggaagctgtgtctatagatgtcacccaaggagacccagccactttgcaggttaaattttcagggactaaggagattacagccaaatggtttaaagatggccaagaactgaccctgggctcaaaatataaaatcagtgtcactgatacagtctcaatactgaagattatttctacagaaaagaaagatagtggagaatatactttcgaggtccaaaatgatgttgggaggagcagctgcaaggctagaattaatgtattaggttggtattgttcttctacagagaggattgggcatttccatgctccttcttcccttaaaatttaaaaaaaaaacaaaaacaaattagtagattgacctttttttgttgttgtttgctttttcattgaatagatcttatcatacctccttcattcaccaaaaagctgaagaaaatggacagcattaaaggttctttcattgatttagaatgtatagtggctgggtcacatcccataagcatccagtggttcaaagatgaccaagaaatatcagctagtgaaaagtacaaattctcttttcatgacaatactgccttcttggaaatcagccagctggaaggtacagacagtgggacatacacttgttctgccacaaataaggcagggcacaaccaatgcagtgggcatctgacagtcaaaggttggcaaattttatttccacttatcaagaacttacaaaatatttttgtttcatttctaaattttcacctttattgctaagttataaaataaaacttcctattttcttttgcttcttttttctttcacctcagaacccccttactttgtggaaaagccacagtcacaagatgtcaatcccaacacaagggtacagttaaaggctcttgtgggtggcactgcacccatgacaataaagtggtttaaagataacaaagagttacactcaggagcagcccgctcagtttggaaggatgacacctctaccagtctagagctctttgcagccaaagctaccgattctggaacctacatttgccaactaagcaatgatgttggcacagcaaccagcaaagccactctctttgtaaaaggtctggtctctacatctcctcactttcttgcttgtctagattttcttgcctggggtgggccggggcgggggacgcttaagacagcagttttgcccagtgacctgtttttaaaaatattcaacatcacaattctttttccatctttagaacctcctcaattcattaagaagcccagtccagtcttagtgctgaggaatggacagtcaacaacatttgaatgccaaataacaggcactcctaaaatccgagtgtcttggtatctagacgggaatgaaataacagccattcagaaacatggcatttccttcattgatggtttagccactttccagatttctggtgccagggtagaaaatagtgggacttatgtgtgtgaagctcgaaatgacgcaggcacggcgagctgcagcattgaactcaaagtgaaaggttcgtgaatggaatctattctccattttggctgtgctgcctgataagtttggggtcttcccttgagtaagctactgtcttccttttgaatctttagaaccccccacctttatcagagagctgaagcctgtggaggtagtaaaatatagtgacgtggagctggagtgtgaagttacgggaacacctccgtttgaagtcacttggctgaagaataacagggaaattcgaagcagcaaaaaatacacattgaccgacagagtgtctgtgtttaacctccatataaccaagtgtgacccttcagacactggggaataccagtgcattgtatccaatgaaggcggcagctgctcatgcagtactagagttgccctgaaaggtcagttatacaagaagcagcctatcaaataaaaattctgtaacgcttttaaatcttatcattatgggtaggagttacaatatgtttcttcttttcacactctcttatttaatcacagaaccaccatcattcattaagaagatagaaaataccactactgttttgaaaagttctgccacctttcagagtaccgtggcaggttctcctcctatttctataacctggctaaaggatgatcagattcttgatgaagatgataatgtctatatttcatttgtggacagtgtggccacacttcaaatcagaagtgtggataatggacacagtgggagatatacctgtcaagccaagaatgagtcaggagttgagaggtgttatgctttccttttagtacaaggtttgtaagctattctctttcaaagatagtctatagcgacagtttcattagcagacattatttctagtggagttaccaatgtaactcatccacattttcatttttactacagaaccagctcaaatcgtagagaaagctaaatcagttgatgttacggagaaagatcccatgaccttggaatgtgttgtggctggaacaccagaactcaaagtgaaatggcttaaagacgggaaacaaatagttcccagtagatacttttcaatgagttttgaaaataacgtggccagttttagaattcagtcagtaatgaagcaggacagcggtcagtacactttcaaggtggaaaatgacttcggaagcagtagctgtgatgcctacttaagagtgctaggtttgtatcttcaccccagtcagcttcccttatttatagtatgtcctttgtaaacaaatagcaagagattaatggatgtgttttgctgtttgcattggacagatcaaaatattcctccatcattcaccaaaaaattaaccaaaatggataaagttctgggctcttctattcatatggagtgcaaggtgtctggttcacttcccattagtgctcagtggtttaaggatggaaaagaaatatctacaagtgcaaaatacagacttgtgtgccatgagagatctgtgtctctggaagttaataatctggaattagaagatactgcaaattacacatgcaaagtgtcaaatgtagcaggagatgatgcatgcagtggcatcttaactgtgaaaggttagaatttctttacctcttcttgattcttccttgcgaatgcttcttaaatgtatcactcttgcctttgtatcctttagagctaaaatctctatgattcttgttctttagacacatattcattgtgttcaagaaatattcagccattgcctctttccaagagtgttttcttaaatgtccataaaactgtcacaataattcaactgcaagcaatttaattaaatatatctctcttaaaatctatagaaccaccaagcttcctagtgaaacctgggcgacagcaagccatacctgattctacagtggaatttaaggcaatactaaaaggaacaccaccatttaaaataaaatggtttaaggatgatgtggaacttgtctcaggtcctaaatgtttcattggcttggaagggtcgactagcttcttaaatctctactcagtggatgcttctaagactggacagtatacttgccatgttaccaatgatgttggtagcgactcttgtactacgatgttgcttgtgacaggtgtgcaaatttgattcctttatgtttctgtctgactgtgtctttggttctctgtattcagttacaatgtctctaaacaatcaagaaagtagtattctttctaacatagtaaacagtatttgctcatgtttttctcttgcctgtatactacctaatttaactattgttatttatttctgttccctgatactctcctctttcctgactctttagaaccaccaaagtttgtaaagaaattagaagcctccaaaattgtgaaagcaggtgactcttcacgacttgaatgcaagatagctggatccccagaaatcagagttgtgtggttccgaaatgaacatgaacttccagccagtgataagtacagaatgactttcattgactcagtggccgtcatacagatgaacaatctcagtactgaggacagtggagatttcatttgtgaggctcagaatcccgctggcagcacaagctgcagtaccaaggttatagtaaaaggtagacatcttgttcttgtgtttctcattaaatgaaaaccaccttctcccctgggtattatagctctttattcatttactatcattttagtttccatttgagatcatagaatatttttctgagctagtattatttccctttttagatggtttccttcttgaattttgcttacatgtaactagtcattatgaaatatttttgttattccagtgtcataattctgattacctcaacacatttgccaaacatcaaacgtgatgtttcaaaactgcacaaaaaaatgaagtaggcattttaaaattagtcttttgctttcaatcaacttacagatatatcattctcactataatctatatcattaataacaagcacttttactatatctatgcaaagtgaaagcaatacaggttttaaacttatgtttaaaacaggacaataatattttttccttctctctcaaggatcacttcctatcctttaaaaattatatgactataccttggtacaaatagtatctgtgtttttttgctgcaattttccagtgctttttttttttgtcacaaaggccaagtttgtcttgttttaagacaattattgcagtaatcatttgctgaaatggaagacttagatcacggatgttgtgatgacttccaagtgtctgttatagaacatatacaaaaaaaatcatccttgaaattagaattccatacttcatgcaaatcattatttattgctatacttgcttgtttgcaatttttgtatcaatctttgtagcctaagatacatcagtaaggtgtagtagatagaatgttgaactgttcagtaacgacatctaggatctatctgggttctctgcccatctagctggttatcttgtgaaggcaaatggcttctgaggctgttatcccatgagagtgttagtgctggactctacttacccattagaatatcttaaacctttcttccaatttaaagacaaataaaaaattttcattttgtgaaattcagtagcccaattcatgagaaattcttgttttttgcagagccacctgtttttagcagcttccctcctatagtagaaacccttaaaaatgctgaagtcagtcttgaatgtgaactttcgggaacaccaccgtttgaggtggtatggtacaaagacaagcggcaactcagaagcagcaagaaatacaagattgcatccaaaaacttccacacaagtattcacattctcaatgtggacacttcagacatcggtgaataccactgcaaagcacagaatgaagtgggaagtgatacttgtgtttgtactgtaaaattgaaaggtaaatatagttcatccacatggcagaaatgtcataaatgtgcaaaatcctacttttttcactctcgcatgatctggacaatcttttcaacaatttccatccatcttttcctgttcagaaccaccaagatttgtctccaaactgaacagcctcactgttgtagccggagagcctgctgaattacaagcatccatagaaggcgcccagcctatttttgtccagtggcttaaagagaaggaagaagtgattagagaaagtgaaaacatcaggattacatttgtggaaaatgttgcaactctacagtttgcaaaagcagagccagctaatgctggaaagtatatctgccaaatcaagaatgatggtggaatggaggagaacatggccacactgatggtcttaggttggtacaatagcccacgatagaaactggtgccaaatgctggaatgaattactaagagttactggcagattctttttctgagtttcttctagaactatatttatcctcatctatttgaaaggtctagaggaaagacatagttgatctttcaaacactcttttctgtttctgtgagtctaacaaaaattagacatctgttttattgtttaataactacctgtctatatcaattagcagatacaatcatgactctctttgattaagcatgaaagaatacagagcccagcatgtgctacaagagtaattgttaaaactaacaagaacgccaaaggttggcatttgatagcaaagcttccacataaaattaatgacaattaaacaattgtttgaataacaactttcaaagaattgtctttagcaccttaaggtagagcaaaaataccaagtaattcacaataacctgtagactttgatctacagagggtcaagtggaaatcaatatatactatctaatgcacattgtttaaattgttttgaagttgagtcatgcacgaacatatatttcttaagaataattgctacataagacgacagcaagagtggtgggaaaaacaaaaaataaagaaaaaactgaaaagaaaaaatattaaaataaaaaatagctataattctatgactgcatgtaattatggaatcacactttaaagtcgagagagagagcaacctaacataaccatctcactgggagaaacaatcttagtgaatgtgatagtagagacagagtaaagatcccagactttgacagatggatatcacgttttatttcagagcccgcagtcattgttgagaaggcaggaccgatgacggtgactgtaggagaaacgtgcactctggagtgtaaggtggctggcactccggaactctctgttgaatggtacaaggatggaaagctgttgaccagcagccaaaaacacaaatttagcttctacaacaaaatctcttccttaaggattctctcagttgaaaggcaagatgcaggcacatacactttccaggttcaaaataatgttgggaaaagcagctgcacagctgtggttgatgtttcaggttagttctgctgttttcttctggttgcttatgcaaattccttttacaagtttccttctttcaagtctcttctattctttcaaatcatgatgagtctcttacctttcctcacacagaccgagcagttcctccctctttcacacgaagactgaaaaatactggtggggtgttaggtgcttcttgcatcttggaatgcaaagtagctggatcatcacctatttcagttgcctggtttcatgagaaaaccaagattgtcagtggagcaaagtaccaaaccacattttcagataatgtctgcacattgcagttgaattctctggattcctcagatatgggcaattacacatgcgtggctgctaatgtcgctgggtctgatgaatgtcgtgcagtgctaactgtacaaggtcagtagacagtcaaacttgtaaggaatttcttacaaattcctcttcaggtgcacatctatgttgacaaacatttgaaagtgctctaatgttttattcaaaattgcaactccatctgaagcttacaggatcttttaattgttctccatgtctatatagaaccaccctcttttgtgaaagaacctgaacctttggaagtactaccaggcaaaaatgtaaccttcacaagcgttattagaggaacccctccattcaaagtcaactggttcagaggtgccagagaactagtgaaaggagaccggtgcaacatctattttgaagacactgtggcagaactggaattatttaatattgacatatctcagagtggggaatacacctgtgtggtttctaacaacgctggccaagcatcttgcactacccgtctctttgtgaaaggtttgctcaagtggattcactttttctgttttctgtataccgacatccttgtgtttttcttgtgtttaactgctgtgctttgtcacttactagaaccagctgcatttttgaagagattaagtgatcattctgtagaaccagggaagtccataattctggagagcacctacactggaacacttccaatttctgtcacttggaaaaaggatggttttaacataactacctctgaaaaatgtaacatagtcacaacagagaaaacttgtatcctggaaattctgaatagcacaaaaagagatgcagggcagtattcctgcgagattgaaaatgaggcaggaagggatgtttgtggagctctggtatctacattaggtgtgttgtcttattgtctcttaaatcatttgcattcttctaacatgtagcatagtttctttgatattcattaattccagttgctgactgtgagcctttcttccttagaaccgccttattttgttacggaactggaacctctggaggcagcagttggagattcggtttctttacaatgccaagttgctgggacaccagaaattacagtgtcttggtacaaaggagataccaaattacggccaactcctgaatacaggacctactttacaaacaatgtggccacacttgtttttaataaagtgaacatcaatgacagtggagagtacacatgcaaagcagaaaatagtataggaactgcttcttctaagactgtgttcagaattcaaggtgatgatattttacaaattaaaaaaattcttttttccttaactcttgtatctttatggtgaacttctcatttcatctcctaacaccttaagtattacatgtctccctacagagcgccaactcccaccttcttttgcaagacaattaaaggacattgaacaaactgtggggttacctgttacactcacttgtcgattaaatggctctgcacccatccaagtgtgctggtatagagatggagtacttttaagagacgatgaaaatctacagacttcatttgtagataatgtggcaactttaaaaattttgcaaactgacttgagtcactctggccagtactcttgctcagcttccaacccacttggaacagcatcttctagtgctagactcacagcaagaggtttgttcacacgtcactctttttctttgcaaactgtggcttcatatttcattgtcaaagtagaaacgaccaatggcaaaaaaacaaacaaaaaatacacattgcctttcttctcatcctccagaacccaagaaatctcccttctttgacatcaagcctgtatctatagatgttattgctggagaaagtgctgattttgagtgtcatgttactggtgctcaaccgatgcgaatcacttggtcaaaagataacaaggagatccgtcctggaggaaactatacaatcacatgtgtgggaaacactcctcatttgagaattcttaaagtaggcaaaggagactctggtcaatatacttgccaagcaaccaatgatgttggcaaagacatgtgctcagctcagctcagtgtaaaaggtatcattccatgacttttgacaatatttgttccttaccatatttgcataattgtcttataaaagtttctttggtttttaaatgtttgagagaaactaactggacatgttagaatttgtgtattagtgttggaggcaacattaatcaaagttgtgttttctctttatattgttctttacattagtgtaactctaagtgtaatcttatcaaaaagtattgtttaattgaaatttgttaaatgttgttttaactatctagtccattttttaatgctttcttgttatatggcattctgatttatcattactaaatgttgatcaaatacatctataatacattaacttttatgttttaacttacatagtcaaactaaaaaaaagaatcaactaaattctctattaaaaatgcacatgtaccctaaaacttaaagtataataataataaattttaaaaaactaaaaaaaaaatgttatgagattatttaacttaaaagataacttattttactgtaaaatcctcagaaagtatattcttaataacaaaccagtttaaatataaatttatgggatcttcagctacaaaaacaagctcttttaacatgtataataaacatcccttactgactgttttgtttggtttactagaacctccaaagtttgttaagaaattagaagcttcaaaagttgcaaagcagggagaatccattcaactggaatgtaaaataagtggctccccagaaatcaaagtttcatggttccgaaatgacagcgaacttcatgaaagttggaaatacaacatgtcattcattaattctgtggcattgcttacgatcaatgaagctagtgctgaagacagcggggactacatttgtgaggctcataatggtgttggtgacgccagctgcagcacagcgttgacagtgaaaggttagacacactaagcttctttgtttctttattctcctctgatttgggctcttagcaaagttatgagttccaaaataaaaggataattaaggttatttggttgcaattcttcaacaagttttaatgaattgtcatttcttgtgtcagcatgtattgtcatatgatcacaccagtcactcttcaaggttctagatttaatttttttttcctttatagtaagcaagtgttctcattgtttatctccttttttctggcagcacctcctgttttcacccagaagccttctccagtaggagctcttaaaggttctgatgtgattctccaatgtgaaatttcgggaactcccccatttgaagtagtatgggttaaagatcgaaagcaagttagaaacagcaagaaatttaaaatcacttcaaaacattttgatacaagtcttcatatccttaatcttgaagcctccgatgtcggggaatatcactgcaaagctactaatgaggtgggaagtgacacgtgttcttgctctgtcaagttcaaaggtttgtatacatggacacaaaaatatatgccccttcctcctatctgttcttgcctaactaataacttgtgtggccatgattctcacattttttcctctaaccacaaatttctttcatcagaacctccacgattcgtgaaaaagctaagtgacacctcaacccttattggggatgctgttgagttacgggccatagtggagggcttccagccaatttctgttgtctggctgaaagatagaggtgaagtcatcagagagagtgaaaataccaggatttcattcattgataacattgcaaccctccagctggggagtccagaagcatctaattctggaaaatatatatgccaaatcaaaaacgatgctggaatgagagaatgctctgcagtcttgactgtactaggttagtagcaaagcacagccagagaaaaaatcaatttacttgatccatgatcattttcctcaaatattcctcttatccagtaattcagtgattgcactcttgagtttgaaaggttactttgttttcaatgcaaaatacttcttcttttagaaccagcaagaatcatagagaagcccgaacccatgactgtcactactggaaatccttttgcattagagtgtgtagtgactggaacaccagaactctcagccaagtggttcaaagatggaagagaattgtctgcagacagcaaacatcacattacattcatcaataaagtggcttcccttaaaatcccctgtgccgaaatgagtgacaaaggattatatagctttgaagtgaaaaacagtgttggcaaaagtaactgcactgtatccgtccatgtttctggtgagtagaatgagatttttatgaatatacaatatttccagggggtggaggggcacagaataaaacttctctttaaacgcaaaactacccttccccacatagatcggattgtgcctccttccttcatccgcaagctgaaagacgtgaatgccatcctgggggcctcagttgttttggagtgccgagtctctggctcagccccgatttcagttggctggtttcaggatggaaatgagattgttagtgggcccaaatgtcagtccagcttttcggaaaacgtctgtactttgaatctgagcttgttggagccctccgacacaggcatatacacgtgtgtggctgccaatgtagctggttccgatgagtgctcagcagtcctgactgtgcaaggtcagtgtgcaaggataaagctgctgcttctctaacacctctttcatgtggacgtggtgcctgccttccctggagtttctttattttgtcttcatgtttagtcttagctccctttttttaaggagcaaaagcacttctcacttggatttctttcttctctttatctccccttccgccttgcaatatctagaaccaccatcttttgaacaaacccctgattctgtggaagttttgcctggaatgagcctcacattcaccagtgtcatcagaggcacccctcctttcaaggtcaagtggtttaaaggcagcagggaactggtgcctggggagtcatgcaacatctctctggaagattttgtcacagaactggagttgtttgaggtgcagccattagaaagtggagactattcttgcctcgttacaaatgatgctggcagtgcttcctgtaccacacatctttttgtgaaaggtttgctctttcccccaatatatacatcttttaaaatttctcttaagtcttcattagaaggcaagaattttacccacatgttttctccttatagaaccagccacctttgtgaaaagattggctgatttcagtgttgagacaggaagccccatagttctcgaggccacatacactggcacacctccaatctcagtgagctggataaaggacgagtatcttatttcacaatctgagagatgcagtattactatgacagaaaaatctaccatactggaaattcttgagagcacaatagaggattatgcacagtacagctgcctgatagaaaatgaggctggtcaagatatctgtgaagctctggtgtctgtcttaggtgtgttgacagctacctctttttattgctctctttcttttcaaacatcctcttttacatggcatgactgacttgctgactaccatcctttgtaccatagaaccaccgtactttattgaacctctggaacatgtggaagcagtcattggagaacctgcaactttacagtgtaaagtggatggaactccagaaattagaatttcttggtataaagaacacacaaagctacgatcagctcctgcatataaaatgcaattcaaaaataacgttgcttccttagtaatcaacaaagtggatcacagtgatgtgggagagtattcatgcaaggcagacaacagtgtgggggcagtcgcttcttcagctgtgcttgttatcaaaggtgatggtgttgtttaacctagtgtgtgtgaacagattcattttcttaaaaacgttaaaacttttatgaattgaaatatgttgtggatgccttctcacctgtaaataaggattatctgtaacttctttacagagcgcaaacttccacctttctttgcaagaaaactgaaagacgttcatgagactctaggcttcccagttgcatttgaatgccgcatcaatggctcagaacctcttcaagtgtcttggtacaaggatggggttcttttgaaagatgatgctaatttgcagacatcttttgttcataatgtagcaactcttcagattttacaaactgaccagagccacatagggcagtataattgctctgcttctaatcctcttgggactgcttcatccagtgccaagctcattctctcaggtgagtaactcacagtaccctcttcattgtaaagcagcttcactgctccaggccaccaaaaggctggtgccatttagtttctgctctgtatgtgagagcatggaaataaaaatcaccatgttggtcttcattcttttcagagcatgaagtgcctcctttctttgatctaaagcctgtatcagtagatcttgctcttggagaaagtggtacttttaaatgtcatgtaactgggactgcaccaatcaaaatcacttgggccaaagataaccgagagattcgccctggaggcaactacaagatgactttggtagaaaatactgccactctgacagttctcaaagtaggcaaaggcgatgccgggcagtacacctgctatgcaagcaacatcgctggaaaagactcttgttctgctcatctgggtgtacaaggtacttgttagagtgaaggagcaagatctcttttacattttcagtatcttaaaatataggagggtgggtgtgcttgagagagagctatgtttaggaccagggtctagtgatgaaaatggatcaagtggatcaaggaccttccaaatggagacaagtattttttaattactttaaaaaaaaattttaaaactaggaaaacatggaccaaaagtccattttaagagactaaaaatagagactagagagagataaccgaaactctacaaaattgcaagaaaatcctagtttgaaagacggtatcataggacaaaagcgaagttattgcaaatgacttttttcccacagtacttagtaaatgaatggattttgtccctctaaggcatagcaaagagccaaactatcaagcccttcaaggagaattcagatgagaatgataagttcaacttactttcctccactagccccacttaaataatagtggaggtcaggggctggggagtaagtagatcagtatctgctattatggaaggcagtcatgtgtttctgccacatgtttatcgctgctactgtcagaaattaaatagttcactcaatggactgctagtctagtccattagagtatttttaagggtttttgtagtggtggtttataaatatcttgaaattaaaatataattagatttagcagcccatttgctctatgacatatagctaatcacttttacttccctatgcctgaattttttgcttcagttaatgaggaaatcattactctcacacacttcaaaggaaaattatgaaggttgaggaaatacccatttaacacctaaaagaggaaaatggcattttaaaaatattaagatatctgacccactttgccattccggctcttcatgctatgtaactgatagcattgcagccttaggaaatagttctccactggttcatatacaagacagtaatcaaattctcattccccgtggacctcagagggcttccactgacagatacatgctattatctctgatcttggcactagagaagggactcttttgctggggagaggatggcacaataaagagtaatgtctttttctccttcttttagtaataatacttgatgtggatgcttacaaaaacaagcatattttattttagaaattttctatttaggtttcatttaactcttcttccttgaactgcataaatttgttttccagagctaaagacctctctagcgaagattattttttccacctcatcttgaattatatgcatctgttccatcccttaccctgtgtttttcctcttggttccatagaaccacccaggttcattaagaagctagaaccttcaagaattgtgaaacaggatgaattcacaaggtacgaatgcaaaatcggtgggtctccagaaatcaaagttttatggtataaggacgagactgaaattcaagagagcagtaaattcagaatgtcattcgttgactcggtggctgtgctggaaatgcacaatctcagtgttgaagacagtggagactacacctgtgaggcccacaatgcagcaggcagtgccagcagcagcacatccttaaaagttaaaggtcagcgctctccccacctgtgtgtttttcacattagcctcctctttaattgtcctcttaacttcctgtttgactcttcaacgatgttttaaaatagggaaaggacacaacaaagaattgaaagtgtttttttcactctctatctctctgagggagtggaagattgattcttacttttaactatatacttacagaatacatccgtattttccttttttccaattttagaaccacccattttccgcaaaaagcctcatcctatagagacactgaaaggagctgatgttcaccttgaatgtgagcttcagggcactcccccatttcacgtttcttggtataaagacaagagagaacttaggagcggcaagaagtacaagataatgtctgagaacttccttaccagtatccacatcctgaatgtcgatgctgcagacattggggaatatcagtgtaaagccacaaatgatgtgggaagcgacacttgcgttggttccatcgctctcaaaggttagatggactgcattctcttctgctcactacttcccttctaattgtaatactctgttgccccctccaccccagcccagtcttatcactagcagcctattccactttccctttgtttcctctccaagtccttttctgtttagtctgcttcccttttccaaatcctactgaatatccttttagataatgttgtaattaggttttgattggattaagaaagctggagtagatgagatattcaactttcctactgaatacaaactttaatgtgtccctgctcgcatccaccaaaaatgcctcttaaatggaaataacacattatcactagtttgattcccggcattcatgatttgagcaaaatgctgtcagtctcacaaattttaaaacccaggctttcctcctttttcatcagcaccaccaagatttgtgaagaagctcagtgacatatctactgtcgttggtaaagaagttcagctgcagactaccattgaaggcgctgagcccatttcagtggtgtggttcaaagataagggagaaatcgttagagaaagtgacaacatatggatttcttattcagaaaacattgcaaccttacagttttcaagagtggaaccagccaatgctggaaaatacacttgtcagatcaaaaacgatgctgggatgcaagagtgcttcgccacgctatccgttctcggttagtaaaaagatgatgttatcacagatacaaggcacacactcaccaggatctgtattttctttagtttttcaatttgagcttaaaatatggatatcttttacatttcattccagagcctgcaacaattgtagaaaagccagaatccataaaagttaccacgggagacacctgtaccttggagtgtacagtagctggcacccctgaactcagtactaagtggtttaaggatggaaaagagctaacaagtgacaacaaatacaaaataagcttcttcaacaaagtatctggccttaagatcatcaatgtagcaccgagtgacagtggggtatacagttttgaggtgcagaaccctgttggcaaagacagctgcacagcttcattgcaggtttcaggttggttgatttcttgggcttttccttcatcattataataatgtagttcctgattttcataaatgtatatgggttgttacatcttctataggataacatgagtccgacatcttctgaatcagcaaattcagaggcaataccatctgtagaattagaagaaaaccatgttcaaaagttatatccctttctttttgaggaatttccaaaatgatgataggaatgaaaaatagtccctggataaggttaaagcagtcttcatttatgctgaaataattcaccacataatgcttcacggcaaagagagaacaaaatccctagcaagtcaaccatcacattctgcccactgattctccaagcttttgatagtgtgaacccatagaggagtttttaataccgtcacaaaagagccaaatggatctagggatagtccatcaaaaagacagttctctcttcaagtcattttataattgttgtcctttgttttttttgttttgttttgttttgttttgttttgttttgttttgttttgttttgtatcattcagaccgaaccgttcctccttcattcacaagaaaattgaaagagacaaatggtctatccggctcctcagttgtaatggagtgtaaagtctatgggtcacctccaatctctgtctcctggttccatgaaggaaatgagatcagtagtggaaggaaataccagaccaccctgacagataatacttgtgctttaactgtgaacatgctggaagaatcagacagtggtgactacacatgtatagctactaatatggctggttctgatgaatgtagtgctcctttgactgtgagaggtcagtttacaaaacagtaaaatgaattgcatttcatagtttattaagcatgtttgtcataacaattcacaaatactaaaccttttctgatatgtgcttttgtgtttagaaccaccatcttttgttcagaaacctgatcccatggatgttttaactgggaccaatgtaactttcacaagtatcgtaaaaggaacacctcctttcagtgttagctggttcaaaggtagcagtgaactagtaccaggtgacagatgcaacgtgtctttggaggattcagttgctgaactggagttgttcgatgtagatacatcacaaagtggagaatatacttgcatagttagcaatgaagctggcaaggcttcttgtacaacacatctctacataaaaggtttgtcagactgctcttctagatttatacgattagtaattagatgtgtctttgtctgtatgtatatgtgtttgattttatattttcaatttggtcactttagccccagccaaatttgtgaagaggctgaatgattacagcatagagaaaggaaaacccctgatcctagagggtacattcactggaactcctcccatttcggttacctggaagaaaaatggcataaatgtaactccttctcagaggtgtaatataactacgactgaaaaatcggcaatcctggaaattccaagtagcacagtagaggatgcaggacaatacaactgctacattgaaaatgcctctggaaaagattcctgttcagcacaaatactcatactaggtttgtcatgattgcacatttttatctttgtatacaatcgatgatctggcatgtctccttcatgactgattgattatctctcttggctgcagaaccaccgtattttgtcaagcagttggagccggttaaggtgtctgttggagattctgcctctctacaatgccagcttgctggaacccctgaaattggggtatcctggtataaaggagatacaaaattgagacccactacgacttacaaaatgcattttaggaataatgttgctacactggttttcaaccaggttgatattaatgatagtggagaatatatctgcaaagctgaaaacagcgtgggagaagtttctgcatcaactttccttaccgttcaaggtgattgcaatatttttaaagtgaacgaatttgtgtttcttttgaacaagatttaaaatgtctggggaggcctaatttttaggaaaatctttccaaaggcttaaaattctgcttaagtaatcctatttacagttagtggcttatctttttctatggattctacagagagataatatgactaaatctttaattggaaggattatgcaatcatttgcttctataattaaatcttttttaaaaagtgaccatatatttttaaattccaccccgtaagtatctcatgcaaattgctagaaggcagtctttaaaattacaggaatctgctgcttgcccagagacatgccttcagccaaccaattgctttattggttttcatactgttttgcacctactgtgcattagggttggtctcagagtgatacttttgctccagaaatctatatgcttttctttatctccaagttaattcaagagacattaataattcctgatttttaatagaaattgcatatatacgtgcgtttgtatatatataattgtgagaagagcatttagtaaattaaagtatttgttacttttattctgttcctacagagcaaaaacttccaccatcattttctcgacaattgagagatgttcaagaaacagttggactgccagttgtttttgattgtgccataagtggatcagaacctatctccgtgtcttggtataaagacggcaagccattgaaagacagcccaaatgtacaaacatcatttttagacaatacagccacactcaatatttttaaaactgaccggagccttgcaggccagtattcctgcacagctacaaaccctataggctctgcttcttccagtgccaggctcattctcacaggtttgtggattcttaaactttcatttctagaattaaagtattataatcaaatatgaacttagggagaaatttctatttcagtaaactgacatggtccagatattgagcctgaaaccttgtctttctgctctactattagaggggaagaacccacccttctttgacatccgtcttgcccctgtggatgctgtggtgggagaaagtgctgactttgagtgccacgtcacgggcacacaaccgataaaggtcagctgggccaaagacagcagagaaatacgaagtggcggaaagtaccagattagttatctggaaaacagcgcccacctgacagtcctcaaagtagacaaaggagattctggacaatatacctgctatgctgtgaatgaagtgggaaaagactcttgcacagctcagctgaatataaaaggtatcgtttattttgcaagtggtccaacaaaagtgtaatcattttgtagtatagcctgaaggtgtcgtttttatgatgatgaatgcaatttaggacattttttaaacaaatgaaaagaaaatgtttaagaggaaataagtttatctagagaagaagtcattttttaaatctgtatttctttctttcctcgagacaggatctcattctgtcgcacaggctggagtacagtggcgtgatctcagttcactgcaacctctgcctcctgggttcaagtgattcttgtgcctcagcctcctgagtagctgggattacaggcgcctgccaccatgaccaactaatttttgtattttttggtagaaacggggtttcaccatgttggccaggttggtctggagctcctgacctcaagtgatccacccgccttggcctcccaaagtgctgggattacaggcatgagccaccacacccagcttataatctatatttctaaaactttatatattccctatgatactgagactaccccttctttttacaaatttgtgattctctaaatggccatgagttacttcttatcatccaccttgtaagtcaaagaacagtttagaataagctcgtagaaggaggctgaaatgtttaggaacatactctgatatagtgtatttagttggttagccttgatttttaactaaaaatatgagggttttttttcttgaaaagcttcatattagtaatctgcttctagcttctacttcatatatccttgcaatttcttatagagcggctcatcccaccaagtttcactaaaagactctcagagacagtagaagaaacagaagggaattctttcaaacttgagggacgtgtggctggttcccaacctataactgttgcctggtacaaaaataatatagagatacaaccaacttctaactgtgaaataacattcaagaacaacacgttagtgctgcaagtcagaaaagcaggcatgaacgacgctggtttgtacacatgcaaagtgtccaatgatgcaggctctgctctgtgcacgtcttcaatcgtcatcaaaggtgagttatcctcacagccccaacctgttgtgtttttcttcactgcctgttatatatccatgagcatttcttatgatatcttgaccaagtaagttataacaaatataaatacacattatttaactgtgtatttatcactccatatgtttactaaaaatataaattattgtaatttaattatgtggcttcccgaaggaggtgtcatttaacggactaatatcttaggtttctaaatcatatcctaaaattcctttaggtagttagaagtttcagcgtactctgaaatgtgtgcatatgtgacatatatttttatgaagcacatttgttttgaaatttttttaatgttcatcaccaaatatcacattaacttgactattattgagttatatattatatcacagtctgaaactttctcctttccaagtgtatttctaaaggattattgtttaatgtatattgcccaaagcgtttgacctgcaaacaaatattaatcccagacaaaagggtaacatttgcccaaaaagaaaaataatgggtagaaaacattgcatatcattatggaagacatatttaaatacacaatcatcgcttgagaaaatgaaatagaccatgttgtttaaggatatctttatctgtttctcttcactgtaatggcttccggtaattacaacatagcttcatcaaaatcacattaaaaactaacctcctagagcagcctggaattaattaccaactcttatgatctggttagttatctcacagtgcacaggtagtaagttattattaataggctgatatcactaataagtaaatatcactgagttgtcttaaaattccaatttcaccactcattttgtggaatttagatacatttagttttaaaacccattttataaaacgaaaaatatatacttagcagtggcttatattcatgatttacactcatgatggttttaccatgggcagataaatgctttctatagaattctgaagctatttataaaatgtttttaaaggatagacatcagaagttttaatctttgcaataacaaaaaaaatggccttattctttctaggtacaggtctcagaaccattgaacaaaatcattacataatactgagttgtacattgccttcctatcatgttactcatcaatgtcttcatcattggtcttcagttaaacactgagcttcaactcctaattcccttgggctaagattggattttaaatgctactgtggctgcatttaatagctaaagatgaacatcagagaaaatcacatataaatatgtgggctcatgtattactcaaatgctagctttctttcctagagggtagcaatcattgccgctggagataagcagaattcccaaataagcccttcattttcagggttcagcaaaaacaccgctgtacacaggtttgagagaattaatagtgtgctatatggcaaagaagttcatagtaactgccaatgtctgcagtgcttagtaaggacacagaggctggggcaatttgtgggcagcatgtgatgtgttctttgcttgtttttaaacctttatctttttaaaaaatccaacaaatttaaactattgtctttagagaggaataaaccaggcacataattctgtcctactacagcaacagtgttacctgttagaggccagtttttctctttatttgtttctcttgtggaatttaatacttttttgcctttatgttcctcatgaaaataccttttcaattccagaacctaagaagccacctgtatttgatcagcaccttactccagtaacagtgagtgaaggagaatacgtgcagctcagctgccatgtccagggatctgagccaattaggatccagtggttgaaggctggcagggaaataaagccttcagacagatgcagcttcagctttgctagtgggacagctgtactggaactcagagatgtggctaaagcagattcgggagattatgtgtgtaaagcttcaaatgtggctggaagtgacactaccaaatcaaaagtgaccattaaaggtacagacacctcaaaagtattatgcagctcaagccagcaaccactcatgtttatttgcttattatgatttccctagaaatggaattagatttttagaaatatcagttgttgctcatctgcaatttgtaggctccttattataattgaaatattaggtaatttaacagaaataatgtcaatacaaagtatctgaaattactacaagtttaccaccctatttcttgaacttcttttcaccatatccattaagatgtaattaacgcagttccaaaaatgatggtataataatgcgatagaaagtaggctgttatgatacacctggaaaaaataaaaccaagtctaaaaatattgacactactaatatgattatagttcaacctttgatagctatcattagcataaatgtctgagaagctgctttatcttctgtaacccacccttacatagaaagagaattctgcagtacttacttatcaaactgccaacctcctaaggcttattttacaaagggggatatgtattgtaattctgaggtgattgtagtaacaaaacatgtaaatgttttttcagacaaaccagctgtggccccagcaaccaagaaagctgcggtagatggaagactcttttttgtgtcagaacctcagagtatcagagtcgtagaaagtaagtgcacttcatgagaagtacatcttcatctatcttataccttttacttatgatttaattttggaagaactgattttagaaaattaaatttttattcacttgttttcattattccttagaaaccactgcgaccttcattgcaaaagttggaggtgacccaatcccaaatgttaaatggacaaaagggaagtggagacagctgaaccaaggaggtcgtgttttcatccaccaaaaaggcgatgaagcaaaactggagattagggacaccacaaaaactgattctgggttataccgatgcgtggcatttaacgaacatggtgaaattgaaagtaatgttaacttacaggtggatgaaaggaagaaacaagagaaaattgaaggcgatcttagagcaatgctgaaaaagtgagttcaataaaaaccacaaatcgtacaatcagccctccatataagtgggttccgcatccacagtcaaccagccccagtggaaagtattaaagaacaaaaaatttaaaaatacaaataaacaatacagcataacaaccatttacacagcacttacattgtattagatattataagtaatctagagatgaagcatatgggaggatgtgcataggttacatgcaaatactatgccattttgcatcagggacttgagcatctggccacaggcctcctgaagccaatctcccaggcatagagagggatgactgtaatgtcccattcacaaaaagaatctctcaagagtcatgggccatccatctcaagattcagattgttaaagaacataggcatatagacattttcacagaagcagataagcaaatacacaacatctgggtgttcttgtttcattagaatcaatttccgaatttaagagaaagttttaagaatgaggtgaatgtctattaagatttttaaacaaaaagaaatggcctataaagaaaccccagtattgtctgtgcctaggtatgaaactttttttctatatatgatttcttatgttatgaatggttctctaaaacaactgttttaaacattttccataattatcattcatttcaatatggttcatttttcaacataattattaaattaaatccacactcaatttccacacatcgtttccgtgatatgtatactattctattattaaagttttccattgctattattattttttctgatattataattcattagctaggctctttggttataaagtttacagaaatacttctattatcctttcccttcttaaaattttcattcctacatctatattttattacaatggtcctaatccatctgatcttaatcgactccatctccaaacccacatttttaaattgtttcacagctaacatggtaaaattaatatttattgaataaagaacatagaaaaccttaatgaagtatataatctttgaatgatgatagacaattaaaaataagtagaatacaggtgatttatccttactttttaaattttatttaggactccaatcttaaagaaaggagctggagaagaagaggaaattgatatcatggaacttctcaaaaatgttgatcctaaagaatatgaaaaatatgcccgcatgtatggaatcactgacttccgaggtcttcttcaagcatttgaactgctcaagcaaagccaagaagaagagacacatagactggtatgctccttcatatatagcatcatgctaaaaaagtcacatttaaaacatctcacatattccctttgaattaccagaatcctatagttatatgacgtcatttaatatgacctaaccagcatccagaatggaagctgaatatagtcatgcgtcctctaaatcaaattttgtttcatctgtaatgcctatcatttttgttcttctcaggaaattgaggaaatagagaggtcagagagggacgaaaaggaatttgaggaacttgtatcatttattcagcaaagactgtcacagacagaggtaaaaagaattatgttgataataaaatgaacaagttattattgagtattattataagggaaggagtaacaaatgtgttttaattctttattctcctagcctgtcactctgatcaaggacattgaaaatcagacagttttgaaagataatgatgctgtctttgaaatcgacattaaaattaattatccagaaatcaagctttcatggtacaaaggaactgaaaaactggaacccagtgataaatttgaaataagcattgatggtgaccgacatacactcagagtcaaaaactgtcaacttaaagaccagggcaattatcgattggtttgtggtccacacatcgctagcgctaaactaactgtaattggtaagttagaaaaggcttatgaaatacttgtgagatttaaattactgttgagcacatctgcgtgtgatattgaacaaaatgcgtgttgtatcacatgaacagagcctgcatgggaacggcatcttcaggatgtgactctgaaagaaggccagacttgcaccatgacatgccaattttctgtaccaaatgtaaaatctgaatggttcagaaatggcagaatccttaaaccccaaggtagacataaaacagaagtggaacacaaagtccataaattgaccattgcagatgttcgagcagaagaccagggtcagtacacctgcaaatatgaagaccttgaaacttcagcagaactcagaatcgaaggtgcgtgaaacactatggagtccttgtgggtacagcataggtcaatggcaaatgttgtgcaggacccctgcaaccctacctgtagacacacaccaaagtggtcatgtgttcttatttcccaacacacgttctcatagtattcatctcaaagttcatacaaaagcacaagggaaatattcaaatgagtgtcaattcttttgcatcgttcttttagattttaatctagtctaagacataatctttaacagttatttctgtctaaagtctaaatttcatgattctcatatctaggattgtagaaagaaagctaggaaaggacaagatctcatagatgtaaatctggaggatcttggctaggaattgatattttgtttataggacttagtctgactttctctgtacaaaattatatagataacataaacatgtcatgtgcaattagcaactatttttcaaaaatatttatttcattttcagatcatgtttcaaccttctgaatctctgaaattaagtgaaatctcagaatttaggagtaacaacattcatttcctaattgattatacacattttccaaagacaccctcaaactgtattgagaaaaattttggctatgataatagcatctgctttcagctattggtgcccattcgtagttgctgaaacacaaatatatgacattggatttacataagcatgtcaacttttctgacttaccttacaatgaatatcagtgactggttgtattttaaatggttttcaaattaaagggccagctgcaagtactaattattttttaaataattgatatttttaatataattctttagtaaatagagctcaccagagtactgtgatttctaagactttatggtactgttatacatataagaccctcccctccagcctcttctagaaagcactcctgccatccacacacatactttgtttgtgcccatatgtacttagcagatttctgaactctaaaatttttctttttgaaatttagaagtgcagatttccgattgcgtttgaaattattttacaggaaaagttatacatattagataaacaattatagatcctgaatagcaaaaattattttactgaggcaagaaagaatttcacagaggaataagttgtagagtacaatcaagtttgtgttccctaacacttttaaaatttaatttgactttgggtcattagctctctttagtatgttctttatataaatattttaagaactcacaataatttctttacactttgctacattcgaccagcatgaatacacttaagaattgggatacttttttgttagtgatgcaaagaagagtgcatttcttctcattttggatttttgaacttttcttgctattttataactgggtacaaagatggagattttaagtatctgaggtaaaagcaagtaaaagaaattcctctctatataatctaactttgaaccctctttgtacttaaacagctgaaccaattcagtttacaaagcgcatacagaacatcgtggtgagtgagcatcagtctgccacctttgagtgtgaagtgtcctttgatgatgccattgtaacatggtacaaaggaccaacagaactgacagagagccagaaatacaacttcaggaatgatggccgctgccattatatgaccatccacaatgtgaccccagacgatgaaggtgatttcattgacagttttccagtgaatgtataatttaagcctcgtctgttttctgtatttctaccctgtatgcgctcatgctctcattctatctagaatgcttttttagaaaagacaagtgtaaataaacacatacgtatattgaagtaaagaagtgttatttgcaacatatcagaaaacaaaagttggatgatttttcaccctaggtgtctactcggtcatcgctcggctggagccaagaggtgaagcaagaagcacggcagagctgtacctaacgacgaaaggtgaggtagcgccatcagaaagccaccctgccatcttcgaaacacgtagcctacctataccattctgaacacaaaaatatcattttttttttattttgcagaaatcaaacttgagctgaagcctcctggtaagttgttttgtaaaaatcaatccttgcttacaataaatttggcataattttgtaaatcacagaagccaaactaaaatgtataagatatctttctcttttgggtaaaatatttttcaataaaactgttatgcagtagaattactttcagtcaaataataaaatgttaaaccttgtgagtctggcaaattagagataataaggtctcactcagctgatgctagaatcatgttaaatagaatagccacagaatgaaacaaattttgacagtgaacaaaacttacctgcgtggttgcatacaaaagaatactaatattattttgtctgtatattagattctgccattagatatgcctgacatatctcaggatctaataaatcaaacacaccttagttttctaataaatagcttgttctcagtctctctatgcttattacatgtccctttccagatattcctgactccagagttccaatcccaaccatgcctatcagagcagtgccaccagaaggtaagacccagaacctcaacatctgagcttggagcagcaatattctagcactaggaatctgtacgaaattttataccagcgaccaaactgcagcagagtcagaacaaacccttccatgtcatattcttcagtgagcaattagaaattaaagtaaaaaaaaaaaagtagttccagttataaataaatgctacttttatttgttccgactgatgaattcgtactataatacctatgaagtactgaaagaaatgcatgagacttttcattatattttacgcaaaataagaaactaaaacatgttactaacggcatttattttcttcagaaatccctcctgtggttgctcctcctatcccccttttgctaccaacacccgaagaaaagaaaccaccaccaaaacgtattgaaggtattatacctcatctacctagatgtcgaaataagaatttcactctgctgacccgaaaaatgttgcttaatacaacgcattggccctctagtggtcaagaggtggaattgcctttcaaaatgtaaattactttctcaaagtattagctaactaaatgtgtaagttatgtgcttaaaactctgaaaatcatcaaacaaaatactattttggtattaaaatattttattttaatgaaattactgaaacattaatagagaactaatttaatgtttcatattttcctaactactatgtataacaaaaagaataatggaaccaatttctagtgcagcttatagaaataaaccatagtagtttacagccaaattgcaaattatagcttgtggcttttctcaatttatagtattaactactcttaaaaatttactattttgtcacataaaatatgatttagaatacttatgaaatatttgacttcttttgtacctaaggcatgatctcaccaataaagagatcttaagtgttccaaggaattgctcctctcaaatactcagtagagaagttgtagtatttgtgtcccaaagcttctcaactaaattagacaacagatttcctgggactttctggagttatagggagttcagaaatgctgtcagaattctcccagcatggtcagaaaaaattctgtatgtcaaaatcacatttttctatagctaagtcactactactgtattagattcaaggggtggaaatggtaggcccttaacacccgctataattggcattaaacgcttgacctatttttcagccagccttagaggaaattcaattagaaacttccaattttgtgactaatgcaacctcattaacaaagagaagcatttttatgattcatacgaacataagcattttatctagctgtgagaacagagaggaacaagaatcaacaatcataaattggatttccatttctatttctgttgtcaaaaataataacttatgttaatgaatgatttgttctttgactggtagtatcaacatggctaagtttggtactcactgtgaaacttgagaagttaaataatgttttaaaaattaaaaaagaggcctggcgcggtggctcacgcttgtaatcccagcactttgggaggccgaggtgggcggatcacgaggtcaggagatcgagaccacgatgaaaccgcgtctctactaaaaatacaaaaaattagccgggcgtggtggtgggcacctgtagtcccagctactcagagaggctgaggcaggagaatggcgtgaacccgggaggcggagcttgcaatgagccgagatcgagccactgcactccagcctgggtgacagagtgagactccgtctcaaaaaaaaaaaaaaaaaaaattaaaaaagagtgggctgggcgcggtggctcacgcctgtaatcccagcactttgggaggccgaggcgggcggatcacaaggtcaggagatcgagaccatcttggctaacacggtgaaaccccgtctctactaaaaatacaaaaaattagccgggcgcggtggcgggcgcctgtagtcccagctactcgggaggctgaggcaggagaatggtgtggacctgggaggcggagcttgcagtgagccgagattgcgccactgcaatccggcctgggctaaacagcgggactccgtctcaaaaaaaaaaaaaaaaaaaaaaaagagtgttatttattcatgaatacaaaaggccataatcaagtatgattaggaaccgtggttaaggtataacagctgcacaacaaaggactttaaacccacttgttactcttcctcctaacatatttgtgttcgtccctaaggatgaagcaaagatgaaaatgtgtactttactatttatgatatcacttagattcacactccatgttctgaaaactttaactctcagcagacataaaatcagtgaagatgtaagatcacagtacattttctatatccctccaaaacaatttttttgcatctagtcctagatctttccaaaacaaatatcttgtagtaatatgcagaatctcgctactatcaacatatggaaaaataaaatatttcaataaaattcctagtttcctgaaagcattttagttacttacaccagaaatattttttctttttttttctttttttttttttttagttaccaaaaaggctgtgaagaaagatgccaaaaaagttgttgcaaagcccaaagagatgacaccacgtgaaggtattataattaatcaaaaagcagtcttaacacttttttcttggccaaaacttttaaattctaaacagtggagggtgaaggaagggtaagagtttgcaatcacaaaatggtacctctcccttcactcactttcgccctcgtctttgactcagtcctcactctctcaactccttttttcccccttttctctttcctgtcctcctgagcccctgggaaccaatgacaacaccagtgtattctggttatttctggatgaaaatttaaagaaggtcttgcccagaaatccaacagctattctttttttttcttttttattttattgtaaattgactatttactattgtgtatatatttatggggtacaaagtgatgttatgatctgtgaatacaatatggaataattaaatcaagccaattaacatatccatcacctcaaatacttaacatttttgtggtgagaatatttgaaatttactcttagcgattttgaaatgtacagtacactattattaactatattcaccactctgtgcaacagatctcaagaaaagccatgtttcttctgtctaactaagattttgtaccctttgaccaacatttccccattccctcaaatccccagcctctgtaaccatcattctactctttatgaattcaacttttttagttccacatctaagtgagaacttacagtctttgtctttctgtgcctggcttatttcacttagcataatctccagttctatccatgttgtcacaaatgacaaaattccctttttttataaggctgaatagtattccattgtgtatttatataccaccttttccttatgtattcatccattgatggacacttagggtgtttccataacttggtctttgtgaataatgctgcaatgaacatggaagtacccaacagctggtcttgataaagtcacatcaatgtaagatcaagggttgctgctaattttaagaggttgctgcaacccacctcagtatctttcctgatttaggtgatctaaatatcaatatttgaagaaaaaatactttatgaaggaggatcaattcaaatcactttaactttcaatatatcctcgaagatttttaggaaaacagttggataactaaatttaaacaaatagttttaactcatttgactaagattagagtacagcaacctccataaagaaggaaaatatggaaacacaaggcatcattcatcattcagacttttctgagtggtcatttgtgaaacatcatggaataagaggacactcaaaaagcatggatatttcatgaacttcatagttaataattgaaaaagtctaatgtgttatttttagcattggacatattaaacattctcttcatgcttaatgttaacttattagaaatcaatctaaactagaaccaatttaaatgatcttaaatcaatctaaactagaatcaaactttggccttttgcatgtttgatttttgttaatatggccttgcatagcatttctaatgagctagatttggaaattatagaagcattattatgattcctggaagggctggtgtatgagtagtagtcatagctcctacaaacaactaacaatgatgtggaggattagtaaacattaataataatgtaatctaaaaataaacacacatttttatgtttttaaactcccagagattgtcaagaagcctccacctcctactaccttaattccagcaaaaggtaaataaagataaattatttttattctgtttattcctgagatttgcacttctgctaactattcttattttaaatattaggcttccaacttattgaaagttgtggagtctcctctgctgtgttaaatttagcattagaaatgatggctatttcatattgcccctttcccaggaaaacaaacccaggcagatgtttatgctgcctctgtgcaatggtctcagagaaagaagaagtgagggctagaaaggaagggccattccttatttttttattgtagttaacacaaatgttaagagtcatataaataatgagagcccttaagaactttaaaaatctgttatctaaaagtacctaattaacttggttacataattttaaatgttgtttttatgaaactgactaagggatcatatgcaatagtcaaaaacctaggtttaaaattagaaatgtttttgaaataataatcagaactttttaaaaaggttaactgtataaatatgaaatataaattccatgaacttatcgaatattaaaactattccactggaagaaactaggggttctgcaaactggagctctcatggaataatagaaggtgtgtccatttgataatatttattgaatccattttttcatactggaaaaatcctcaaatcaagagtagaatgcatcttgatactctactatgttccatagtcaaaaatttaaatggaaccaatacaaaaaaaaaaaacaaattatcaataaaatagatctgaaatactgatgttgtttaactaggtagatttttgtttagtgaagcagttggatggatagaattaatatgctaatagtatctttatctattttagctcctgaaatcattgatgtatcctctaaagctgaagaagtaaaaataatgactataaccagaaagaaagaggttcagaaagaaaaagaagctgtgtatgagaaaaagcaagcagtccacaaggagaagagagtcttcattgaatctttcgaagaaccttatgacgaactggaggtagaaccatacacagagccatttgaacaaccttattatgaagaaccagatgaagactatgaagagattaaggtagaagctaaaaaagaagttcacgaggaatgggaagaagattttgaagaagggcaagaatactatgaaagggaagaaggctatgacgaaggggaggaagagtgggaagaggcttaccaagaaagggaagtaattcaagttcaaaaggaggtctatgaaggtatgtataaactgaatgacttgtttccctcttttcttcatttttgctcagttcattaaattttcaatgctatgaacctgatttgcagtttatgtgaaatagttaaaatgatcttagatttttttaaggttagaaatcttttaaaagttattttcctcagagttactttcatgctttgacattacaagctaaatcatttagtcttattactaacactaaattccaagtgctaatttctaatgcagaagttcaagttttacttttactgccttgttgcatctctgcttgatcctgcttcaaatcctagcactaagaattgtgttggtaataacgatcccaaatataatacttcacacgattatatattatccttaccttatctcatttgcaattaacaacctaagagaacttacctatttaagcatcccttcttattcctgtgtttttatttcagaatcacatgagagaaaagttccagccaaagtacctgaaaagaaagcaccaccacctcctaaaggtaagtaattagaaatatttaaatagactagagcatcaacatcattatcatggcttgtttggcagcaatgtataaatcagcagttcaatccaataggcacaacttcttctctaagctttattgtgaatgatttttttttcttaaaatttctatctaattgatttcattaaaaaatcaaaagatgataaaaattgtaatggtaaacttaaatataaccaaaatatgttaagtacagaaacttgtacccagagttcaaagttgtgcgtaaaggtcaaagaaaaaaaaaccgaactcatctctctctttaaaaaatgatacatgtatctgcatatacacttataggtgtgtataaacacatatacacagagagagagagatagagagagagagaattttaataggaattctaaaagtactgcaatttctctaaaatgcttgcagttataaagaagccagtaattgaaaaaattgaaaagacttctcgaagaatggaggaagaaaaagttcaagtcaccaaaggtattatttaaaacattcctagcacccatgtacacaagtaatatgtttactgatctatactcacattagttatttatataatcaaatacttttaaattttgtgcaaagcaatattcttcaaaatacaaatatatttgtacatatttttaaagtacctgaagtttcaaagaagattgttccacaaaaaccttcccggactccagtacaggaagaagttattgaagtgaaaggtatacatctttgtgtttcagctacaagttcaaaatttttttatttatgtgtatggacatgtgtacatatattgctaagtaactcacaaatctgaaacgaccaaaaacagcacatttttacataatacaaattttatgttgagttgcacatatgtttaatttaaatagtaacattatctactttgtttctagttctgcttaaaaattacatttttttattataaagaaggtttgtgtttaattagtagtttgctaacttcactatgcaatgcattccattgcatataatattccctgtcctcttatttatagaaatagaccctaacagatttggaaaagcacaacattgtgtgtgaagaagttgtgtctatttgattctcatttaagaatgtttgatgaaggctgcatgcattgtttgtccctatagatcaaaacatgatttgttttcttgtcaatactgaatttgttctcaagctaccatattaacccactcattctgtgtctaaatacttgagtataaaatccatgtgtttgatctgatgtcttgtactaaaaaaaaggaatactaatgtgaaatactctctttaaagtaccagctgtgcatacaaagaagatggttatttcagaagaaaagatgttctttgcttctcacacagaggaggaggtgtcagtcacaggtataaggcaaactggaatgtgggggctcaaatggaagggttttaggcagatttttatccctcttgttgtctaatttgtgatcgtgtagacatttctgtctccttgtaaattctgtcatctttttcatttcatgtttgtctctgttttcatttttattttaatgttctttgtaaattacaattaccacccacaacatggcatatcagtaattaaaatgtacatttttttaagtccccgaggtacaaaaggaaattgttactgaagagaaaattcacgttgccgtttccaaaagggttgaaccaccacctaaaggtattagtaattcattctaagtttaaactcttttaataaaaattagtacaaattccatagtaaaacatttatgttagtattaaataatagatttagtcacagtgtgcatacctatagccactatgtacaaaggatgtgatgggggacgggaagaaccatgaggaaggcacagggggaaaaaagtgaaaattatgggaggctccattccctgcttcagagagtttgcaatctcgtaacctgttacttggaaatacagtgtcctggagccagttcatgctagctcaccagagcctatggttacattttcaggaattttgccagtcagtagtttaacaccaccattattaaaaattagattatgtaaatttacagtccaataaagtatatttttaaatattaataaatactcaaaactcctattttactgcattttgttcttatctgtgtttctgagattgtttccatctttgtgtctgtgtggtggaaatgccatataatgtactactgcacatctctttccaactccaggacaatgacatcaccttgacagccagggtgggagggagtgtttataccaccttggaaatcggaaatctgcaagcactatagatcaaggctccaccccctccatcccacccaaattgttaaacatttaagacacaaaaaaatctaatgcaattgtatttatgaaactgctttataaaagtaaaggttacaaaaaaaaaaactaacttcatagttatcgatgttcataaaaagctggtttctgaggaactgacacaggcacctccgagggaggattgctcctacctgttcctgacaaagtagaggcttctgcagttaaaggtgacagcagtcacattttctaattagccattcagccatcttcatttactctcatttctaaagcataattttcttgcattcagttggtataaaaagggaatctctatttaattctaagtcttacaacaacatatgccttgtcaaatgcacactttctcaaaaatggcacttttcttttaaagtccctgagctacctgagaaaccagctccagaagaagtggcccctgttcctatccctaaaaaagtggagcccccagcaccaaaaggtagaataatatttgtgaaaaaaataattcttagcatccatcttgtatctttttctataagatctgtgtattaacaaaatagcatctgtaaaccatctataatatatttaattctgtgtatattgatttcatttatttgtggtgatgtgttatacaagtattggtaacatttctaaactccagatcacgctaactgggtctttgtctgcttgtgtaatgtatgtaatgtctatatggtgttgaggtatttagctttcatttctaccacaagtaggcatatttaaattacttcctaattctcacactgttagtgaagatttatgctttaatgtaatcttagatgtctcagaaggtgactagaatattccacattatttcaacaattgtatctttaaagttcctgaggttcccaagaaacccgtgccagaggagaaaaagccagttcctgtgcctaagaaggaacctgctgctcccccaaaaggtacgccagagccaatgatggggagactctttgctccaagtgccagccttttgctttctacgatcttcatatgtactatgctgcctttgtcttttgtctcttttacattcttcttgtgtttttactgtttgtcagcttccgtgccatgctcttgacatactttatttattatactgaatattcctaagacatcaccaaaaagtattgttaaaggaagtaactatgtcaaactgctatcttacatttttaatatcttccctcttttagagaaagaggaaatgtttgtgaaacttgttttctactgacatgtttctaggaaaaaacctttcatccttcataaatgtaactttttcttaataaaagcagtttcatgcattatgaagaggtggagacaggcaatgacaactggagagtgtctggcagaactgaatgttaattacataaagacgtacatagtaccacgcttcttaaaagtcaatagtggcgagtcttcaatagtggggaacatacagattttttgaagtttactttcaccattttcttgagaccttaactgagcttcagtatttgccataaatgtttccgttatctaattagctagtcaaagtacctttcacagaggtatgtttgaatgaaaatgtgctgctgtggtatatcacaaatcccttgctttggtttgtttgggatttttttggcgataaaaggcactatcttattgaagcactgaagctacaattgcacgcatccattcagttatagagagactcagcaagaattcaacattatccaatttaggagaaaccagacctaactaaaatagtacattttgaatagtgttcccttggcctgactttgcaatgtttctattttcttcctgaatcaaatatgcttctctctttctcaaactcttggctctttcaaaattcttttgattatctaaccattaaatacaaaggtcatgttagtaaaaccaatactaatactaaagctacttgagacagatcgtcttagataaattaaatccattgttattatgtactacatttccccatacaaagcataaagaaccttttctatatactatctgaacattcttgactgtttgtgtaatcactaattcgttttcagcaaagtcatatatgtcttctaaaggagacacagaggcatctctcatttactcataaaaacaaatacacatagtataatagcacgtatatatatataaatactgcatgtatatatagcataacatatacatatataaattaacagctatataattgcaccaaaatattacaaatgcacgtgcagaggtgcagggattcacaaaagctgccaatattgtatttaaaatgagaacaattattgccaataatgcatgctgttaaaattcatcttccaattaaaaagtcaacattatccattcttagaatagataaatcaaatacactgtaaacattttttaggttgaaaaccctgttcaaaactctagagccccttagaaaaaaaaagcacaaatacacatacccacaaaattctgcacacaaagctctgtaaagtcattaacacatgggtatcagattgagagacctactctagagtgtttcctgagttttgaattcactacaggcacaccccccaaaaatgagaggagaaatgtggggaagagaagtaagttacacatattcaactattctaagacttcttagtcttagtctaaaatagtcttagataaactaaagccattgttattaagtactccatttctcaatacaaagcgtaaagaagttttctatataccatatccacattcttgattgtttgtgtcatcactaatttgtttttagcaaggtcatacaatatataaaggatgaattctgtgcacaactttgttacataactcatttttgcctaaatgcctctaaaacattatttgtgatatttatcacattgtgatccttggaatagtatagttagtttaattttctggataattttgctgatgcatagataatccataacaacattaatgtactacataaagatttgtgcatgtgcctatgttctttcataaaagtgatatatgtctgaactaacattgtgtttcaaaaactttaagtcccagaggtgccaaagaaacctgtccctgaagaaaagattcccgttcctgttgcaaagaaaaaggaagctcccccagctaaaggtacagtggctttcgacgtaaagccctatcttttatctttgatacaaaatatgttgtgtttaattatctgttcattgagttagtttaattctaaatgaatgttttgtggtgagaactgaacaaaagtgtctgtccacccgtctgctttcttaaaaaaaataactgtgcatagctactttagaaaatataaagtcaattctaaaaatgtctcttcaagttcctgaagtacagaagagagttgtgacagaagaaaaaataaccattgtaactcaaagagaggaatctccaccaccagcaggtacttaatcccatctccatgaaataaccttgtctttccttcaagcctctttaattgcatgtcttctttaattgccacttctatgttgctcatttatttggcctttttgacaaattttaaaattcaatactatcctttaagtgccagaaataccaaagaagaaagttcctgaagaaaggaaacctgttcctcggaaggaggaagaagttccaccaccaccaaaaggtattgtttctccatcttcccaagaactgtctttatgttccagtgattttgttagttttgtgatatgagtgcactgtgggtgtatttctttgttttgcattgggcttcaatgagatcacattaaatttctaaaagtgcataatgtctctaaagtgccagctctgcctaagaaacccgtcccagaggagaaagttgcagtgccagttcctgtcgctaagaaagctcctcctccccgaggtaggatttgcctcaatcctctgacaaaaaaaaaaaaaaaaaaaaaaaatcttcgagtgtgttaaattcttgctttttccatctggtctgtgcttatactgatccattgtctcacttgcagtgaaacttttgtgtttatgtccttgtgatatgtaacttgttttcccattttgctagtcaaagtggtgtactgtgcaactcttccccaaattctagaaagtgagaattgttaaaattcttgattttaaacttcaactttaacactttcttaaagctgaagtctctaagaaaactgttgtagaagaaaagagatttgttgctgaagaaaaactatccttcgcagttcctcaaagagtggaagtcacgcggcacgaaggtatataatcggaagtcaggggataaatgagtttgtgtgtgtttcctcaaagtctcttcttcttccacatgtgattgtttactttagaacatgtcctcatcagttatttctccttatgttggtattagaatgtgtctaccttttgtagccttctgggactgagtcttttgtgtctatgttggccttgaatcattcgaaggaagtggatgagtcccgaaaatgttataattttgaaagtggccacacttggacataactcaagtatcattctcagtcttgggctgtacttgccctcatcttaaattagcttcctccttcttatagtgaggaagtaccatgaagctatgtcctaagcagatagaagaacagttatccatctgtagtgaccacatggctgtatatacatctgtatctcagcaggctgaatttaaatgaaaccttatcttttaaagtatctgcagaggaggaatggagttactcagaagaggaggaaggtgtgtccatttcagtttatagagaagaagaaagagaggaggaggaagaagcagaggttacagaatatgaaggtaaacaatgcaaataagctagagatgatctggggttttgatgaggtgttttctttcacaaattgtctacagaccaatgaaaagagacagaaaaaagtgacacaaattcagtgaacatctaccagtctcattaaatgaatattttgatcaaaacacaagattcaggaggattatactagattagagaaatccagtgtatttcttctgcatcccttcttacttgcctacatagaataaaagaggcttcatatttatatataattaatcagggcaggtatctccatatacatatatcctttcattaaacaggacttggcttcagcatggtgggctggcataagctttaccttagtagcctaatgcctaattggtgtttctcaaacattgcttgtaccacaatccacagacagaaatatattttatattataatcctttaatttttttattctaggcatttaaaaaatacaagttataatccattaagtcaattgcagaagtcactataatgtcttaaaatgttttaaaatgagcaagaaaatatattacctcattacattccaggagtcaatgccatatttgtgagtctgaagccctgaacacataaggctttcctgtattttacatatggagaaaaccattgtgttatatatgggatcagactgacttgttactcagatcttttcatacctataatgctaattatctatagtttcttaaggacagaaccaacaaactattccattgggatattttttcaatgaattaaggcagcaccaggtttccaactaaaatccagcattctggctagagccatgtggccaaaagaactttcctaagaaagttcctaaggtctgcttttaaagagaaatcaataagctccttaaccaaactaactctctccccagtgagaagatgagtagaattgaagtacatttagatgtcccaagtatctgtttttatctgtctaataaaagatggcacaccatgccccttttttcacttggaacaaaagcccatgtaaaaatccaaggtgccatagtcttagtggaatgccttggaataggccaagatgggacatgactcccaggaggaaatccattaactctgttgtgcttcctggaagaggccatgatggtggacataagtcaggaagctggtagatttgaagacgactccatcttttctaaaagtgtttgtaaaaccaaacatagtctgatttcaacttttgacactataaacttcctgtagtactccagactctagttaaaaggagaaacactgtgattatttttatgttctcattatgccccaaagatgggtggcttgttaggtttactttcagcgtaaggagcagatatgtttttaaccagacacttctattccttatttaactttgaccaggcatggtggctcatgcctataatcccagtgctttgggaggctgagaagggaggattgcttgagcacaggagttcaagaccagcctatgcaacatagcaagccccattctacaaaaattaaaaaaacagctaggcatggtggcatgcacctctagtcccagctactcaggaggctgatgcaggaggatcatttgaacccaggagttcgaggttacagtgagctgtgattacaccactgcattttagcctgggcaacaaagcaagacattgtcttaaaaaaaaattaaaactggccgggcgcggtggctcacgcctgtaatcccaggactttgggaggccgaggcgggtggatcacgaggtcaggagatcgagaccatcccggctaaaacggtgaaaccccgtctctactaaaaatacaaaaaattagccgggcgtagtggcgggcgcctgtagtcccagctacttgggaggctgaggcaggagaatggcgtgaacccgggaggcggagcttgcagtgagccgagatcccgccactgcactccagcctgggcgacagagcgagactccgtctcaaaaaaaaaaaaaaaaaaaaaaaaaaaattaaaactgtatacacttaggctcaaaaatcatgtgaagcctcctgcctcttctaccatacctgccccacaaaactggcggggaaaacaatatggaatattatcttacaattcacttaaatcctcaagtatgtttctgccctgtggccttcaaatctacagtgctctgctatttgtgaaactcatcttcaaattcttctgttcttattaactcagctattataatcgtttcttgtcccgtacttgtcctgtcgttgctgtggatataagcattattatctgtatgacacatttgaaaattaagttaatgaaacctatttcccatttcccatactcttcattaacgcatgtgctttgattaaaatgctctttgagtattttaaataggaacaagcaggggtttggcaagggttaaacttttgctattttgattactctttgaagtgataaattaaagctaaaaataaacatgaaaaacactgtaatttatcttctttaaaactgctgtctttaaagtgatggaagagcctgaggaatatgttgtggaagaaaagctgcacattatttctaagagagtggaagctgagccagctgaaggtatgctgactctttaattagttttatccctatgttagcttgtctccttctttatgtttccttatagctaatttgtcatccatattgcaaatattgataaatatcatgtctaataaaaagatcccttacacttttatcgaaaagaaatctagacatttctacaaacatattttataatcttttcaagtgacagagaggcaggagaagaaaattgtactgaaaccaaaaattcctgctaaaatagaggagcctccaccggctaaaggtatgatttctttcaaagaaatgcaacactatttattttaatgtatataataataccttcacatttgcataactgtcttatgcataacaatttgcataactgtctacgttttgtcagaacacatgtatgaacgtatttactgagtatagtcattaacgtttgtatatatgtgcaatcttttcaaaaagtgaatgctaagccccacaactgtgtcacttcatatgtaaggcaaactcatattcttaaacctaatctttctaaagttcctgaagcacctaagaaaattgtgccagaaaagaaagttcctgctccagttcctaaaaaggaaaaggtgcccccacctaaaggtatattggattttattttattctcaagactgtctttttttaatcttaaattgatacattcttcagattttttaaacattaaccagaaaataagtgtgcctgtgtttagtgttttccatatcgtatgtttgatggtattgcctggtatcttttaagtgccagaagagccaaagaaaccagttccagaaaaaaaggttcctccaaaagtcattaagatggaagaacctctcccagccaaaggtaaacaaacctccccagcagaaaaactaggaacatatggcttgtctttctttctctctgctgctgttctttgggtcatactgtttatatgttggtgggtgacaatggtgtctttgggtagagtattacttgtgatgtttttgtgtgtgtgccttgtaaattcttctattctaaaatcacagtactttctggctagtatattttttacgtccactttgatataactccctaatcctaaaattatcttttaagtgactgagaggcacatgcaaattacccaggaagaaaaagttcttgttgctgtaactaaaaaagaggcgcctccaaaagcaagaggtacatccgcccttccattatgcacaatattgtacttgccctactctctttaccaaatacactggttatgggggctggtttttgttgttgttgttgttgttgatgttgttgttgttgttacagttgttgttttatgtttgaaataatgaaaatgtcaagtgtttatgtttgggctactactttatggctgcctttttgtggtttgaaagagggaaacaatactttaaagtgaaatctctctttaaagtgccagaggaaccgaagagagctgtcccagaagaaaaagttctgaaactcaaacctaaaagagaggaggaaccaccagctaaaggtatactgactcttaaaaaaaaaaaaaaaatcaaaataagcatccagacactaaaactaatctagtggaataggttccattagaaaaaaaaagacatagtataaagtaagcaatataagtttgttaatgcatatcacttcaaaactaaacatttttgataacagaaagtacttttttcttaaaaaaaagtgaggcttcttctaaacgtatgtgaataattttccttaatctgtatttgtcttctaatgtcttttccatatactaaactcatctgcctagatgcttgctttatgtggcaatctctgatgaaatttttaattttttcaattctgaattttctacattgtaccaatagagctaaggaaaatgtcttagaagtgaggtgaagaaactattcatgtaacataggtttctgtctaatgcttctacttagtttgatagtcattatttatgctgtttagttgtctttttaaacttttataaatactacttgattttcctaaaattattcaatgtctttgacttacttcatatgtatattagagtaagtttatttccaagtctattgattttcttgctttttaaatgaaagtttaatcaggcactgttatggttgtctttgtccttgaattgtttgaacaaaatttctcttcacacacacattttcagaatcttgcaattcacttttaataattactcctttaaagtgactgaattcagaaaaagagtggttaaagaagaaaaagtatcaattgaagctccaaaaagagaacctcaacccatcaaaggtatattgaactttgattaagtaatgtgaggcatgaaactatctggctctttgccttctagttcccaatctgactcctatactttattagcttattgttgattaagggcagggtatataacatttgaaatcacaattgctaaatatactctatgataccttgactggccaaaaaagaacagtcagggtctcccataatcagtgcatgaaacaaacgcaaaagaataaaatcaaagcacattgttactatcagtcatccttaaaagtgctttaaagtaaagtgctgcctgttgttaatattgtttcagaagtaactataatggaagagaaagaaagggcttataccctagaagaagaagctgtttcagtacaacgggaagaagaatatgaggaatatgaagaatatgattataaagaatttgaggagtatgaaccaacagaagaatatgaccaatatgaagaatacgaggagcgggagtatgaacgatatgaagagcatgaagaatacatcacaggtatgagcaaaactgcaaactcaaaaccacactaaatatgtgcacactcaaacaagataaaacaagataaatcataacaagataaaaatttggatacccaaagaaatttggaaagaactttgtttcatttcgcaaatgcggaattttcttctttgataacttctagaaaaaattttaaaaaccctctataaatcttaaggttattgttagacttttgttccgggaataatctaatacccccctcatttttgctcgtatgcaaaatagcaaatgtccctaagtttctttttcaaaaaggttacaagtttatcttcaagtgcccgtgatcattctagtacatggttaaaaatttctgaacatcctttattctaaaacttgctattacggagtatgataggctattgagaaaatgtatttacccacagggttcccattatcaaaacttgacaatgactgcttcaaaagttaagatagagatgtaagctaacacaagctgttgtgttttacctaatgaaggtcaaatttgttggcatatagtttgggcttcaaattgtttattttactcaaagaataaatctctattgaaattttgaaatgaatcaatcttatttcacttattcagtctctgatgtttcatagcccaactttgagaacattctacatagtcttactgatagctttaaaaaaaccatattataggggagtttcagccaggaatttatctacctgaaatgaaatgagaattttaatatgtaagaattacctaattaaagaaaatagcaagaaggaaagggcaatatgagcttgttctgcttggatctctgattcttgcctacttcaataggctatggctatactgtagataaaagatattatttcaattatttgattccttttaagaaatgtttaaacttatattctaagtctaacatgaaataccttgtatgtacttttaaagaaccagagaagcctatccctgtaaagcctgtcccagaagaaccagttcccacaaaaccaaaggccccaccggctaaaggtagagtgaaaaaaacattattacctgtaagagatctttgtttcctccatgtctgtcctactataaaaatatatgtaaaagtggcagtgtacaaattatgtgtgtgtttgggaatattatgttgtatttgtctttcttaactttttgttcttgctagccttgagaaacctgtttcaatttttaaaatctcttaatattgatattttgaagtgctgaagaaagctgtccctgaagaaaaagtaccagtgcccattcctaagaaactcaaacctccaccacccaaaggtacattactgagtaataatcaccaaaaacaactttgttatgtatgttctaaaatcatgtcttcctagcccgtctgatggtctgtgtttttgctgagtaggatgttcttgtcctgattcttacatttcagttttttatgtgtatttattacatagtattcaaggagttggttttaatgctctttaataattaatatctttaaagtgcctgaagaaccaaagaaagtttttgaggaaaaaatacgtatttcaattaccaaacgtgaaaaagagcaggtgactgaacccgctgctaaaggtataatgatttccttcctcgattgtgatcttttctgatgcctcttttgaaattaatgtaactatgattcatttcattttgttgtttcatgtcttttaaattagttgtcagcagaatgttggatgtaaaaatgtgtaaatacaggataagaagataatgcctttaaaaggaaaaattatttctaaatacatccatagcctgttagccagtggctgtgtcctgccacatggctacaatacatataaaatagaatgtttgggtttaaaatcagtgaccgtttggcatattcctgatttacctaaatgatgtaatgataccataatattcaccaagctttggtaactgtttattcattctaaattcattttgaagattttttttaaagctaaccagtttccagtcattttccccctgattcatactaagtatgaagtatactaattgagaagtaaatttcacttttcaggaaggatatttctttcaagcagagatatttgaacactaaacctcatttcacatttgggctctgctacttcatgtttacttgggtacttctgtgtacttgtatttatatgaagctcagaatcctttccacagagagtatatagtttcttaaagatgaacaatcgcatatgtatctcattaaaggaagatacattattctatctgcttaaagtacagcaaaacaagcattggctgggtggccttttactgacaataaaatttccttatacttcatatttcaagtgcccatgaagcccaagagggttgtcgcagaagaaaaagtacctgtccctagaaaagaagtagcaccacctgttagaggtacctaatggcactcattttaatgttttgttcgtcttttgctgttgaattcctcttcagttctgtgtgtgaaaacttcttttgtgggaaaagtaaatcttgtcctttcttctgttataaatgggcctgtgtttctaaggtgtcttaattttgttgagtcattggcaaatgtccaacttaaagataatatctttaaagtgccagaagtgcctaaagaacttgaaccagaagaggttgcctttgaagaggaagttgtaacccatgtagaagaatatcttgtagaagaagaagaagagtacattcatgaagaagaggagttcataactgaggaagaagtggtgccagtgataccagtcaaaggtagatgatgcctcctgcaaagggctgtgcaacagcatctttggagtttgggggtctgatttggtcagattctgggggttattggcagcaccaatgattgcttactttaaagcagatatttttagatgctgaaatatgatttctacaggtgcttttcacattttatttctttcctgcaaaatttccaacattcttaataatatctttaaagtgcctgaggtacccaggaaacctgttccagaagagaagaaacctgttcctgttcccaagaagaaggaagctccaccggcaaaaggtacaccaccattcattgacgggtatctaagagacttcatctgcctagaaatagttaactttcttctgagttcaaaaccttgtgtgtgtgtcactgtccgttgttaaaaaacattagctgtgttttatatggatgtgttgttactagtagttagaacttaacaataaacaatatctttaaagtgcctgaggttcctaagaagccagaggagaaagttcctgtgcttattcctaaaaaggagaagcctccgccagcaaaaggtacatccttataatccatcagtggaatagcatgataattcacccatgcagcataacttggtgagccatagcagatctttccccatgacaatattaacaacattaatgccatgacaagcgcctctcaactggccacaggagcagtttacccggtattcatctctgaattttaccatcaaattatgcttatgctcaatggttggctcctcctctttagtggaaagttcttcaagtaaaatacattccttttgcatatcaaaatggacaaaaccatcatttaccaggcattgtgtcttgtctttatcaccagtccacgtttttttcggtgttttttattttaatttttgtgtattttctggcctttgttttgtggctattataattttcagtcttaaagtgaaattgatagaatatctatgctgcttcagttaaggccttacattgccagccttaaaatcttagctatgggtaaaaaatgtgacactaactctatttgatatctttgaagttcctgaagtgcccaagaaacctgtgccagaggagaaagtaccagtaccagttcctaaaaaggtggaagctccacctgccaaaggtacatgaacttgcaatgttgcaatatttttatttcacatttgcatatgggtaaaaattaattggtttaattctgtactctttgggatgcaactctttagagaaaattaaatattttattttaaaaataaaatgcttcttggaatacctttgtcatacttttattaccttatcttaatcttttgaaactatgcttggaatcagtatttttatgtcgtataaaatttttctctaaatcatttcgttaaagtgccagaggtacccaagaagcctgtgcctgagaagaaggtgccagttcctgctcctaagaaagtggaggctccacctgcaaaaggtacataatttcatcacttagagtacttgggggaaaaaactcacatctatgtatactcacatacaaatttccccattacattgtacatttttaaagtgtctatctggttagaaatatgtcagatattttgtgattctttttcatatctattgctctaagacattttaaaagaacatattcctaaatataaataatatctttaaagtgccagaggtgcccaagaagctcatcccagaagaaaagaaaccaacacctgttccgaaaaaagtggaagcaccaccacccaaaggtacattaatctgtaacagagccatggtaaaagacaaaactaactggtgttatacagccttactaattataattaatgcttagtatttatgttgataataattgatgctttgtgatcacagaatatttgcctttcataagcttcttcattgttgtgaatattttacataaaagtgatgtttgtacccttgaataaatatctttaaagtgccaaagaaacgtgaaccagttccagttcctgtagctctacctcaggaagaggaagttctatttgaagaagaaattgttcctgaagaggaagttctacctgaggaagaggaagttctacctgaggaagaggaagttctacctgaagaagaggaagttctacctgaagaagaggaaattccacctgaggaagaggaagttcctcccgaagaagaatatgtacctgaggaagaagaatttgtacctgaagaagaagtccttccagaagttaaacctaaggtgccagtacctgcaccaggtatagcagctcttcttggaatcatcaaggcctcttttgtgttgaattctgctttcccatccttttgttcatctccagttttatctataatcctttaccctctgtgattgaccatctaaatcttagaaaacattccagacatgtgtgttcttattgtgtatctgccttgtgtatctgtctattgtaaatcatctaaatgtcttttcaaatcacatattatgtttacatgtttgtggtcttatcctcacgtgtctctttcatatatatatatatatatatatatatatatatgaccatgtatatgtggtttttaatgccttcaaatgaaatgtttttaagtgcctgaagtgccaaagaaacctgtaccagagaagaaagtccctgttcccgcccctaaaaaagtggaacctccaccaccacccaaaggtacacctccccaaagtgaatacacattcttcacccatagcttggtcacataaattatgatgaaactgggttttaggaaaattatatttacaaaatggataatcacacagttacatatttacttctaacgatgttcaggaacactgatatctacttttttcactgatacaaagcagtattcaagaacaaagatgaaaggaagcattgtcccagaactgatacaaaagttctgatttcatatcatttgattaaacatcatagttttcatggagatatatttaaatatatatgaataagtatactatatatttaaatgtattgaaaactattatgaataaatattcttaaatttcttccttcaaccatttatattaaatgcctttttaacaccaggctaaaaagaaaaaaagatgaatgtatttatcaaaacacagaataatagttatgtcttctaatacatatatataaagggcagcccaacaggttttgattttagcgttgactttacaccttgttgtattactctcagcgagtcctttaaccaacctgagcctgaagttattttcctgtaaattggggatgctaatatcagtcttaatgggctcagctattatggtgagaattaaataaagtaaggtattaaagtagtctatcattgaatgaatagtatccagatttaacatattcaatcagctcatagtacaggacagaattaatatatttgtgctttaaagctcaataatattttctacaaaagatgctggcatggctgcttaaaatcagcataaccctcgcatcaggccatatagttatataatcaaatgaaatagtaaagctgatcttttattggatatcaacgattcagaaatactttctagacaataaattactagtgaaatttaaatgtatgaaatgatattaggttggtgcaaaagtaattgcggtttttagcattaaaagtaatgtcaaaaccgcaattatttttgcaccaccctaatagcatctgtcctctgataatgacatatgctgctggtcccttgctttacaaatcccaattacattataatatctgggctcccaactaacatgacagacctgtcttgagcgactgttaacacattggtctttctgggtgtggggtcttcttggtttctctttttttgtccttcaaaataaatccttatcatgaaatgatgtctttaaagtgcctgaaattaagaagaaagtgacagagaagaaagtggtcattcccaagaaagaggaggctccccctgccaaaggtattgctattccgaagtaaattagactatgccatttccttccttctcctataaaagtcaaaatgtcctgtttccgtatttgttaatacaacttatattactgctgtgtctacttgtctttgtgtgtgtgaaactgaacttataaaataaaataatatttttaaagtgtctgtggtacctaagaaacctgagccagaaaagaaggtccctcctcctggtcttaagaaagcagtggcccctcctgccaaaggtacatcatcccataacagggatatgtttgctgcaccgatgttgaactgtggttctatccacacaggacactcaacataaatgtgtgcattgtatggtctgtcattcacattcgtcatttctgactcttttgcacccaagtttgtgttgtgtccattttttcacttggtgttggtgtgctttacatcgtttctctatgtatgttgtttctaaaaaataaaaatatatctttaaagagccaaaaataactaaggaactagtccctgaaatacccatttcttcatacccatttcttcctacaaaaaaaaaaaagacaaaagaaaaaagaaatagaggctccagcagtaaaaagtagaatttctctttaataaaccctaaatcttaaaccacaaacctttttattcttttctcattaaccgattctgtgaaatgtcaatgtttcatcttgtgtatgtgccttgtgatatttactctcttatgttggaaactggaaacttggtctttattcttctttggttcttgcattttaagtgtctaaaataatcaatgtctctcaagttcctgaggtgcctaagaaggtggaagaaaaacgaatcattctccctaaagaagaggaagttctaccagttgaaggtagataactttctaagaaaataacatttcaaagtcatccttgtcttattattgtctaatatttgaagtaggtaaatgtaaaatttaccccaggaaatcaacatattcagattctaaaataaattattattaacctaatagaaattgggcaggcaaattaatattatttgaatctctttgcatgttcagcctgtttgtctgtttgctatttgttttattttaattagaattcatgaagggaaactgtatttgctgtgggaaatttttcatcaaatgacttagtaggcaactgtaaaataagcttatccaagagaaattccagttaagcctgagtaactggtgcagaaaatctgatttctaccccaagtggctgtttgacttcaaacaagtctttcattaaaaaaaaaacaataataatttttttattattataaattatctgaagtcctttccagttcacaaatgctgggatatgcctaacatattttgaagacccagtagagattttttaaggactagtgagtttacacaagcgtttcgaaggctgagcagttttcagatattatcactgtagtctaatattcaaaataattataaaaataatttacaaaataataatctttttaaagtgactgaggagcctgaagaagagcctatttcagaagaagaaatcccagaagaaccacctagcatagaggaagttgaagaggtggcaccacctagaggtataaccgcttttaaggattgaacatttaaaattcctggtgttccaaatctttctcagtagctaaatctaagattcaccagtatgcttttcttatatcgtatccatgataaagtgaagattaattattcctggcacctgaatctatgtgtcctttttttaccctaaatttttctacaacatctgcaatacaactaagaatgagagattactattttgttattggcgattgaatttttttctgaccaggccctactataatagtttctcctagatttcaatccttaattttgtttttaatattaatatggggggaatctatttctctggtgaaagtgttcattttttaagaaaaatctttaatttactattcctgaagagtgtgataatattttgcataattggtattacatttgcttataggatttctaagtaatatcctttacacctctagggttcctactccacatttattattaccatttaggttgctaatatcttttaaaaataagtcaatgttttgtgatatttatttattggtatatgggtggtgttctgctcatcacatgccacttttcaaaatgttcataaaatttcttttaagtgcctgaagtgattaagaaagcagtacctgaagcacctactcctgttcctaaaaaagtggaggcaccaccagctaaaggtatatcaaatcctcattattaatatctttaacttcccattaattttctttcttaaaagcaacattttcttttttgactgccttcttataatcatttagatagtgaactgattaaggaccagtaaaaatataactcattccatttctttaatcttttctaggatgttaacgaataattgtgtgcatgtgtttacgtatgaattattctagaagcttcttaactgagaattttaatatattagtatgtctctatatacttatacacatagcaatggatccctcttccccacattttagattttattccataagtggaacggagttttcttctgtgttataataattattttactatatttattattttatggaacaaacctaatgcttggataataactattttaaagagcctcacgtcccttttgtaatgtttagcccaagcattcaaggttattacaaaatgtctacttttccctgcttcctaattcacttaatgcttcagacagtgctcttaagcagttagattatgctgtccctgtcatagtagactcctcagctaatagaagagtgcacagcagaaagtgaggccagtgtcagggcttaaatactctacaatggtaatcacttcaaaaaagtcttcatcaagttaaaaatagtaaaagtgagtccatattggtaatccctgttattaaaagaaaaaaaaaagaatggcacaggtactttgtggacatttcttcttctataggaatgttagaacaaatgagtgatttgagaaagtatctttattgcctctaaaatggatgtcccacagtacagagtgacttctgaaaaactttaattattgtaatgttggcgttgtctctggtgtttttatttcatgtgtgttattgaacattctcagctaactaaaacacctaatatctttaaagtgtcaaagaaaattcctgaggaaaaagtacctgttcctgttcagaaaaaagaggcacccccagccaaaggtacatcttctcttttaaacctgacttcctcttctgtcttttttcgttaagacttttatgtttcatgtctctgtgtcttgattgtttttgatgatttttgtctatgaaagcttgctctcgacagtcctaaatattaaaactgtatctttaaagtgcctgaagtaccaaagaaagtcccagaaaagaaagtccttgtgcctaaaaaggaagctgttcccccagctaaaggtatttttggaaagatcctggattttcgtgtattgttgcatgcaatcctttattcagttttaaaaatatatattttgaatgtacatctttatttcttcagtgtttaaaaaaataagtcttaaaatagatgctctttcagggagaactgtccttgaagaaaaagtatcagttgccttccgccaagaagtagtagtaaaagaaagactagaattagaagtagtagaagcagaagtggaagaaattccggaagaagaagagttccatgaagttgaagaatattttgaagaaggcgagtttcatgaagtagaagaattcatcaaattagaacaacatagagttgaagaagaacacagagttgaaaaagttcatagggtaatagaagtttttgaggctgaagaagtggaagtatttgaaaaaccaaaagctccacctaaaggtatagggaattcttcaaatactacaaattcttatatcttgctctaactttcctttgaaagtaaattttgtgttcagtttggaagattagaaaccccatgaaatactttaaacatgagtttaaactagttgacacaaagattaatatctcttaaccacacggagtataattttagtagatgatagtaatatttgatatctacttatctaaggaggtcactgtatgaatttggggattattttttaaatctgactaagaatgttacacaattgttacaggtaccaaaataactgaccagtgtcattggttaagtgaaaaagaaactcctcagttcactgaggaatttacatgttcaggcaaaataatcactgctttaacattttagtcaactgttcacaaactgagaaatacttaccaaaagcttttgccagtttatgatactttcattagagaaacaacattaaggaagtgaagtattgttaatggcacctgtattctagcatactgtgaagacaagccatagcacaaataagttatctgcaataccactctagatcttgcacaaattaacaatatatgtgtaatatgaaggaatgtgtgtgtgtgtgtgtttagcatatatagcaaattacaatatacatgatatttagcaaatcaaatctcttttggaaataagtgtgttataaattaaaaaaatatagataaagaattttgtgacccctcattgtactaacgttagtagtagtgctccaaaatacttcaagagttcattctaaaccaaaatactaatatctttgaagggcctgagatatctgagaaaatcatccctccaaaaaaaccgcccactaaagttgttcctcgaaaagagccaccagctaaaggtatcttctttgtgaaaaattactacttaactttacatacaatagcaccttggttgctttataagcacaagtttgcattccacttgatgtctttcttctgtatttcttgtttctgacatgtctaaaacaaactaatatctttaaagcagctgagggtccaagggaagttctaccaaaaaaagacagtcactgttgttatacctaaaacaaccaaagcaaatatctctagtaaccaaatagtgagcccaaatttcctcctttggtgctatttggttatatattcactaacatgcttactgataaacacatgtttttctatttattattaattatattaacctggcaaatataaatacatagtgaatatgtgtttaatgttcttgctttgttcatttttgcaaatctcttaaatttcacaatagaaataaaaacagtatctaataaataatataaacttatttctttaaagtctctgaagcatgtgcgtaagttatcactgaagagaaggtagcaactcttccacaaaaacaaacagtaatagcaccagctgaaggtgtactgttaatttttcttctcaagttcttaccattctaacatgggaaatttccctggatttttgttattatatattttttaaattcaatgcatttgaaatactgtaatgtatttgataaagtgttgtctgcattttatattgttgctgtgttctgttctgtgtttatatctctcatgctctgcttgttaaaaaattgtatatttaaaaataaaagaaattattactattatctttaaagtaccggaggtgcctaagaaaattgtggtagaagaaaaagtacgtgttcctgaagagcccagagttccaccaactaaaggtaactggcttttctcattcatcattaatataaaatccttttttattcacttactatgtaagagagacctttctcttctcaatgccacaagatggctatgaatgacataaacttcaatttatgttctataacataatcctgccttttgaggcaatgttttaggcgtaaagacataagcccaaagttatcatttgtattgatcctcttatttaataactaaataatattgatccctcaacttctctttcaaaaataattcattttggaagctcttctgaagtagctctggaaaaaaaaaagtgtgctctaaatggcaatagaaaatgatactatctccaaagagcaaagtgtttctgatataatgaatcaagaactcatcgacaaagcaattcagagaaatgcaatgactacatttgacttatagttgacttataattgaggggtttttggcgttcatcttgttagatgccccttctaggcttgctatgtttacacccaactataatgttctgaaaaaataagataaataaatatctttaaagcacccgaagtacccaagaaaattgtcccagaagaaaaagttcgtgaagctgttctgaaaaagcctgaagttccaccagctaaaggtatacagtgatgctaatcagaacatgaaataattcttggtttagtttttcatggtttaaagtgaatgtgtgtgacattaaatccttgtatttcgtatcttatatttgttatctgtaacaattaatatactaatatctttaaagttcctgggatgcctaagaaaagtgttcaagaagaaaaatcacctattgttatttctgaagacacagagatgtacagtgagtgtagaaaaattagtggttctttttcgtttcatttatgtccttaaattcactatgtttgtctttttagctttgaaaagtaaatatactaaactcttataaaagcctaacatgccacaaatatatgactcaaataatcttagtgtctattatcctcagacaagttatatttcctcaccaatttaaaaaagaaatactctacttatcagagtgtatgatttcagaaaagtcagttgtcttgttaaattttcctaacctattctgtatacaagtgtcttttgctttgaagcaatttattttctcagatcatgaagtaacttaactccataatattttaattggattttataaaatcaaaatgtttcaccattatttttttttttactcttgataaccataattggaaacattttggcaaaactgctcaaaggaccctaggtttacaaggccactcaaacctcaaaagaattctcacgacctttttttttgggggggggtttcatacaaaattaggtttaaataatttgaattatgaaataatccaaatagtaaaatattgtgaatagaatactgttcaacaacctgaatagtaaaagtgacagtagtcaaaatattcttccttttttttttttttttgagatggaatctcactctgctgcacccaggctgcagtgcagtggcacgatcttggctcactgcaacctccgtctcctgggttcaagctattctcctgccccagcctcccgagtggctgggattacaggtgcctaccaccaggcccggctaattttgtgtatttttagtagagacagggttttaccatgttggtcaggctggtctcaaactcctgacctcaggtgacccgcccacctcagcctcccaaagtgctgggattacaggcatgagccactacaccagacccgcatccattttttttaatctaaaaaatttcctgttgaaactcaactttcttgttgttcatcctgttatactaagttgggataaaataatataatcacttcctcctttgaatagcctttctattcttgactttagttattgttttcagacagtttttctttctaaaggctggagaaatttttgttgtctttatttgccttattttctaagtatttaatttttttaattttctgcctccaaaccctaaatggcttttacattcatattaaactgtgaaaccatatattagatgtgatttgaaaatatagataatgaggcttctagaaagggaaaagacttacatgaatttctagtaggtcaaatatcggagaattctcaatgtgcaattcagcatcttccctgttctttatagacaaatccattaaaaataagaccaataggacaattttaccaataactttcttaaggcaaaatgaagaattatatagtccttgcctgaacaattcctccattttattgtcatcatcatagagaaatgcttagagtcttacatcatgaaactgggagtgaggctatccccagccaatgcattctagccactaatttgcctctatgtgctactattaattttggtgatgaatgtggtattatatattatatttttcttaatacacttctttatccaccttgaaacatcctaattatttaaatactaatatctttaaagtttatgaagcatctgaagaagcagtcctagaagaaaaagtacttgtgactcaacctcaaaagacaaaacccaaactagcaaaaggtatataacaccaatgatccactctgaagaaaaattattttttggccccttttaaaaagctcaatatttttcttcaccatttataaatataactatactcatatcttttaagtgcctgagccacccaagaaagttgttccagaagacaaaatatatgtgactattcctaaaaagagagaaacaccagcaactaaaggtatatttcaaatacatcaaacccagatgagtatctttagctttatgactcaaacattgcatgctttttataatttactgtttttacaacttttaaatgtaaacctactaatatctttaaagaacctgatacaaccagaggcatttttccagaggtggagccacctgaggctattcctgaaattccagaacatcctccaactgaaggtataattctctagttaggaaaatctaaagaagaaaatatactgtcttcagtctgcaaaatatttaatgtttaatatacattctcacaacctctaatgttaaaatactgtgtttaaaggatctgatatacccacaacaaagaatgacctatgacttgcccccaagaaagtcaagtcccacacatataatatacaaagataaaatattagaacaaaaataacatttctaacataaagatatctgaaatgatattaacatatctaactttcctagtatgtcatgtctttatgcctttgccttttctcaattaaaaaaaatactaatatctttaaagagtttgaagtcttcaaggaagtcattccagagggagaaactcctattgttaaaagaagaaaaacaccatcaccaacaggtacaagttggaagaaagtcacctttttaatctcatgtttgcagttgtacttaacacatgtaaaaatactaatatcttttaagccaaagtggctacagtggaaatcatttcagagatggatcccccaagtagaagctcaaccaaatgtattcatgtcccagtgagtcactcaagagacaacagagggaaaaaatacctttagcttatacacatgaaagatagttgagtcagtgtatttttatgaggactccaaagaaaatatatatacacatattatgatcaaaacatgtcttaaagaaaatattaattcagtgtgaagctgatctgtaatatctctacaagattagagcacctgagaccctcccagaatatcctccaacctagggaaaaataattccagttaaagctggaaatctcccctccatgttcatttgctcctctcatagcctatcttttatttttcaagcatcatacattttttttcattttgaatatctttagataagtcaaaacatgaaaaagctttaaaacctccagaacaataatttcatcataacacccatggtattctgtaatttgaagaatatctgaatattttgatattttttctcagtctggaatcttttggttgttctcctctctcctaaacttgaaaaacactcacctttttaaggtgcctgaggtgtgaatacaaaaaaatgccgacctagatttttcgaagtggctgtaatttgtttttctcaacataatagctagaggtatagcattaattataatcaatgtttccactttccatgatctagttttctatgcatctaccattccaagaaataaaattactaatactgatagtgcctgaggtgaccaagaaaacagccgcttataaccaaatactcacactgctacaaaagatccgattctgggggcggggagtgggagaaggttcccatctggaatgttctgtatgtgcagttaagatgggaactctttactcctcttcataactccaaagtacaatgcattcatatctttaaagtgcctgaatcacctcgagaaattgtccctgtaaaggaaacacccatggctgctccccttgaaattgaaatacctcccactaaaggtatcgttcatcctgccattccttccttcatttattagagtgcttagcatgtacagggtgctagggaactggagaataataaacaaagacaattaatatgtggttcctctcctcaagattgtatacctcctcagattctttaaaggaatcatctttttagccataaatatcactttggttcagctcatttaattaatgtctccactgatccttttaacctctaaccataatactaatatcttcaaagcaccagaagctatgaaagaagttgtccctgaaatgaaaatatttgaggatgtacctgaagagccagaaactccacgtatgaaaagtacgttacctctgaacaaatgtggaagaagaaattatctgtcctctgctcttaaaactatggtttcttcctaatactcttcataaattctaaatataaacatactaatatcttttaagtgtctgaggttccacaggaagtttcctctaaaaagaaattatttatggctgtttctgccaaaacagaaaacactcctgctggaagtattcattcaacaaatcctttataatgagagtgtagagtgtcgcgagagctctgtgaggttctggaggagggggagcacctcctctcaaggatccactaaccccttaaaagacttagcctattggtggaacaaagggaggatggaggaaagagaagaaaatgtggttatatttcctaacttattgtggttactgttttccattaatcattttaactcttaaatgtgaattgctaatatctttcaagcgcccgaagctcctcaagaaattattcctgccaagacagttccttccaaaaaaagagaacccccatcagttaaaggtacaagtcaccatgctctcagggtcaagaactagctcttgtagttttgagaatatttttgctattcctagttatctgcatcacactaaacataaaactactaatttcttaaagtgcctgaagctctccaagaaattgtccctgaaaagaaaacgcttgtggttcctctcagaaagcctgaagtccttcctgatgaaggtatatcttgctggaagcttagaggggtgggaacatgtcttttcttgtataaatgtttttcctgattgtgttgattcttgtaacttctaaatgtaaaattattaataccttcaaagtgccggaggctctcagagaagttgtcccggaaaagaaagtgcatcctccccaaagggctgaagttgtacctgtcaaaggtacattcttaactgtctttttatggtgggatagtgggtggggcgatagaaaggaccacctttctagttttgaaaattattttgatgtgtacatgtgaatcatgtctgtgttgactcttgcaactcaagtgtaaatgtattaatatcttcaaactgcctgaagctcccaaagaaatggctaccaaaaagaaaataccagaagttcctcctctaaaacctgaaacaccacctattatgggaacttgttaccactgatctcagctcaggagaaaaaaatagctcttttgttcttgaaaatgtctttgtatctatctagtaatctctgtattttctgagtgtaaaaatactaatatctttcaagtgcacgaagctcccaaagagattatccctgaaaagaaagtgtcggtggtgcctcctaaaaagcctgaagtcccacctgttaaaggtatttgtcactgactttaggcttcagaagacctaattcttctgctcttgacaatatttttttctagcggtcttcataacacctaaatgtaatttcactaatatctttcaagtgccagaagcttccaaagaggttatccgcgaagagaaagtgcccttggctcctcctaaagagcctgaagtcccacctgttaaaggtagttgccactgaccttaggcttcagatctcattcttttgctcttgaagatattttttccagtggtcttcataacttctgaatgtaattttgctaatatcttttaagtaccagagcctcccaaagaagtagttcctgaaaagaaagcgccagtggctcctcctaaaaagcctgaagtcccacctgttaaaggtatttgtcactgattttaggcttcagatgatgtatctcttctgctctggaaaatatttttctagtggtcttcataatgcctaaatgtaatttcactaatatctttcaagtgcctgaggctcccaaagaagttgttcctgaaaagaaagtgccagtgcctcctcctaaaaagcctgaagtgccacccacaaaaggtagacaccctcttgttgctgtgtttgatattgtttgtttgtctttactttgtctaataatgaaaatactaatatctttaaagtcccagaggtgccaaaggcagctgtcccagaaaagaaggtgcctgaagctattcctcccaaaccggaaagtcctccccctgaaggtaatgccaaagctatacaaactataggagaaaaataactgttattttaactaggaaattacatgtttaaaatcctactacataaagatgatataattctaaagaaaacaaatgtcaatcgctatccaaaatatcttggtgggtgtttatatgcaaaaggcatccatcattttcaccttttctaaacacaaattacaaatatctttgaagtgcctgaagtgctgccaccgaaggaagtggtcccagaaaagaaagtaccggtgcctcctgccaaaaagccagaagctccacctcctaaaggtaggtatcattacacattgtcagtcggggggccctggggaaagactgcatagaagtgtccgccgatctcacaagttgtatttgcttgggtaaatgtggagtcgatattccccctttatagcttctaactaaaagatactaatatcttcaaagttcctgaagctcctaaagaagttgtacttgaaaagaaagcatctgtggctgtgcccaaaaaaccggaagccccacgtgcaaaaggtatttattccctctcctctgctaagaaaaacttatcgtctgtacccctcacaatcactgtaatatataccttcaccattcataaattataaaaatactaatatctttcaagtgcctgaagctgctcaagaagttgtcccagaaaagaaaattcccaaggcaccaatcaaaaaaccagaagcccccgcagttacaggtacatgtcagctcaaccttatcctgcagaagaaatctctcttccattcctgaaaacaattttagtccattcctcttcattaacctaagtataaaactactaatatctttcaagtgccagaagttcctcaagaagccacagaaaaagaaattcccgtggctccacccaaaaaaccagaagctccaattgtcccaggtacactttagccctgacttcattctgcagaagagatatctcctctcctactgtaaacaattttagcccatttctcttcattaacttaagtctaaaactactgatatctttcaagtgcctgaagctcaagaagttgtcccagaaaagaaagttcctaaggctcctcccacaaaaccagaagccccacctgccacaggtattttttacccctgtcctttttctgcagaagaaatatctcttctgatcttagaaatattttactccatttgtctcattaacctaagtgaaaaactactaatatctttcaagtgcctgaagtcccacaagaaattgtgccagaaaagaaaacactggtgcttcctaaaaagccagaagttccacctgttacaggtacttgtcatttgaccttaagcttcagaagatccaattcctctgctgtatattttgctagtagtctccatagctccacatgtaactttactaatatcttttaagtgccagaggctcccaaagaagttgtccttgaaaagaaagtgccctcggctcctcctaaaaagcctgaagtcccacctgttaaaggtatttgtcactgattttaggcttcagatgatctatctcttgtgctctggaaaatatttttctttttatatatatatatatttttattatactttaagttctagggtacatgtgcacaacgtgcaggttgttacgtatgtatacatgtgccatgttggtgagctgcacccactaactcgtcatttacattaggtatgtctcctaatgctatccctcccccatccccccacctcacaacacactccggtgtgtggtgtcccccttcctgtatccatgtgttctcattgttcaattcccacctatgaatgagaacatgcaatgtttggttttttatccttgtgatagtttgccaagaatgatggtttccagtttcatccatgtccctacaaaggacatgaactcatcattttttatggctgcatagtattccatggagtatatgtggaacattttcttaatccagtctatcattgatggacatttgggttggttccaagtctttgctaatatgaatagtgccgcaataaacatacgtgtgcacgtgtctttatagcagcatgatttataatcctttgggtatatacccagtaatgggatggctgggtcaaatggtatttctagttctagatccctgaggaatcgccacactgacttccacaatggttgaactagtttacagtcccagcaacattgtaaaagtgttcctattgctccacatcctctccagcgcctgtcgtttcctgactttttaatgatcaccattctaactggtgtgagatggtatctcattgtggttttgatttgcatttctctgatggccagtgatgatgagcattttttcttgtgtattttggctgcataaatgtctttttttgagaagtgtctgtttgtatccttcgcccacttgttgatggggttgtttttttcttacacatttgtttgagttcattgtagattctggatattagcccttcgtcagatgagtagattgcaaaaattttctcccattctgtgggttgcctgttcattctgatggtagtttcttttgctgtgcagaagctctttagtttaattcgatcctatctgtcaattttggcttttgttaccattgcttttggtattttagacatgaagtccttgcccatgcctatgtcctgaatggtattgcctaggttttcttctagggtttttatggttttaggtctaacatttaagtctttactccatcttgaattaatttttgtgtaaggtgtaaggaagggatccaatttcagctttctacatatggctagccagttttcccagcaccatttgctaaatagggaaccctttccccatttcttgtttttgtcaggtttgtcaaagatcagatggttgcagatgtgtggtattattctgagggctctgttctgttccattggtctatatctctgttttggtaccagtaccatgctgttttggtaactgtagccttgtaatacagtagcgtgacgcctccagctttgttcttttggcttaggattgacttggcaatgtgggctcttttttggttccatatgaactttaaagtagttttttccaattctgtgaagagagtcattgatagcttgacggagatggcattgaatctataaattaccttgggcagtatggccattttcacggtattagttcttcctatccatgagcatggaatgttcttccatttgtgtcctcttttatttcgttgagcagtggtttgtagttctccttgaagaggtccttcacatcccttgtaagttggattcctaggtattttattctctttgaagcaactgtgaatgggaggtcactcacgatttggctctctgtttgtctgttattggtgcataagaatgcttgtgatctttgcacattgattttgtatcctgagactttgctgaagttgcttatcagcttaaggagattttgggctgagacgatggggttttctagatatacaatcatgccatctgcaaacagggacaatttgacttcctcttttccttattgaataccctttatttctttctcctgcctgattgccctggccagaacttccaacactatgttgaataggagtggtgagagagggcatccctgtcttgtgccagttttcaaagggaatgcttccagtttttgcccattcagtatgatactggctgtgggtttgtcataaatagctcttattattttgagatacgtcccatcaatacctaatttattgagagtctttagcatgaagggctgttgaattttgtcaaaggccctttctgcatctattgagataatcatgtggtttttgtcgttggttctgtttatatgatggattacgtttattgatttttgtatgttgaatcagccttccatcccagggatgaagcccacttgatcatggtggataagctttttgatgtgctgctggaaaatatttttctagtggtcttcataatgcctaaatgtaatttcactaatatctttcaagtgcctgaggctcccaaagaagttgttcctgaaaagaaagtgccagtgcctcctcctaaaaagcctgaagtgccacccacaaaaggtagacaccctcttgttgctgtgtttgatattgtttgtttgtctttactttgtctaataatgaaaatactaatatctttaaagtcccagaggtgccaaaggcagctgtcccagaaaagaaggtgcctgaagctattcctcccaaaccggaaagtcctccccctgaaggtaatgccaaagctatacaaactataggagaaaaataactgttattttaactaggaaattacatgttaaaaatcctactacataaagatgatataattctaaagaaaacaaatgtcaatcgctatccaaaatatcttggtgggtgtttatatgcaaaaggcatccatcgttttcaccttttctaaacacaaattacaaatatctttgaagtgcctgatgtgctgccaccgaaggaagtggtcccagaaaagaaagtaccggtgcctcctgccaaaaagccagaagctccacctcctaaaggtaggtatcattacacattgtcagtcggggggccctggggaaagactgtatagaagtgtccgccgatctcacaagttgtatttgcttgggtaaatgtggagtcgatattccccctttatagcttctaactaaaagatactaatatcttcaaagttcctgaagctcctaaagaagttgtacttgaaaagaaagcatctgtggctgtgcccaaaaaaccggaagccccacgtgcaaaaggtatttattccctctcctctgctaagaaaaacttatcgtctgtacccctcacaatcactgtaatatataccttcaccattcataaattataaaaatactaatatctttcaagtgcctgaagctgctcaagaagttgtcccagaaaagaaaattcccaaggcaccaatcaaaaaaccagaagcccccgcagttacaggtacatgtcagctcaaccttatcctgcagaagaaatctctcttccattcctgaaaacaattttagtccattcctcttcattaacctaagtataaaactactaatatctttcaagtgccagaagttcctcaagaagccgcagaaaaagaaattcccgtggctccacccaaaaaaccagaagctccgattgtcccaggtacactttagccctgacttcattctgcagaagagatatctcctctcctactgtaaacaattttagcccatttctcttcattaacttaagtctaaaactactaatatctttcaagtgcctgaagctcaagaagttgtcccagaaaagaaagttcctaaggctcctcccacaaaaccagaagccccacctgccacaggtattttttacccctgtcctttttctgcagaagaaatatctcttctgatcttagaaatattttactccatttgtctcattaacctaagtgaaaaactactaatatctttcaagtgcctgaagtcccacaagaaattgtgccagaaaagaaaacactggtgcttcctaaaaagccagaagttccacctgttacaggtacttgtcatttgaccttaagcttcagaagatccaattcctctgctgtatattttgctagtagtctccatagctctacatgtaactttactaatatctttcaagtgccagaggctcccaaagaagttgtccttgaaaagaaagtgccctcggctcctcctaaaaagcctgaagtcccacctgttaaaggtatttgtcactgattttaggcttcagatgatctatctcttgtgctctggaaaatatttttctttttatatatatatatttttttattatactttaagttctagggtacatgtgcacaacgtgcaggttgttacgtatgtatacatgtgccatgttggtgtgctgcacccactaactcgtcatttacattaggtatgtctcctaatgctatccctcccccatccccccacctcacaacacactccggtgtgtggtgtcccccttcctgtatccatgtgttctcattgttcaattcccacctatgaatgagaacatgcaatgtttggttttttatccttgtgatagtttgccaagaatgatggtttccagtttcatccatgtccctacaaaggacatgaactcatcattttttatggctgcatagtattccatggagtatatgtggaacattttcttaatccagtctatcattgatggacatttgggttggttccaagtctttgctaatatgaatagtgccgcaataaacatacgtgtgcacgtgtctttatagcagcatgatttataatcctttgggtatatacccagtaatgagatggctgggtcaaatggtatttctagttctagatccctgaggaatcgccacactgacttccacaatggttgaactagtttacagtcccagcaacattgtaaaagtgttcctattgctccacatcctctccagcgcctgtcgtttcctgactttttaatgatcaccattctaactggtgtgagatggtatctcattgtggttttgatttgcatttctctgatggccagtgatgatgagcattttttcttgtgtattttggctgcataaatgtctttttttgagaagtgtctgtttgtatccttcgcccacttgttgatggggttgtttttttcttacacgtttgtttgagttcattgtagattctggatattagcccttcgtcagatgagtagattgcaaaaattttctcccattctgtgggttgcctgttcattctgatggtagtttcctttgctgtgcagaagctctttagtttaattcgatcctatctgtcaattttggcttttgttaccattgcttttggtattttagacatgaagtccttgcccatgcctatgtcctgaatggtattgcctaggttttcttctagggtttttatggttttaggtctaacatttaagtctttactccatcttgaattaatttttgtgtaaggtgtaaggaagggatccaatttcagctttctacatatggctagccagttttcccagcaccatttgctaaatagggaaccctttccccatttcttgtttttgtcaggtttgtcaaagatcagatggttgcagatgtgtggtattattctgagggctctgttctgttccattggtctatatctctgttttggtaccagtaccatgctgttttggttactgtagccttgtaatacagtagcgtgacgcctccagctttgttcttttggcttaggattgacttggcaatgtgggctcttttttggttccatatgaactttaaagtagttttttccaattctgtgaagagagtcattgatagcttgacggagatggcattgaatctataaattaccttgggcagtatggccattttcacggtattagttcttcctatccatgagcatggaatgttcttccatttgtgtcctcttttatttcgttgagcagtggtttgtagttctccttgaagaggtccttcacatcccttgtaagttggattcctaggtattttattctctttgaagcaactgtgaatgggaggtcactcacgatttggctctctgtttgtctgttattggtgcataagaatgcttgtgatctttgcacattgattttgtatcctgagactttgctgaagttgcttatcagcttaaggagattttgggctgagacgatggggttttctagatatacaatcatgccatctgcaaacagggacaatttgacttcctcttttccttattgaataccctttatttctttctcctgcctgattgccctggccagaacttccaacactatgttgaataggagtggtgagagagggcatccctgtcttgtgccagttttcaaagggaatgcttccagtttttgcccattcagtatgatactggctgtgggtttgtcataaatagctcttattattttgagatacgtcccatcaatacctaatttattgagagtctttagcatgaagggctgttgaattttgtcaaaggccctttctgcatctattgagataatcatgtggtttttgtcgttggttctgtttatatgatggattacgtttattgatttttgtatgttgaatcagccttccatcccagggatgaagcccacttgatcatggtggataagctttttgatgtgctgctggaaaatatttttctagtggtcttcataatgcctaaatgtaatttcactaatatctttcaagtgcctgaggctcccaaagaagttgttcctgaaaagaaagtgccagtgcctcctcctaaaaagcctgaagtgccacccacaaaaggtagacaccctcttgttgctgtgtttgatattgtttgtttgtctttactttgtctaataatgaaaatactaatatctttaaagtcccagaggtgccaaaggcagctgtcccagaaaagaaggtgcctgaagctattcctcccaaaccggaaagtcctccccctgaaggtaatgccaaagctatacaaactataggagaaaaataactgttattttaactaggaaattacatgttaaaaatcctactacaaaaagatgatataattctaaagaaaacaaatgtcaatcgctatccaaaatatcttggtgtgtgtttatatgcaaaaggcatccatcgttttcaccttttctaaacacaaattacaaatatctttgaagtgcctgaagtgctgccaccgaaggaagtggtcccagaaaagaaagtaccggtgcctcctgccaaaaagccagaagctccacctcctaaaggtaggtatcattacacattgtcagtcggggggccctggggaaagactgtatagaagtgtccgccgatctcacaagttgtatttgcttgggtaaatgtggagtcgatattccccctttatagcttctaactaaaagatactaatatcttcaaagttcctgaagctcctaaagaagttgtacttgaaaagaaagtatctgtggctgtgcccaaaaaaccggaagccccacgtgcaaaaggtatttattccctctcctctgctaagaataacttactgtctgtacccctcacaatcactgtaatatataccttcgccattcataaattataaaaatactaatatctttcaagtgcctgaagctgctcaagaagttgtcccagaaaagaaaattcccaaggcaccaatcaaaaaaccagaagcccccgcagttacaggtacatgtcagctcaaccttatcctgcagaagaaatctctcttccattcctgaaaacaattttagtccattcctcttcattaacctaagtataaaactactaatatctttcaagtgccagaagttcctcaagaagccgcagaaaaagaaattcccgtggctccacccaaaaaaccagaagctccaattgtcccaggtacactttagccctgacttcattctgcagaagagatatctcctctcctactgtaaacaattttagcccatttctcttcattaacttaagtctaaaactactaatatctttcaagtgcctgaagctcaagaagttgtcccagaaaagaaagttcctaaggctcctcccacaaaaccagaagccccacctgccacaggtattttttacccctgtcctttttctgcagaagaaatatctcttctgatcttagaaatattttactccatttgtctcattaacctaagtgaaaaactactaatatctttcaagtgcctgaagtcccacaagaaattgtgccagaaaagaaaacactggtgcttcctaaaaagccagaagttccacctgttacaggtacttgtcatttgaccttaagcttcagaagatccaattcctctgctgtatattttgctagtagtctccatagctctacatgtaactttactaatatcttttaagtgccagaggctcccaaagaagttgtccttgaaaagaaagtgccctcggctcctcctaaaaagcctgaagtcccacctgttaaaggtatttgtcactgaccttaggcttcagatgatctaattcttttgcagttgaagacattttgttccagtggtcttcataacccctaaatgtaattttacctaatatcttttaagtgccagaggctcccaaagaagttgttcctgaaaagaaagtgccagtgactcctcctaaaaaacctgaagtcccacctgttaaaggtatttgtcactggctttaggcttcagaagactgaactcttcatttcttgaaaatacttttctagtggtcttcaaacttctaaatgtaatttcactaatatcttttaagtgccggaggctcccatagaggttgttcctgaaaagaaaatgcccttggctcctcctaaaaagcctgaagtccctcctgttaaaggtatttgtcactggctttaggcttcagaagatcaaactcctctattcttgaaaatattttttctagtggtcttcataacccctaaatgtaatttcactaatatcttttaagtaccagaggctcccaaagaggttgttcctgaaaagaaagtgccctcggctcctcctaaaaagcctgaagtcccacctgttaaaggtatttgtcattgagtttaagcgtcagaagatctatctcttctactcttgaaaatatttttcctaatggtcttcataacttctaaatgtaatttcactaatatcttttaagtgccagaggctccgaaagaagttgttcctgaaaagaaagtgccagcggctcctcctaaaaagcctgaagtcacacctgttaaaggtatttgtcactgattttaggcttcagatgatcaaactcttctgctctggaaagtatttttctagtggtcttcataatgcctaaatgtaatttcactattatctttcaagtgcctgaggctcccaaagaagttgttcctgaaaagaaagtgccagtgcctcctcctaaaaagcctgaagtgccacccacaaaaggtagacaccctcatggtgctgtgtttgatattgtttgtttgtctttactttgtctaacaatgaaaataataatatcttttaaagtcccagaggtgccaaaggtagctgtcccagaaaagaaggtgcctgaagctattcctcccaaaccggaaagtcctccccctgaaggtaataatgaaactattcaaattagtgttttttaaaaaaatctttccttagtgttgtaaaaacatttttttgcaaactatctcagttttagtcaattctggcattaaaatgagctcatgtctttaaagtgttcgaggagcctgaggaagttgccctagaagagcctcctgctgaagttgtggaagagccagagccagcggcgcctccacaaggtacatggcaagaaagctgctaggacacctcggccactctttccccttcctgccctgataattctgggtgctctgagcttttgtcttgtttctcaatcttcgttctttctaaaacataccttctaattctttagtgaccgtaccacctaagaaacctgtcccagaaaagaaagcacctgctgtcgttgccaaaaaacctgaactaccaccagtgaaaggtattcctcactgccactaactccctaacaaaaaactttctttgaagtgtcatattctactgttctgcttcatgattttcacatttcattgaaaccatgagcttaaacaactactaatatcttttatagtgcccgaggtgcccaaggaggttgttcctgaaaagaaggtgcctctggtggttcccaaaaagccagaagccccacctgctaaaggtatatgtggctgtccactgtttgatgggggcggatggagcccccagcttctaaaagggttttgttctgtgtaaatgtgatgaatgtttactggtgattgtttctaatgttaaaatactaatatatttgaagtgcctgaagttccaaaagaagttgttccagaaaagaaagtagctgttcccaaaaagccagaagtcccaccagcaaaaggtacatgtcactaatgagattctgcagaaaagcactcacccttgtctaataagtcacctattatcaaaccttttgtttgcgagtcctcttaaatttgcaactacaaaactgtcattctggatttttagggtctgaatactttttaataattttttcattgactttaaaaagtgatatatttacttattacaagcattggaaaagtttactaacttggttcttttattcttaataggccatattttcctccccactatatgagggtccaaagacagatcactggccttattgtgaaatttgttcttggatctgtccctgggttatttgagcaaaatgtgaagtcgatgtggtataaatttaatatacttctcaactactcataagaaaaatgaattaatatctttaaagtgccagaagtgccaaagaaacctgtcttggaagagaaaccagctgttcctgttccagaaagagcggagtctcctcccccagaaggtacacgtgagaccggtgattaatgaccttgccacttgcgcctatttctaatttaagctttgttcttcttccttcctaactcattatttcttggtcattttctaacctttaattatttgtcttaattcatcattctaaattagctccaatctcaaatctattttgggttattggtccacagtatctacataagtcatagtaagctatattaaacaaagcttctccaatgtacatagaaagtaaggcaggagaactaatgattataaatgacattaaacactaaaagggctttgcaagcatttgaatcaatagacaaagaagtcagtgcaaatgagatagattttatctaaacaaaaataagagaaggtatcaattgaaacaaaggaagaaatcaagattactatttatcgtgtttagtgtttgtccatcttagaatattgttccatacattgaaataaaattaactaatatctttaaagtatatgaagaacctgaggaaattgctcctgaagaggaaattgctcctgaagaggaaaagccagttcctgttgcagaagaggaggaaccagaggttccacctccagcaggtacaaagcagaatccactgtatgggaaaatacagtcatttcatttttcatgtctatatatcttccttaaggcaaaatatcagtcttgtatcttgttgcctgaaatctgactacattaagaacaaaagttatttctacacataaaactttggacccacagaatttggtcccacatataccaagaaatatgtgtggtttttaattcattcattagcattaaatttttcattgtaatcacctaattctaaaagaaattcctattattcaagtgcctgaagagcccaagaagatcatcccagagaagaaagttcctgtcatcaaaaaaccagaagcaccgcctcctaaaggtactcatgttaaaatgaatacttcatttttgtggggtctacaattttacactcttcttattgtgtgttgtgttgtattatatgtttgttaactcttacctatatgttacggtgttgaataaatttgtatgtatatcttacatctcacaactttgtattattaaatgctactgatatctttaaagaacctgagatgccaaagaaagttgttccagtgaagaaggtcccaactgttaagaagccagaaacaccagcagctaaaggtattcacttcatcgttggcatcataaaaaagaaagtattctgatatcttaaagtggaatccaataagttgtcctcattgttgttgcataactaaggacaaaaatttccttattttgctttcattaattttaatgctgctccaataaatacaggttttttattcttaatattttaaaatgtttttaaatactatttttaaaacaaaactaatatcttcaaagtgcctgaggtgcccaagaaacttgttccagtaaagaaagaacctgtgcctgttaccaaaaaaccagaagttcttccagaaaaaggtacctaccatgaagaaaaaatagatttctctaactgctatttaagcatgttaataataggtcttagagaaaaacatactgaatgtgaatttatgttaaaaccatattgcacagaaaaaagggaaataatgaagggaaaaaaatgaaacagacaagcaggagtgaaaaaatgaatgggattcagttgtgctgtgatatatcacatggctacaactagtagaaaagaaccttctctcattcaatgtgtaaaacagctcaattcaacatattttgttgaatgttgaccattaacaagacatcatattagaaaaattaaggcctgattctgtcttcaaataagttaaatctggtgagaggatagaaagataacaggactctaatacagacaggaagtgattacacatagcaagtgaatacaaaagggctgcagaaacacacggcaagaaaagattaagttcaggcagaggcatcatgggaagctgtgttaaactgaatttaaattttgatggacttttacatgtagaaattgaggaaataaggccggatgtggtggctcacgcctgtcatcccaacacttggggaggccaaggtgggtggatcacttgaggtcaggagttcaagaccagcctggccaacatggtgaaaccccgtctctactaaaaatacaaaaattagctgggggtggtgatatgtgcctgtaatcccagctacttgggaggctgaggcaggagaattgcttgaacccaggaggcagaggttgcagtgagctgagataatgccactgcactccagcttgggtgacagagtgagcctctgtctcaaaaaaattaaaaaaaagaaattgaggacatgatatcccatggaaagggaagagcatattgaaaggcacagagatagaagggtctagaatgttcaaggattgtcaagtaaacttatgtcaagtaaactcaatttgagtatggattggctgtggaatgtcttgaaagataataccagatataaagatggggtcatattttggagtacttcaaatgccagtaaaaggcttgtacttttttctgtaggcaataggaagcttcaaagattttgaagcaggcttacatattaataggatttgggctttagaaagataactggcagcaatttcagctactaaatagtaaagacccattgcaattatttaaggtctttaagagttggacaagatccgtggcggcagaaatggaaagggggactgggtttgaaagagatggagacttagtggcctctgaccattatcaaaaccattagggaaattgaggagcccaagatcattgtaaggtttaaagctagatggccaaaagaatggttcattgggtctctgaactaacgttagaggaaaatggtagatgtgcttttcacctttaaagcataaaagttgggagtgtgtatcaggagcttaagaaagagatcaggcctagagatgtagatcttaaagtcattcacatgtaaataagaattgagtgtgcaggaacaattactcagaaaatgtagagcaaatttttttaagtgtcaaagttagaccaccttcatttaagtgtacacagaggactagaagcaaatgaagaaagctgagaagattcatatataaaattaggatgtccaaaatggtgccatgtctcagaagccattttccccatgaaatctaagatgaagctcttgcccctgcattctttgcctgctctttagacaatcttgcatgtcttctaaattcttaatagtaaacaaaatcatatctttaaagtgcccaaagtgcctgagaaaatcatcccagaaaaggaagtgtctgtgcctatccctgcagagccagaagttccacctgctgaaggtacacggcttctccataaatcttggaaagatgacaattgtcttcatcctcttgctttgattgtagatgaatcttacgtatttgtctgtctgtattgaagttattgatatttggggggtcatctgaataatctgttatagagtgttacttaatgtaactaggttgatatgttagaatagtagttgcagtattctgttctaaatatagtctaaaataaaatactatgttttttaaagttgaagagactcctgaggaaataatatatgaagaaaaagcatctataaccattggtagaaaagagactccccctgttgaaggtatatatatatatatatatatatatatatacatttttttaatctcctgaagattcctgttagaattacaaaagcatttacaggacaatattccttcttgaaattatatacaagagcagtctagcatgtttgactgctttatttttgaaatagttacacttcttttaagttagaatctttaatttagttactgttgttggtaattacaatttccaaaaggtacagtttactgaagcaaaatggaataattgccttggatcctcaaatgataacacggtatcaaattttaaaagtcatctcatttgccatcaatatacattgaataatctaattaataggcagttcaagtaaaagaactttttcttatacgtgaatttttctatacatgaatttgtatgaattgtatatttttattttgtgactgtaatctttgcatcaatgtgaaatttgtatgagtctttttgaagaactttacattgcaacctcatctcctttgtcaacattctttaaagaacgtgaaattgaaaagtatattaaacctgaagagcccgaacctgaaccacagcctgaagaaataccagtaaaaggtattcaatccagtggacttaaatcttctttatcatattctttctcttgaaatgtatatggtttatgttgttgtacatatgtagtatgtctgttcccatttgtatgtaaagtattctttgttgtaaatgtgagcctcattcttaggtttccatgtaacttgtactgtttctctcatgtcaactgtggcttgtctggatgctttgtttgttgttgttattggtgcctttgctgtatttctcatcatctttgtaaagggttgatatttttatgttttatgttctgtgttttatgttggatactggtattacgtaccttaaaaagtaaactttgtacttcatatatatatatatatatatatatatatatatatatatatatatataatttctattaaatatactacatatccacatgctaacatatacatatactaacacctctgaaatactctttcaagaacctgaacctgaaaaggttattgagaagccaaaactcaaaccaagacccccacctcctccacctgctccacctaaggaagatgtgaaggagaaaatattccaacttaaaggtaaaaaatgccacttccaaagttttattagcctgcttcaaacttctatccagccatctgaaatgatgcttgcaagaaatgtatgacttttagaagtgtgtactttcagacatgattgtactgtgagattgcatagagctgtgtcttctgctgccccatggttcctgggttgcttgtcatgccatgcctgctgctgcaaaagtcagaaagtacattgatagcgtcatccgggatatctgaatgcaggcactgtccaattaactttcttttgtggagtggggagaaagagttttctgatttcaaagcctgattgctatacatatcattgcgatcttatgcttaaggaatgtataagaaatccttgcaagatatttttaatattgcagtaacacatttacataaaagccaaaactttgttcttaaagaattgcatgtgcttttaaatatattacaagtaatatagttatgatttccagtagctgatatgtgcctatatatcatgaaaggaaagcatatgaatgacttgttacagttcccccatctctttttttttcttgcaacttaaagaagtgttctgtgtggttctcaggggagctggaaagagtggttatgaagacatttggtatccagcatttattattaaacttcccttcccccttcttatattttgatttttctatgaattgacacaatgttacttaattttaaaaatatcagtttctttaaaagctgaaataaactggcagaaacatattattcttattttaataaaaagttgtcttgtgacgtcatatgattccccaatctaaaattatctagatataatcttagatatgcactttccctatacagacctatgtatcttcaaaccacagtcttccagcataagacattgctgctggtgattcttgccctctacaaccctcatagccattagggggaccttctggcacctcttgaaaggccacccatctgttaattgacactccatgaagacacacacataaatacatttcccttaatgtaaaatatatgcttaaaggaaaatttcttcctcctgccaataacaaaaattgtcttctttttctgctggtctttaattaactactgaactttggagtaaaactgcagtctgttttcatggttcgaatgctgcttgtatgttctttgaaggctgttcttggctgttattaatgctttctggttataagcaaagcttggttttgattcttggagtagaaagttaatcacttgcttcagattaaatatacaaataacaaaagtaaaatcatattctttaaagctattccaaagaagaaagttcctgaaaaacctcaggttccagaaaaagtggagcttacacctctgaaaggtatttcacaggctgaaaaatacatacttatgtagtacccctttacctgactccttgctctttctgcctccatcgaatgttctgtctctctttttcaatgatcagagagtagtcccattcatttcttatatttctgtggcttttatggtcctggctcatgagtgttgcttcctttgtctcccatccatttcatacatgtatagacatggtctatctttgtctcatctacatatgtcttcttgcattttcctaaacttaaaaataacaaattttactggttagccaaaattgatatcaagagacatatgagattaaaatgctgagagctagtagtaaactgttttgacatttcacctgacataaaaattttagccaatgtaataagcactaaaaataagtcctatcttccttttatattattaaggttatttgtagggatttccttaggactttcatgtcactctcttctcactggctctaagtcattctctgaggggtacggaactcacatttcagaaaaatttccttattactgtaggtaatttttcaaaatgtatttttctgtaaacaatattttccctaataaggtctcatctaaaattagaccctaaagaaaactaaatgaattataagagtctagaaaacatctatcaaaaataaacataatttttctaatgggtagtagtgttctgttcaagtaatcaacacattcagacctagaaattaagactgtttctggtcactctgaaattttggggaaaaaagtcacccatataaatatacatttcctgatttcataaagaggcaattacaaaataatgttatcatggatattgatcataaacattaaaatagcatataatcacatataatgactttaaaaataatagctacaatgttgggttctcaaacatcaataagatttttaaaatcaaataataatataaaaaatgcacagatatattttcactatgttcattatatcagtaaagaaaatctatattatgcctcctcactttacattaattagatgcatgtgcttccttctgggtttgagcaataaaaatagttattaagaagattggtacctctaaaatagtattgaaggccaacacaatttatcctggataaaatacgtaatgtttaactttaaaatttttacttaaaatatttgacattaaaaaaatgattattcaaaatgaaatacatatttgcctattgtaggtttaaatttttgaaataagagttaagcagttatctttatcacataaaaaaccatttaatgaattgcaaatatcttgtttaaagccctaaataggaagttttatagaaatatctaaaaattcagattcctaatagcaaatagttacacaatacaaataaatactgttttaaattagattttaattgacattagtagagaggaaaatggtttaataatcaccacgtgttcctttctttcaccattcaaatctatgagggccataatagcaaaagaggctgctctataaaatagcatcatccaccatgctcagtattcactgtagacgcaacaggaaattttgaattccttgcgttccttaatttgaatgaatttaagaacattttcttattcatgaaaaacgagcttccaacaccagctttgaaattttataattctataattttaaatattttatccagcattatttcaaaaaggaaatcttaagaaaggctactcttcttctgttcagaaagtgagatatggcccttccccagcatcaaagtcacaaaccggaactcttggccaccttcttccctcagtggagaagactgaatgatggcactaacacttgccagtatcattttcatacatttagtggttgggtagataacatcgtagatttggacaatctacaattgcagtttgggacaaagatgctgtcaagaaccccgtaatttgatgaaagattcataaagtcagtatggagcaacatcctctacatgcatttaaaatgaatacatttgcctgcagttaatggagttgaatttcatcacaaggctgtatagatatttgcagaggagataacttgaaatgtatcatttaaacttaaattctgtggtatttatatgcagcgaaaattgttacttaatgcactacagttaactagttttaggagagacatttttcttgttgaaattccgtttttatataaattcacttcaaaatttgaaatcatattcttttaagtgcctggaggtgaaaagaaagttcgcaaattacttccggaacgtaaacctgaaccaaaggaagaagttgttctgaaaagcggtatagtatttttcaaccattctgtcagcgttaagtatattttaaaaatgaacttgaaagcttacaaaatgtttctgtcctttggttttctttgaattggttcgctatttatcaaaatttgtttgtagtttcattgaaaattaagaaaaatgtcatttccagatctttttttttaaaaaaaaaagacagaaattttgtgagcattcacagtattttgaaatttaaaatgttaatagacataactaagttgataatattctaaactaacaacaactatgactgccattttcataaccaaattatgtagtaaagtacactaaacctattaaataccttacatgaaactactttagcttaaattcaatattcagttttaaagtgtgacacaggatcaccacaactaataaataacatttttaaaaaactgaacatttctttctgactaataaaatattaaagaatgagaaacaagatagtcaaatgaagaattaagttctaacattgtcttcacatagaattactgatttttaggctacatttcttcagatatctctgcttaagtaaactttctacttatttacatactcattaaatcattaacatttaattattattataattcgttgctattcaaattattcattttgtgttggagctgtttctcccacagacttgtctcagaatagaccctctatctagatagaaacaaagtaactttgagtgctattataattgacaacctttgattttaaaaaaaacaaaacaaaaaacactttcggtgtaaatgcttactttccagagtgctaggtagcatgctttttttcattttccttgctttgtacattatttgcatttgtcaagcttattcaacatcttcattagtttgtcttggtttacatataaacctttttgtctttaaagttctaagaaaaagacctgaagaagaagaacctaaagtagaacctaaaaaactagaaaaagttaaaaaacctgcaggtaggaatctcagtgacaatttgtaagattatcttttaacaaaatggacatttaacaaaaggtttatcttgcaaacataaatgaagttagatgtaaacatggcttcatatttcatctgtgatgtagtctctgttttccattgtctgctttctgtttaaatatttttatagtaattcccaaatccattcatgtatttccctgcacttcattcttatcattactttgcaacttaagttcttccagtagaaatgactgaaataatcaagtggctattcatgggagggtgtcagcaaaggtttcataatctgggggcttttaaatgggttggtttttatcattagcctattctcaaagggcaaaattattgggaactattatagaagtgatttagaaggagagagctaaggggagtggaagataagtggatggaataaaaggaagaaaaataaatggaagcagagtcaagaaaataaaatagaaattacttgataaactataaggttttttaaaaaaccatccatagagtttttgaaaaataaattgatatttcagatgaggtgcttcctaaatattcaaatattaacactgaaaaaataatcttatcttaaagtaccagaaccaccacctccaaaacctgttgaagaggttgaagtacctactgttacaaaaagggaaaggaagattcctgaaccaacaaaaggtacaaatctactgtcattcttagttgtctctaaaaatgcaaatatgtatcatttaaaatatcattacactgacatcaagatttgaacacatgaccttaatctgttaatcacatatggcttaattttctttaccatctcactctcctatgcaattggctaatgattactcagttgctaaataagttacctgaaaaaaaattgtatttatgggcaatgagataaataacaacattaaaaccaagaacattgccttactatattttccaaatattttgtttaaaatgaaaactaatcaaatacttgatttgataattatatgtatataaattctaatatcttccaagatacgtgggcttaattttagttttgactttgtgaaaaacttcaaaaatcctgtaataatctgccctctactctaaattatttcagtgcctgaaatcaagccagcaatacctctccctgcacctgaaccgaaaccaaagcccgaagcaggtgagcaagcttatcctcaatgtcaacagcatattctttctgtattcacacacataacatgtacttaataaaagatagtaggtgaaagtcagtatgtatcaaatgatttctaacgtctcaaaatgcttaatatactattctcttaaaaactagttatttgaagatttcaaaattatatcagaagaggcaaataagctaccaaataagtttttaggaagtgacaaattgatacactaatgcaatggacttctctctacagaagtgaaaacaatcaaaccacctcctgtggaacctgaaccaacccccatcgctgccccagtaacagtgccagtggttggaaagaaagcaggtatttatcctgtagctttctttttgctagtttgttttggtgacttaataaaagtattcacacttgattaaaattcaagccctgtttatgctgcaacataggtatcatttcaacttcggaggtttatggtaagtttctaccttttcttcatgtgatatcctttatccaccttgtctcttgcccagtgggtgaatattgtgccttaactggaatgtacgttcctgggttgcaccatttctttcatatgctttggagattaagtaatgaatatgtttggggctgataaaaactaaggagacaggcagagaccctgtaagggtatacatataagaatcccatgaagcttcaaatttcccttataccctattggaacaatttctcttttttaaaaaagtgtgtatattgggataatgtaaaagttctggaaatggatagtgttgatggttgtacaatattgtgaatgtatttcatgcaactgaattgaatacttaaaaatggctaaaatggtaaattttatgttaggtatattttaccacaataagaaagaaaaagaaaaaagagactccatatttcagtcttttaatctgtataaggaattagatcaataataattttcttaaatgttctaacttaatgatataggtatctcaagtccaaacttaaagcacctattaattgtatatgaactatttagtatagttcatcatttaagtgataatttgagatataattgatcaaaactgatttgatgtgtaattgatagtcattgataaacatacacatcctgactatttgccctttggctcactatctgggtgatgagatcactcatatcccagacctcagcatcatgaaatatatccacataacaaaactgcacatgcatcccatgagtttaaaataaaagttgaaattatttttttaaaaaagaaacaacaaaaccaaaaataaaacaaagtaaatttaaagcgggggcggtggtggtggggtggggagaaggcatgtattgataattttctaagatgtgaagaatctaagatattcaatataatgccttgacaatttgttcctatggaaaaatgatcatctccactgataaagcacaaaataaaaaattcagggtgaatttaaaaaaaaaaaaagagaactatttgttacattccacagtgagatgtgcataggccccgggaataacatttagaaatgtccataattgtttgacagagaaattttttaatttaattttctgaacctaataataaaaattggcttatatctttaataaatcaataaataaaactatttggaaaaattatattattttagattattaattcaataattagtcattttatatttgtttatatatttttatataaattatttagaaatttttttatttaaaattatctcaaaatatttggacattaccatgtttaatgacataaaaaaatacactatattcttttgactgtagtttaatttttaatatttgtgttatattttgttgctgatgtttatgatttgggcatattcttttaaacttttataatgtcaacgtagtacttttattattcagaaaaaggtgatgaactgctcttgtctaattaagtatgtataaaaataaagctattctcagttatcctgggggctgaagctagagaactcattccacagtttatactgtccctgtattaataatggaatcaaactctaaatgtcagaactctcttgcttctgccttacttcattgtctaaaggaaatcttcaaagaaactcatgcatgtgtggtacatggactctttttccttagtcttccctggatttgtttgtctgcccaatttagacataaaaagaaaggcttttggtaacctctcagccatttcccttttccctacactgatttattgacaaaaccttatttccttggttcacataatcaggacttacataaacatataaaatattttgcacagctaggcaggagcaaaacttttcctcacaaggcaacagtaagccttccaaaaatgggaagacaataaggcacttgctgaaagaagttgttaatcctaaatatgttggcagtttagcttgagctcttcagtctcagaatatgccttcctggaaatgtgattatccatagaagtcatataaatgaaaccaatttctctttatgcgttaatatttataatggagcatgactcaccctccatggtttactattaaacatgaaataagtccgaaaagtgtttaaatgctgagttttatttttatttcagaagccaaagcacctaaggaagaggctgccaagccaaaaggtcctatcaaaggtgaaattcatttttctagtacttgcattgtaaccttccactctgaatttccaaagttcatattcaaggggaaaaaaatttcaaaattcataacaatttttattttttctaattgattctactaaaactagcatgttttctggtatttcaaataatacttttagtattatgcaaggagatatatatatatatatatatatatatatatatatatatatatatatatatatccaactatattttagcatagtgaatcccataagttcttagcttcatttttcatatgcatggtatttatacatggcagataaaataattagacattaatctggctattttatacttcagattaaaacttgagaaaagggacatttattattcatggattccttataccatctcattttcctgcctgaaacaaggcagtataaactcaattggcctttcaattgcctggtctttagttttctcgtcttctaattgctttacggctggttttatccagcaggcagccaagtatgaactttctgactcctaaggagatgccaaatcaactttttattttactttgaattaggtgtacccaaaaagactccttcaccaatagaagccgaaaggagaaagttaaggccaggaagtggtggagagaaacctcctgatgaagccccgttcacctaccagctaaaggctgtgccactgaagtttgtgaaagaaatcaaagacatcatcttgacagaatcagagttcgttggctcttcagcaatctttgaatgtttggtctccccttccactgcaattacaacctggatgaaagacggtagcaatatccgtgagagtcccaagcacaggtttattgcagatggtaaagacagaaagctgcacatcattgatgttcaactttccgatgctggtgaatacacctgtgttttacgtttgggaaacaaagaaaagacctccacggctaaacttgttgtagaaggtaatttctagtcttctgaacataatctatattaaactttaatgtaacaaaccttagtagcaacttgcattgtagttttacaaaacctcttatttccaagttttatttcattgaaaatattgtatttattgaaatatatactgaaattctccatagaacttcctgtgcgttttgtaaaaacactggaagaggaagtcacagtggtcaaaggacagccattgtacttgagctgcgagttaaacaaagagcgtgacgtggtctggaggaaggatggcaagattgtggtggagaaacctggccgaattgtgccaggcgtcattggcttgatgcgggccctgaccatcaacgatgcagatgacacagatgctggaacatacacagttactgtggaaaacgccaacaacctggagtgttcatcttgcgtaaaagtagtaggttagtactttcctgggagatttcgttctgcttattgttacactaagaaaatggaagaaaggacctcgtttcccagtattacaatatcagaaatcttgtacctaagaggggaataacaatatatcctacagtggattaattatgcccagtattgtgaaatttttcctattcctgaaatttactaaggaagctatgtatattacttgttcagaccttaatcattttttctgatcttattttcatatagaagtcattagagattggctggtgaaacctatacgagaccagcatgtgaaacccaaggggacagctatttttgcctgtgatatagcaaaagatactccaaacattaagtggttcaaaggatatgatgaaatccctgcggaaccaaatgataagactgaaatactgagagatggaaatcatctgtacctcaaaattaagaatgctatgccagaagatattgctgagtatgcagtggaaattgaaggaaaaagataccctgcaaagctgacacttggaggtataaaatcttaccttttattcaaattataagttttgcgtatgtgtaaagccaaataacacaccaaaacacataaaagcaaagcatcgttgggttgtctaaagcattatgttacttcatccctgaccaatacagagcgtgaagttgaactgcttaaaccaatagaggacgttaccatttatgagaaagaaagtgcaagctttgatgcagaaatctcagaggcagacattcctggacaatggaaactgaaaggagaacttctaaggccctcacctgtgagtaatttcacattttaaattgttagtcatataaaataaccacatccaatattcaggatctatatcctagattcgggttgctttaataataatggagttaatggagtcttctaaagtctccaagaaggaaagaaattttacgtatcatttggggacaacttgaacaatttgtgtaaaatgttatgacagggaattctctgcttacttttattagtagtaatttttaaaactctatagaaatttgtatctgaaacacttctcctatagggaatttatctctttcaaatggttactaaaactattgtttttcagacttgtgaaatcaaagcagaaggtggaaaacgcttcttaactttgcgcaaagtcaaactggaccaagctggtgaagtcctctaccaggcccttaatgcaattacaactgccattttgacagtaaaaggtatggggcttttagaatttggggaggggtctcaactttatttcacttccctgtgcattctgaaaagcctcattcttaatgtctgattttcagaaatcgaacttgactttgctgtgcccctgaaggatgtcactgttccagaaaggcgacaggctcgattcgaatgtgtcctcacccgagaggcaaatgttatatggtccaaaggacctgatataattaagtcatctgacaaatttgatatcatcgctgatggaaagaaacatattcttgttattaatgattctcaatttgatgatgaaggggtctatactgctgaggtggagggcaagaagacctcagctcggttgtttgtcacaggtaagcgagctaatgagatctgtgacatcccataaaggcatgcaaatatatgactttaaagataggacgccaagttctaaaagctgtgataatgcatcactaattaactttcacagtgttaccaaaacaaccccccttaatttgtttttagtggagctctatttggaaagatgaataaataagtgccatgtgaaatgggtcccttttactcaggcagattagaatggaatctttctgaaggtgaattgtgtttctgaggcattatctatgcttgcatttcaggtataagactgaaattcatgtcacctcttgaagatcaaacagtaaaagaaggtgaaacagcaacttttgtttgtgaactttctcatgaaaaaatgcatgtagtctggttcaaaaatgatgccaaactccatacaagcagaacagtactcatctcttctgagggcaagactcacaaattggaaatgaaagaagtgacattggatgatatatctcagataaaagctcaagtcaaggagctgagctccacagcacagctgaaggtcttaggtaaatgtaaccaagtataaccagatagccagtttctgaatcatgggagtggggagtaataaaatattttgcaaccttttactctttaataaactttaattttcacattcttctaattttatgctaaatgtcttttacagaggccgatccctacttcactgtgaaattacatgacaaaactgcagtggagaaggatgagattactttgaagtgtgaagtgagcaaagatgtaccagtgaaatggttcaaagatggtgaagagattgtcccttcacccaaatattctatcaaggcagatggcctgcgccgcatcttaaaaatcaaaaaggcggaccttaaagataaaggcgaatatgtgtgtgactgtggcacagacaagaccaaggcaaatgttactgttgagggtgagttgctcaacaatgtaaaatttaccctatctgaatctgcagtttattagttcagtcatgctaacaaaactgtatcatttcagctcgactaataaaagtggaaaagcctctgtacggagtagaggtgtttgttggtgaaacagcccactttgaaattgaactttctgaacctgatgttcacggccagtggaagctgaaaggacagcctttgacagcttcccctgtaagtcaagattagctaattatataggagaggggttgcttggttgtgtagggtgaaaaaaggcataaaatatcttgatgatttgtaggaataactatataaatgatgttctttctttccttctaaccctcactccaaacaggactgtgaaatcattgaggatggaaagaagcatattctgatccttcataactgtcagctgggtatgacaggagaggtttccttccaggctgctaatgccaaatctgcagccaatctgaaagtgaaaggtatgctctacttgtcagccacgtttttgtattttctctgcaagacttcctgatacacccctgcattgatcaagggtcatcaatggaaacgtattctgacttcatccactgtccacttctttcagaattgcctcttatcttcatcacacctctcagtgatgttaaagtcttcgagaaagatgaggctaagtttgagtgtgaagtatccagggagcccaaaacattccgttggctaaaaggaacccaggaaatcacaggtgatgacagatttgagcttataaaggatggcactaagcattcaatggtgatcaagtcagctgcttttgaagatgaagcaaaatacatgtttgaagctgaagataagcacacaagtggcaaactgatcattgaaggtaaatagttttatcaaatagtccaccccaaaatcattttttttgcctttagttttatatttcttctttaaagtgcttcaattaataagttctttcttttttttcttgataggaatccggctcaaattcctcacccctctcaaagatgtaactgccaaagagaaggaaagtgctgtatttactgtggagttatctcatgataacatccgagttaaatggttcaagaatgaccagcgcctacacaccaccaggtcggtctcaatgcaagacgaagggaaaactcattcgatcacattcaaagacctgtctattgatgacacctcccaaattagagtagaagctatggggatgagttcagaagctaaactcactgtgcttggtaagtgctttttaaattttaattttactgcattaaattcaacagaaatttgtggagtatctattctataaaatagtcttctaagtgttatattgcatgaaagcagcccaactccttaagaagctatcacatatgtaatcaggcttatttctaaaacactttaccttcattactataagttaatgaagattctagcttacacccacaaaatagccaattaaaagccaacttaaaattcttcattaattattgagccctgtcatgtttaaaataggagtatataaatactttctatctcttcattttatcaaaattatttcagaggaatgtttttcaagtgtcccataagagaagatattacataatttacattaataagcctcattgtttttcttggccacctaatatcaacaagattaaacatgaaggctaacatatatagacatgattaaaggcaaactattaattgattaagaaaaactaacaatgtgaacctgaaagcttaaaagtaaactagacataatagagttgctaagaattagaaatttacccaaataatggaggaacacaaaattgtatttgaagctaaatttcagtctttttagctactgttaataaaatgtttcaaaattcaatatgaatggattagatcttgataaatcccacacactgattcccttcctaatatttagagaacttttgaacataaacaggttaaatgattgaacacttgacacaattttaaaagatactcagaactctgtgagttgtgtcttaaactttccaagagattgtcatttccctaaggtgattaataaaagcttttcacttatactttacttgcagagggagacccatattttacaggaaaacttcaagattatactggtgtagagaaagatgaagttattctacagtgtgaaattagcaaagcagatgcaccagtgaaatggtttaaggatgggaaggaaataaagccatccaaaaatgctgttattaaggcagatggcaagaaacgcatgctaatcctaaagaaagccttgaaatcagatattggacagtacacctgtgactgtgggacagataagacctcaggaaaacttgacattgagggtaaggaaatttccatgagtttcactcttgaagcattggggttatttgtgccagaggctaatgacccatgctggcccttcacttttctagatcgggaaattaaactggtgcgacccctgcacagtgtggaggtgatggagactgagacagcacgctttgaaaccgaaatctctgaagatgatatccacgccaactggaaactcaagggagaggccctactccaaacacctgtaaggctatttctgaacttgtcaacacctaaaggagctgtgtgaattagaaaagaacaggtgaaagtcagagtggatgcaggacatttaaaacatgatagcagtttctctatcagaccctaagccaaagagagatgtcagggtctatgaatgggctcagactggcacacttgcattacttttgatccagcagagtgagtataaggttgtagatactctgtgatgctgctagttggctcagaattatacagctaaaataaatgtggctttcctcttagtacttgtaagctttacttcctaaaaaaagagctcaaagttatataaagtttcatcaccatttatttgttgcattcctttaattaagataatctatccttagaacaaaatttcaaagaaaattattttctatgaaagtttttctgttttgttggtacaggattgtgaaattaaggaagaaggcaaaatacactcccttgttttgcacaactgtcgcctggaccagacgggtggggtggatttccaagctgccaatgttaaatctagtgcccacctccgagttaagcgtaagtattgtatatttttcagggaaattaaataaacactttttcagaaaatgaatgtgagtgaaattaattggacctattttattagttagaaaatattattaaaacacaaaaactggctctcttgtatttgccactttgacattccaatacagaagtggttcaaatcgtaaagttttggaaattttgttgaccttgccatttgaacaaaagaaaatttagcaaatcagattttcctgctctgtagtcctctcattgaaagtagatacacatacaatgagaatctaactcagaacccttaaagaccacttccctcaagtggctgtgcaactagagcaccagaaagacaagctttgctgtgtgggcattttagattcaagaaagaaggtgggaagcattaggctaacgtttctggaaggtgcaaagtgtttgatggatagggacagcctctgattgagggccccttgtcctctcccaatcagagtcttagttattttggaagtcacataccttatgtagcaagaagaacttgacgcctggcagagagacagatgcagcacagatttctcgctgaccttgtacgtcagaacgaaagggcccctacatatactcgctctctggctaccagctctccccttctcagcgccgtggggccacgttcacgtgggagttaaaatagtggccagtcctgtggcttcttgaagaaagcaaccatgaagattcatatctaagtctctatttattcttttgggattacaaaatgagtaacgcaaagctgtttcttccctctcgaaaagcacgagtaattggtcttctgaggcctttaaaggatgtcaccgtgactgcaggggaaacagccaccttcgactgcgagctctcctacgaagatatcccagtggaatggtatctcaaagggaagaaactagagcccagcgataaggtaaaaagcaggcatgccttgtctttcccgttctttttctggagttcttccaccttcacttgtatgttccttattctttgctctttctaatgtctcttcctctgtctttgcctttctctttccgcctttagcctgatttctgctgaaactgtaaagccaattttttgcattttttcttaggtttaacctgatgatttttttattgaaattgaaataaatttaaagtatgatcatgttttagttttttgaagaaaagacaagactcattgactatgaatgatagtttgattaaccagaaggcaggaaggatcaaaaaggctttctgattgcacgctctgcagccatggtgcacattaagttttaagactaacgctctccatcctatttagtgttctgcatataaggggattaagaggagaagactgaaattccatttcgggcagttgatcaagtagttgagataacttctgggcagatttgctcttcaagcatttctccaaagctatttttaaccttcaagtgctctgggctgtgcgatatctggaatgcaagtggactatttaaagtgcaactgatggtactgacaagaaagaagggctctgtggttatccacatatgtggatgaaatattttttttaagctttggtaaataactagctcctgcttttagcttttactaacattctttatgcccaagattttacccataagtaaaaactaagggattattcagataggcccacaatacaatttgcctaaattgatctatatgttttgtccccagaaacaacatatgtctttaaattatcttgacaatccatcattaattttgaattcttaaaataaaatatatggaatatgtccagcctgggttggaaataaagcacaggacagtacattgttctgtgacatattcccccaatatttcagaaatactattaaatgtgctataaagatctcaacaaaaatcaaactttgaagacttaaaggaatataattaaaaagtgattcagtttaacaaaaagccacagcactgactgaagtatttgaaagcaatgccttcaagtaactgctttgaaacaaacaaacaaacaacaacaacaacaacaaaactagtattccactaaagtgattacagggtaattcaccagcagtcatctgataggtaacgcctgcctgttatacagataataagatcttcttggtctccttttccagtgaccagaaaaagcagcagtacattccatttgtagcatgggaattaagttacatatcacaaaaccttccttacaatgaggtcttctaaatattgaactgagggaggcacctctaccttcaagcttattgtttgaaaaaatatattttgcctatcatgcatgatttaattaacttcatgtctaaaggcagagaattggttgctttttcaagattctttctagatctgcaaattcatgatttatatataggaacactgcttaaagacaaatgatattattttttcattaccaaatatctttttgtcatagtaagagcttcttattaaaagatcagtctcagttctaatacaaaaactgcactattttaattcaaatgtagactcctaaaaatcttattcacattttatttttaaaaaattctcattgtaactaaaattttttctagggttagaaaggatcagtttactataattctatagggcccctttacatctcttttggcataggaattttaatcctttactctaggcacccgaaataccttagccttttgtgaacttgctcttgcattacttaaatgtctcttttcaaaaagaacttaaatataaactttgaagtaataaaatcattttgttacatgtggcagattttgtttaaattaagtctgtcagaacaaacttgctcttgtcaatgtaattccgaactttaatactcattttatgtaaaaattttcgccttcaaaactacaataaccaaacaagcaaaaacaagctgtaggaataggaaatatgaagagaaacttgtagacatgagttgtttgcattttttctttgttgttgtagttgtttttggctgtcagtttaagaaaggactgccaagttccaaatggcatttgataattttaaagttaaattttaaatttgataaaattaaagtttaaatacaaaactttaatagttttgtcatggtcataagcctaccgtattatattaatatgcttccactataaataaatatttttaaaatctctaacattattcttacaatctactgcaaaatcttcaacattcatttcattggtttatttttataaggcacctaccagttttccttttttttcttttaacatagtggaggtagattgtatacaagctgtttattgagacatactgcattctgagcagtgtcctagagtagctacagaggaactcagatgataaagcaacataatattaatagataaaatatatctgtgggtgggttagaaactgagacaccttttcaaatagccaaaagttgcatgccaaaatttatactgaaatgttattaaaaaaacaaatttttcccatttcagcaccatgccctcggataagtagctctgttccaagggcatatttaactaccccctcctagctgttatttttccttattatgttttttggccactctcaattattaagataattatgtgactaaccatgcccagttcttaattaaagaaaacacttttagatgaaaccttatttctgattcttttctttacactagcataacaaatagttccactggtgaaaaactttacattatttttaacgctaagtaaactcttaagcagtgcaaaatcagtctggatgacagggcacagcttcttaggaattttatatcatagaactggaagaacccccaagtctcttatctttgctgtcagaatgacccctatctgtcgcaccattgacatctgattttcccattcctgatgcttagacacatgaaaaaggaagaagagtccaactttcatttgcagttttgaacaaaattaataggttgtacaaattatttaatcacaggtttaattggtttgcaaaataagtttaattgctaaaataaatgggaagaagagttatagcttgttgttgcatggcaaacaccttacatacagaacataaggtttacttttagcttgccatagctgatattttctttcatcctttcatgaattcgcttttctaagttcttcctttatatgtatataagcccaggggcagaatgggggcacacatatatatacacatatacgtatatactatatgtgctgtatatctacgcatatgcaaaaaagaccacaaatgtaaacagaaactggcctgggcaatttcaatgtgaaaggccacctagtaattatataaaggtaactatgaaaccctaaaattttcttgaaagatcccaaactgcatagtattccatggtgtatatgtgccacattttcttaatccggtctatcattgttggacatttgggttggttccaagtctttgctattgtgaataatgccacaataaacatacgtgtgcatgtgtctttacagcagcatgatttatagtccttatacccaatgctagatgatgagttagtgggtgcagggcaccagcatggcacatgtatacatatgtaactaacctgcacattgtgcacatgtaccctaaaacttaaagtataataataataaataaatttaaaaaaaagatcccaaactattggttgaaatgatttttgaatgcatacgtgctaaatagatgattataaaacaacttggaaagctctatttccatttatttttatctaaatgaattaaatgcacccatatactagattgctgtttcatgtattctttttttaaaaacaactaggtggtcccacgttcagaaggaaaagttcatacacttactctgagggatgtaaagttagaagatgctggggaagtccaactaacagcaaaagatttcaaaactcacgccaacctctttgtgaaaggtaattacaaggcttattttaaaaacatgtataaggcagaggctcatgaacaatgccaactctcaattatctttatatgatgagtactatagatgtttaaaatcaaccaaataatcaaaagtctgattttactttttagcataacaaaataattcacagactatctttttaaagagccaaaattgactagcataggttttacttcctccttccatctctattgtttttattgcacatcctagattttcaaaagccagctggaggaagaattattatcaagctaggtatccatcactttattaaccaagagttggctgttatttccttaatgtttcctagtttttaaaaatgattttcctcttgtctgtacaaataatgataaaatatcatttttagaggaaaatgtctgagtgtaatcaaaacttgaaaataaaacttaggacagaacaaagccctggagatggcaggggaaagttgagaaggtaccaaaactcttggagaaggaaaggagtaccttggctaatgagtatgattctttcagaacccccagttgaattcactaagcctcttgaggaccagacggtcgaagagggagccactgcagtgctggagtgtgaagtctccagagaaaatgctaaggtgaaatggttcaaaaatgggacagaaatcctcaaaagcaagaagtatgaaattgttgctgatggcagggtcagaaaacttgttatacatgactgtaccccagaggatattaaaacatacacttgtgatgctaaggattttaagacttcctgtaacctgaatgtcgtgcgtaagtattcttcttacaaaggacttttcatttgcaattctttaataactacaacaacaaaacaacacaacactttttgcatgcccttcttggcctaactgcatttcttggcaacttctagtattgacactgacctaacctgatcctttatgtgtttaaagaaaaaaagaaaagaaaagtcttattctatgtctggtctgattaatgatggagcaatcacttttccctatgcttcttttctctcactgagtagtgagtagatgtgctctttgtctacatggggtcagcctactgtatggatatcctgatatggatgaggagaaactgaattttaaagataagtagggagtcctaattttaaaaacaaagtaaaagtgatttccatgtggaaggaaaatgaattttcaggtgtggggaacaactagaaaatgagcatgaaatttcagtctgaataggagcatactagagatctgctgtaatatgacaaagcacattcacatgattcaatctctgagaataagaatggataagaagatggagtgaggccctggatcttttgagtcctggactctttgaatgaagagaactctaatggtttttaacattacttcttcctctggtgaaaaatgtaatgtcttttttcaaaatgccacatactagcttatttgtttcattcattcctttgtccagtgatgacatttttctgcaaattttttgtgcaatatttgtttgtttggtttggttgcttcccatctgtcaacagctacaacctagtgactctgtgcttcatgcatcttgtaccatgtttttcttaccactttgtggttgctctgctcaagcttatgtcaaagtagcttcttgggtctccttcttcaccttgacatctaccttcactccaagaaggctcagctgcaaggagcatattttcaaacctattagacagcatttgtctcagaatcttattgctcaagaatggtcatcttgggaaggactcacagggagctctgaaagaaggaagggcaagggggcagctccctaatcctatacaccagctgaattaattctacagatgaatgaaataacagatgtaaaatcctaatcaccctcccatacaaaacacattgctttattgcactaatagatgttatgcctgacttatatgtgacgtcttcaaagctgatttttttaaaaagctaaatgtatgtttcaattacagcctcatgcctcttagccatacacaaggctggccatagtgcttcacgtgttctatctttgaattctgctaatttctcaaagattgtgctaagtgccttaaataagacaatgtttctttgccactggtgtctgaagtttcctttgacattatctttcaagtctggtgcagtgcaaatgaagatttttcctccagctattattcaaaagaactgagatggctccctagtatatatactgtacacacacacatgcacactagttgaacatatagaatgccacataattttatgtaaactaaagagatatctaaaaagcaaagcatcatacctgatgggcagcttcaagtgatttcaaagtcagttgtagtctattaagatggaaaatccctaaaaaagagtcactttttcttaatgtatactatggtaatgtcagagtaaatttccagaaacctcattttgaattctgatgacattctcttacagctcctcatgtggaattcttaagaccactcaccgaccttcaagttagagaaaaagaaatggctcgatttgagtgtgaactttcccgagaaaatgctaaggtctgtgactgtatacctgtcatcttgtactgtcaaataactttatatttacttttggtctagccaaaatggaaaaaaaaaagttagtcacaacttctctggtcaccactttacttttaaagataattgtagtataaaatgtattcttgactttaattgctctctttttagtattattaatttactattacttgaaaaacactggactcacaatcaggagatttagatattagtttgaaccatatgaaagtgctgttttcttagatcagaaagtcaaatatcagcaattatatttctttcaactaagtacctcctgttgctattaactaccattggcaagtttcttcaagtctgagccttagtttacacatccaagaagttagtctgcataatgtctaaggctcactatagctctaaacttatatgatcccattgtttttaataactgataatagtatcacagcagctaacttaacagtaattggtaagattgttcttgcttttggggtttgtttatatttgtgtctgccaccttggttcttcttcacactatgaagtcttgttggttgctttcagaaaaactcaggatcatagtttttcttaaggacacctgtgtgaaggaacaacaagaaaactgataatctatttatcttaaatataggttaagtggtttaaagatggtgctgaaattaaaaagggcaaaaaatatgacatcatatccaagggagcagtgcgcattcttgtcatcaacaaatgtctactggatgatgaagctgaatattcctgtgaagtaaggacagcgagaacttctggcatgctgacagttctgggtaagagtaaagtcattctttgtgaagtatatgtgttgggaaaaaataataatttccagcttaactcaatgtggtttttgttttttcaatgcttgcagaagaagaagctgtctttaccaaaaatcttgccaacattgaagttagtgaaacagacactataaaactggtttgtgaagtctccaaacctggcgcagaagtgatttggtataaaggggatgaggagatcattgaaacaggaagatatgaaatactgactgaaggacggaagagaatcctggtcattcagaacgctcaccttgaggatgctggcaactacaactgtcgactcccaagctctcgaaccgatggcaaagtcaaagtacatggtatgaaaactacagtgaataatcttttatttctaacaattcacacttgctagatttaaagtacaaagacatatgtttctaatatcttgtaactttttcttcccagaactggctgctgaatttatctcaaagcctcaaaaccttgaaatacttgaaggagaaaaggctgaatttgtctgctctatatcaaaagaaagctttccagtccagtggaagagggatgataagacacttgaatctggagataaatatgacgttattgctgatggtaaaaagagggtcctagttgtgaaagatgccacattacaagatatgggcacttacgttgtcatggtaggggccgccagagcagcagctcacttgacagtcattggtaagtttgttcttgcttttagggttttttgtttgtttgtttgttttgtatttgtatttaccactttgatcattattcatactataaagtcttgtcggttgctttcagaaaaactcaggatcgtagttcctcttaaggacacccgggtgaaggaacaacaggaagttgtcttcaactgtgaagtcaatactgaaggtgccaaagccaaatggttcagaaatgaagaagctatatttgatagttcaaaatacatcattctccaaaaagacctagtctacaccctcagaattagagatgcacacttagatgaccaagccaactataatgtgtctttgaccaatcacagaggtgaaaatgttaaaagtgcagccaatctaatagtagaaggtaagtaatttatataccactagagattttttcatcagtttctgttataaaaataattaaaatcaacatatttttctcctttacaacagaggaagaccttaggattgttgagcctcttaaagatattgaaacaatggagaagaaatctgtcacattctggtgcaaggtgaatcgtctcaatgtaacactgaagtggaccaaaaatggtgaagaagtgccttttgacaaccgtgtctcatacagagttgataagtacaagcacatgttaaccattaaagactgtggcttcccagatgaaggtgaatacattgtcactgctggacaagataaatctgttgctgagcttctcatcatagaagccccgacagaatttgtggaacacttggaagatcagacagtcactgagttcgatgacgctgtcttctcctgccagctctccagagagaaagccaatgtaaaatggtacagaaatgggagagaaatcaaagaaggcaaaaagtaagcaagatctttttattctctatttctgtagctatatatacacttttgacaatttagtggccatcattgcaagctaactgataatccaatgtctcctttagatacaaatttgaaaaagatggaagtatacacagactcattataaaagattgcaggctggatgatgagtgtgaatatgcttgcggggtagaagacaggaagtctcgtgctagactttttgtggaaggtacatattaagtgaaaaaacaattctaatgttaccaattttttaaaattgttaatcaaaatgtaaacatatttgtatttatttcacattttctttccagaaattcctgttgagatcatcaggcctccacaagatattcttgaagcccctggtgctgatgttgtctttttagcagaactcaataaagataaggtggaagtccaatggctaagaaataacatggttgttgtccagggtgataaacaccagatgatgagtgaaggaaagatacatcgactacagatttgtgatattaagccccgtgaccagggtgaatacagatttattgccaaagacaaagaagccagagctaagcttgaactggcaggtcagtccctttattttaaaatatccttccaatatcacagagtttagatttcagatttcacagttatttaatgaggtaatccttgtgagggtctttcatttctagcaagccctacccacatgttaacaactctaattttgctcactacaaagtaagtgtcttgagtaagaggaaattaatagcaataatctttacatgccagagccttggacagttgctagtacatgatgactatttatgaacttaggctacaactaagctatcaccctgagagtcttggcaaatctaaagacggtcttatactctcctactttacaaacccctgtgtgccttttaggtatgttctcatcctgacccaggacatccttatacactgtccttatgaaaaagccattagtgtacctctcattcataagaaaaaagtttctctgatttattgaactaagtatgcagtgcctactctatcaaaaaacaaaacaaaacatgttttgcactacactgagtcctatgttactatttttggcaaggaatgcatgtcttatgattttatgccattctcaatcctctactctccaatctaatttgcacgcacaacaacaacaaaaagctatgagaactctaagccacttagttttctctgctataaagttactgtagcttacttccaaggttatgtaaccaatattttctaataaatgcataataacatgatgtagcttggctacgtttaatagtcgaaagcgttcacatgttatctttctcactagctgcaccaaaaatcaagacagctgaccaagaccttgtggttgatgttggcaagcctctgacaatggtggtgccatatgatgcctaccccaaagcagaagctgaatggtttaaagaaaatgaacctttatctacaaaaaccattgatactacggctgaacaaacttctttcagaattttagaagccaagaaaggagacaaagggaggtataaaattgtgcttcagaacaaacatggaaaagcagaaggattcatcaatttaaaagttattggtaagcccttgggtctctcagacttaattggcaaagcacaatttaaaagcaagacagcacactaaaaaaattcctctatatgtgaatttcagatgttcctgggccagtacgtaacttagaagtgacagaaacatttgatggtgaagtgagccttgcttgggaagaacctttaactgatggtggaagcaaaatcataggttacgttgttgaaagacgtgacattaagagaaagacctgggttctggccacagaccgtgcagagagttgtgagtttactgtcactggtctacagaaaggaggagttgagtacctattccgtgtgagtgcaagaaacagagttggcactggtgagccagtagaaactgacaatcctgtagaagcaaggagtaaatatggtaagaagttttaagtaaattcaagttagcttttaagtaaattgcagtctttgccttcatcatcgttaccccaaactcatattttcttcttctgtggtgaaatccagatgttccaggccctcctttgaatgtaaccatcactgatgtgaatcgatttggtgtctcactgacatgggaaccaccagagtatgatggaggtgctgagatcacaaactacgtcattgaattaagagacaagacttctatcaggtgggatactgccatgactgtgagagctgaagacctgtctgcaactgttactgatgtggtagaaggacaggagtacagtttccgagtgagagcccaaaatcgaattggagttggaaaaccaagtgcagccacacccttcgtcaaagttgctgatccaattggtaagcccatcaaaaaagggaaataattactgcatgaaatccagatattaggcctatcaattaaaataaatcaagttaaatgaaagttaataaaaaggtagaatatcataaaaatttggataaagttttagaaacccagactgtgcctactttacttagtgaatttgataaacctgttaatgaggatgatataattgattacaacactgttttcataaattgtcactaacgtaaatggtatgctccaactccttcttttattccagagagaccaagtcctcctgtaaacctaacttcctcagatcagactcagtcatcagttcagctcaaatgggaacctcctctgaaagatggaggaagcccaatattaggctatataattgagcgatgcgaagaaggaaaagataattggattcgttgcaatatgaaacttgtccctgaactgacttacaaggtaggtcatttgcatataaaaaagaatattcaatgtggatcatggacataactgtatgtgttttttacaaatattaattcataatcgtaggttaccggattggaaaaaggaaataaatatttatatagagtatctgcagaaaataaagctggtgtttcagatccatctgaaattcttggtcctctcaccgctgacgatgcatttggtaaatagatattttatttttagatcggggaatagcacatagctactttggggcaacagggacttaaatatggcactgcaaactcattaacttttcttctttgtagttgaaccaacaatggatttaagtgcatttaaagatggtctggaagttattgtcccaaatcctatcacgatcctggttccaagtacaggctatccaaggccaactgcaacctggtgttttggagataaagtactagaaacaggggaccgggtgaaaatgaagaccttgtctgcctatgccgaacttgtcatttctccaagtgaacgttcagacaagggcatttatacactgaaattagaaaaccgtgtgaaaacaatttctggggaaattgatgtcaatgtaattggtaaggaacaaaacatttatcatctaaggtgatttggcagtattaacagatattagttcagactattaacagtgactcgtgagtgcattttttttcagctcgcccaagtgcacccaaagaattgaaatttggtgatataaccaaggactcagtacatttgacttgggaaccacctgatgatgatggaggaagtccgttaactggatacgttgttgaaaaacgagaagtcagccggaaaacatggactaaagtgagttttgagcagcactgcatcaatgccaaaaatgagagtaggggaaatcccagaaggttgggatgccatacaaaagtcttatgtgctacaacttcttacctttacctcactgaaaatgtacaaaaactttttaagaatgcatcggtgctaatgcttcctgaggtagctcaaccaaggattgtataattgtaattgtcttgtcttgtgagccttaccaaatttgtaataaaaaaaaaaattccctactgacttggtacctgctaagtacccaatatgtacccattaagctagaagtggaaagtaaatatttatttccctggtggtcacacttcttattccactagaataccttagttgacctaatcagccattatttccttgtgtttatattagttactattctttaccctgaattaaaatcatatttctgataagcaaactggtagaatcaacacctcatttgccatcttttttcatgtgtacaaactatgaagcagtttttcttatattgagtcaaatattatcatgtatcctactttgcaattttccctaatatgaaattaatgtaagaataatccctagcattcaaaacaactgcagtttgtatccctggtcatggtaaaaatcttttgggttggcgaaagggttttttggaaataactgattaactgtatttctttgtcccaggttatggactttgtgactgatctagaattcacagttcctgatcttgttcaaggaaaagagtacttatttaaagtttgtgctcgtaacaaatgtggccctggagaacctgcatatgttgatgaacctgtaaatatgtcaactcctgcaagtgagtacattcttgatgatttcttacctaatcttgttgcctgtttttgcttttagacctagagttgaagttatggggcaaggcaggggttggcaatgtgaagagaactgcataggtggcctgtgtaagactgactctctcttccaaatgttgtagcggtacctgacccaccagagaatgttaaatggagagatcgaacagccaatagcatcttcttaacatgggatccacctaaaaatgatggtggttcacgcatcaaaggatatatagttgaaagatgtccacgtggttctgataaatgggttgcctgtggagaacctgttgcagaaacaaagtaggtttttaatttggcatgagagtaaatgtgtactcctagtcactaaaatgggctttgttggggaaaatttaaatgtttgtcttttttcattgagaatcctatgctgccggtgtatctgtctgatttttaaaggtgctgctgaatgtactgcctgctcagggttttcatgacagtattgaaatgaaaatgtattcagttatagtgttgaagtaatccaggtttaatttaaagactagtattataccaggggtttgaatttttgaaagattatgagtactacacaatgaaacgattatcgacatcacagtaaaacatcctattctgttttctgacagaatggaagtgacaggtcttgaggaaggcaaatggtatgcctaccgcgtgaaggccttaaacaggcagggtgctagcaaaccaagcagacccacagaggaaatccaggctgtggacacacaaggtatctatttttgatttttgtcttatcaaataggcctctgaccttaaatctgcttgaacttgataacatcataaataatcttttccaattcagaggccccagaaatcttcctcgatgtgaagctccttgctggtctcactgtaaaagctgggaccaagattgaacttcctgccaccgtaaccggaaaacctgaacctaaaataacttggacaaaggctgatatgattctgaagcaggacaaaagaattaccattgaaaatgtccctaagaaatccacagtgactattgttgatagtaagagaagtgacactggcacatatatcattgaggctgtgaatgtgtgtggccgggccactgctgtggtggaagtgaacgtcttaggtaaggaaggttctcattttaaaaggggataaactctttgcagttactttcttgaaagaaaaaaataaaaaaaatggtgaacaatttttttttctgcatctgtaatgccatacacagataaacccggaccaccagctgcctttgacatcacagatgtaaccaatgagtcatgtcttctaacatggaacccaccacgcgatgatggtggatctaagatcacaaactatgttgtggagagacgagcaactgatagtgaagtgtggcacaagctctcatccaccgtcaaggatacaaacttcaaggccaccaaattaatccccaataaagagtacatcttcagagttgctgcagaaaacatgtatggtgttggtgaaccagttcaggcctctccaataacagccaaatatcagtttggtaagtttctcaatcagctgataaaaaaaaaaggatgcttatgtcaaacttgcattttggtgtcatatttatatacaggacatataacattttacaccattatcctgtctatagatccacctggtcctccaactcgcctagaaccttctgatatcactaaagacgcagtgactctcacatggtgtgagccagatgatgatggtggcagcccaatcacaggatactgggttgaaagactggatcctgatacagataaatgggttagatgcaataagatgccagtaaaggacacaacatacaggtatgctcagaatccccatcaagatgttaagacagcagtatattcaaatgtttactctttagtattccttgggattacagatgattatatattactaaaaaaattttaaactacttttactcatattttctattacctcataatttgaaaaattatataaattccattcaagggcacatttcttagtttactctaaaatattaaccttcaggaagtttcaaagtgtttgatcccccagtatattatgataatgaccactgtcatagatattataattagattggtatgtttggcccagtctaaagtgtgtggcagttaaaaagcaatttttaatttatattgaagtgcttttcagttaaatttccaaatcaccttttcacaatttaaataaattagtctcttctgtgtaaaataaacataggcttcttctgcttcttaccatgatgatacacatgcactttgttcctaattcagagtgaaaggtctcactaataagaaaaaatacagattccgtgtgttggctgaaaatcttgctggacctggaaaaccaagcaaatcaactgaaccaatcttaataaaggatcccataggtattatttatataatttttgtggttatttcgaagttcatatgaactcctttttgacaaacctaaacaatgatttcattggcttgcagatcctccatggccccctggaaaaccaactgtaaaagatgtaggcaaaacatcagtaaggttgaattggacaaaaccagaacatgatggaggtgcaaagattgagtcttatgtcattgaaatgctgaagactggaacagatgagtgggtcagagtggcggaaggggttcccaccactcagcacttgctcccagggctcatggaaggacaggaatactcattccgagttagagctgtgaataaggctggggaaagtgaacccagtgaacccagtgaccctgtgctttgccgggagaagctatgtaagtcactcttgatgtctgggatatataaattcttctaatatctgcctgtgagctacgatatgagaaaatatgaaaaattcattactattatttcctcctggctacattacttcttaatgactgcctgcactttcagactgactattgggtaataaaaaaaaaaatgaatttgttttccttccttctttttcagatcctccatcaccaccacgctggcttgaagttattaatatcacaaaaaatacagcagacctaaaatggacagttcctgagaaagatggagggtcccccatcaccaactacattgtggaaaagagagacgtcaggcgaaaaggctggcaaacagtggataccactgtcaaggacaccaagtgcacagtcaccccactgactgagggctctttatatgtgttccgagttgctgcagaaaatgctataggacaaagcgactacaccgaaattgaggactctgtgctggccaaagacacctttagtatgctcttgcacttaatctttgtgacaataagtgctctcgcacttaatttttgtgacaggagattatcacctttcctctggttttcctaatcattgtttattttattttcagccactcctggaccaccctacgccctggcagtggttgatgtgacaaaacgacatgttgacctaaagtgggagccacctaaaaatgatggtggaagaccaatacagaggtagaatttgaattaattcataaagaataacttacacttggctgcaaattcttaactgtgttttttcattaatgctaatgaaatgctttgttgtttcaatagatatgtcattgagaagaaagaaaggttaggtacccgttgggtgaaagctggaaagactgcaggacctgactgtaacttcagagtaactgatgtcatcgaaggaacagaggtccagtttcaggttcgggctgaaaatgaagctggagttggccacccaagtgaacccacagaaatcctatccattgaagatccaacaagtaagtagtgctgattatacacaagatattgtctagaacttgatgagactgtggatatgaatatttcactcttttctcaggtcctccctcaccaccccttgacctacatgtgactgatgctgggagaaaacacattgccattgcttggaagcctccagagaaaaatggtggaagtcctatcataggataccatgttgaaatgtgtccagtaggcactgagaaatggatgagagttaattctcgcccaataaaggacttgaaattcaaggttgaagaaggtgttgttcctgacaaagaatatgtcctgagagtgagagcagtcaatgctattggtgtcagcgagccatctgaaatctctgaaaatgtggttgccaaagacccagactgtaagagcacaaggtcttttatagttaataaaataccctttattcatgcattgcattttgacatactctgttttttgctcttttgaatgatatcttacaggcaagccaacaattgacctggagactcatgacattattgttattgaaggtgaaaagttaagcattcctgttcccttcagagctgtcccagttccaactgttagttggcataaagatggcaaagaagttaaagcaagtgatagattaacaatgaagaatgatcacatctctgcacaccttgaagttcccaagagtgtccgtgcagatgccggaatttataccattacactggagaataagctcggctcagcaacagcctcaatcaatgtcaaagtcataggtaatcattctttgaagaaaaaccagacattcttcacatgtagaggaaattagttaactttgcagtgctattaataatataattggcttcatgaactggccacttgtaaactaaatgtcacttctgattatgtctttccataggagaagtaaaacaattctaaagagatgaaatcgctaaacgcttattagactaatttatactagttttagttaattgcatgtgaaatactaatttaaataacagatattagcatacccaaagagcattgaaatgaccacaattttttaattgcacagcttcacattttcccatagtgttcttaaccagggatagtaacattttctgcattccccccagccctgcaaataatgtctggaaatttgtggggccatttttgcttggcacacagacttgaggtagataccactgacatttagtagttgggagccaaggatgctaaatgctctgcagtgtgaatgacactccagcacatcaaagattatcctacccaaaatacagatagccccacttagagacaagtgcattattaaaatgctgatttttcaggattactagaataattatccatttttgtaataggcctacctggaccatgcaaagatattaaagcaagtgacattaccaagagttcttgtaagttaacttgggaacctccagaatttgatggtggaaccccaattcttcattatgtcctggagcgcagagaagctgggaggagaacatatataccagtcatgtctggtgagaacaaactgtcatggactgtgaaggatctcataccaaatggtgaatacttcttccgtgttaaagcagtcaacaaggttggtggaggagaatatattgaactgaaaaatccagtcattgctcaagatccaaagcgtaagtttggacatggatgcactatggctaagaactaataaaccatagttttgttttaagaaggtggttttcctgatactaacatttttttcttgttcttcagaaccccctgatccacctgtagatgtagaggttcataatcctacagcggaggcaatgactattacatggaagccacctttgtatgatggagggagcaagataatgggctacatcatagagaagattgctaagggtgaagaaaggtggaagagatgcaatgaacacctggtaccaatcctgacctatacagcaaaaggacttgaagaggggaaagagtaccaattccgtgtgcgagcagagaacgccgcgggtattagtgaaccttctcgggctactcctccaaccaaagctgtagatcccattggtaagttttgtttcatggagttgccactttcccattttgaaataaatgaaaataatgttttgtcagttattttcatcagaattgaaaacatttattggttatgatcactatagatgcccccaaagtcattctgagaacaagcctagaagtgaaacgaggtgatgaaatagcacttgatgcaagtatttctggatcaccttacccaactattacatggataaaggatgaaaatgttattgtaccagaggaaattaagaagcgtgcagcacccttggttaggagaaggaagggtgaagttcaagaagaagaaccatttgtcctgcctctgacacagcgtttgagtattgacaacagcaaaaagggagaatctcagctacgcgtccgagattctctccgacctgaccatggtctgtatatgatcaaagttgaaaatgaccacggtattgcaaaagctccttgtactgtcagtgtgttaggtgagtcattaaaactacactttccaatggaaaaaggttttagtaaaacataaaaataaaaagtttgggagagagttaaaagaaatgggacatagcttcagcaagttatcctcaatcatattttatctgctggccatgtaaaagaaatcacctgatcttgttatttattagctaatggaatacaaagatagatgtgggaaaaccacaaatcatgtcagaggagcatgctcacatttatattttccatagcaacccttcccacacaaatttttgattactgttctcttctgaaatattagatacaccgggaccaccaatcaactttgtatttgaagatatcagaaagacctcagtcctttgtaaatgggaaccaccccttgatgatggtggcagtgaaatcataaactacactttggaaaagaaagacaagacaaaacccgactcagaatggattgttgtcacttcaacacttagacattgcaaatattcagtaacaaaactgattgaaggaaaagagtacctcttccgtgtaagagctgaaaacagatttgggccaggtccaccatgtgtttcaaagccacttgtggctaaagatccatttggtaagtttcctttggcatctaaagtttgcctttttaccatgtactttggtatataattactacagcttttaaaattgcatttttatgtcatactgggaaatttacttcaaatgttatttttttatcaggaccacctgatgcaccagataagcccattgtggaagatgttaccagcaacagtatgctagtgaaatggaatgaaccaaaagataatggaagccccattttgggttactggcttgaaaaacgtgaagttaacagtacacattggtctcgtgtcaacaaaagccttctgaatgccttgaaagccaatgtagatggcttattagaaggactcacctatgtcttcagagtatgtgctgaaaatgcagctggacctggaaagttcagtccaccttcagatcccaaaacagcacatgatccaatctgtaagtagttccttaagaagaaggtggagtagaacaagctattgtacattttaaaaccatcagggagtttgatttgtctatcttcattcattctagctcctcctgggccacctatcccaagagtcactgacacaagctctacaactattgaactagaatgggaacccccagctttcaatggtggtggggaaattgttggctattttgttgataagcagttggttggcacaaatgaatggtcacgctgcacagagaagatgatcaaggtccgtcagtacaccgtcaaagaaatccgagagggtgctgattacaaacttcgggtgagtgctgtcaatgccgcaggggaaggaccgcctggagaaacacaacctgttactgtggctgaaccacaaggtacttaacgttattggaataaaattatggatattttctctatatgggactattttttaatctttcatgggctaatgcatgactgttctctttcaacagagcctccagctgtggaactggatgtttctgtcaagggtggaatacaaataatggctgggaagactcttagaattccagctgtggtgactggtcgccctgtacctacaaaagtatggaccaaagaagaaggggagctggataaagaccgtgttgtaatagacaacgttggaaccaaatctgaactaattatcaaggatgcactgcgaaaagaccatggcagatatgtgattacagctacaaatagctgtggttccaaatttgcagcagccagggtagaagtttttggtaaggaatgttgcactgattttcacaggattttcccaagtgatactatcttattacattgatttttggctttgttttgttttcagatgtccctggtccagttcttgacttaaaacctgttgtaacaaacagaaaaatgtgtctacttaactggtctgatccagaagatgatggaggaagtgaaataacaggctttatcattgaaagaaaagatgccaagatgcatacttggagacaaccaatagagactgagagatctaaatgtgacatcacaggtctgcttgagggacaagaatataagttccgtgttattgccaagaacaagtttggctgtggccctcctgttgaaataggaccaattcttgcagttgatccactaggtaaaagagaaggtttcattgtgtttatagagtaatgttttgcttctagttatattatttactgagctttatggcttcaaactcccaacagtctcaaaatctatagctaaagagtaataagaaaagtaaatcaaaaaactattagcaacattaaagatatcatatttcctataatttcaatgtaatttgtggctgtaagtatattaatcatgcatggtttcttgtactgaaaaacttggatctacaggggcttaataataacctagaagtagtttagacatattatatctctccagtagaacacattggaagtcgggtttttaaaacttactagcgtagtagttaaagagaattcaatgttcttctaaaagattagacaattcctgagaataaatgccttagtcttcctctatattcaaaaagtccccatactggaaggatagagaggcccaaaaccagaaacagcctccaaagaatagaaaaccaaccagagggaatctcccagaaatcaatacgaaacactaaaattgcacacacagtaatgcacactgacatcccatctaagaaagcaaaggctttgaggaagacccattcctcaagagacagaagaacttattccttcaccatcaccccctgaaaaaaaaaaatacatcctatatcactgctgcagctcatctatgaacgtccaatataccacaggctgtgccagaggcaccagaacagagctgagcttccactccttctggttgcaataacagtcaacaagtatggattgggtctagttttaccactgaaagcttaactcttagtttggtccttcaggaaagaaaacttcagcagcattacatacatcctctttccaccatattttgaacccacatgtgaggcaacatgactcaaagtatgttcatagacatatccactatctgttaataaaagaaaaaacactttgctctcagctggtcattcaaagcaaagcttcacagacttactttcctagttcagtagaattagaagcatccccagttacaaaggtaaacaatctaaaatgttaaattaaaaaagcatacgtgcccttgatttatttttcactgataatcttgatgaaaagtttgctaagaaaaattctgtctacatgaatgtctataattttggcaactgacaagttttaggaatgattttaaataaggatgtaaggttatgccaaacagaaggctattttttacataattaagttgaagtgaaatattatttcttacatgaatatttatctcatgctaatcattttcacttgcctctggctaaaggtcctccaacatctccagagaggctcacatacactgaaaggacaaagtccactatcacacttgactggaaagagccccgcagtaatggtggcagtcccatccaaggatatatcattgaaaaacggcgtcatgacaaacctgactttgaaagagttaacaagcgactctgcccaaccacatcttttctggttgaaaatcttgatgaacaccaaatgtatgagttccgtgtcaaagctgtcaatgaaattggtgaaagtgaaccatccctacctcttaatgtagtcatacaagatgatgaaggtgcggaatctgaatataataataattttaatgcattttacagtgtgcctttatcccataagttgaaaaaaacatccttatgactttgttactgtttttctttctcttctctttgcagtgcctccaactattaagttgcgtctgagtgttcgaggagacactatcaaagttaaggcaggagagcctgtccacatccctgcagatgtgacaggccttccaatgcctaagattgaatggtccaaaaatgaaactgtaattgaaaaacccactgatgcacttcagataaccaaggaagaggtatcccgaagtgaggcaaaaactgagcttagcattcccaaagcggtccgggaggacaaaggcacttacacagttactgcttccaatcgccttggctcagtgttccgaaatgttcacgttgaagtatatggtaagtgacttgctttcttacatcaaaaaggcatccagtgtctgtttaagaattgccttctcaatattctctgttgattcctttccagaccgcccatccccaccaagaaatcttgctgttactgacattaaagctgaatcttgctacttgacatgggatgcccctcttgataatggtggcagtgaaatcacccattatgttattgacaaacgtgatgcaagtaggaagaaagcagaatgggaggaagtcaccaacactgctgtagagaaaagatatggggtaaactcttctgaatattttcttatacacattaaaagtacatgactctggtttgatgccattttaatataaccttggaatttgataattaaactcaaaaccacacacgataagctgttattttgttattgtagtgtttagccccacacacataaggctccttagtacatagcgtttgatacacagatactcttttaattgagatccactatcaggtacaatacatctacatatttttattttaaaaaaagctttctccttttctctgtcttcccatgttttgagtctatatatttatttcttcttacagtcatccctcccaaaataagttgaatttttaaatgagtgaaaaccaacataagtatattctcttcaataaatttctgtttttctaatttctagatctggaaacttatccccaatggtcagtatgagttccgagtcagggcagtgaataaatatggaatcagtgatgagtgcaaatcagataaagtagtcattcaagatccttatcgccttcctggacctccaggaaaaccaaaagttttggcacgcaccaaaggatcaatgctagtgagctggactcctcctttggacaatggtggctctccaattactggctactggctggagaaaagagaagagggaagtccttattggtcacgtgttagccgagcaccaataaccaaagtgggattgaaaggcgtggaatttaatgttcctcgtttgcttgaaggcgttaaataccagttcagagccatggcaataaatgctgcaggaattggtcctcccagtgaaccatcagatccagaggttgcaggagatcccatatgtaagtatgcttccgtttctggggactaatttctaaagcacaaagtcactaaatggataattctgccttaaatttcttatatttttctatgccaaattattttatttattaaaataaaaaaggttcatgttcacatagactatcggaagtatatatttatgtgtgtatacatacatgcacagatatatacatacacacatacataaaatcatacagtttgtaaactcttggattaaaccaaatattttatgaggaatcacaataataaagacctggactataaactcctatgtcttctgatactttaaataaatttctatctcattagatactggggaaatcatctctcccactaaacagtcagaccttccagtaggaattcaacaaaaaacagaatgttgttagcttttctataatattattgaacaaagatttaggattctcaggcatagtctgtgaggtcaaataagagagaaaaattcttctaaaagatctgtgagcagattcgttcaaaaattaaaaaatactgtggccataataattcatcctatttgctacatatctgattagattctctatagaagaaaaattcaattatttgttaaaaagaaaattttaaatactcaagtgctatgtggagcatatatacctatataatgaggtagttattcattcatttgcaaactagtattgaacatgtgctttgtgcaaggatctatattaaccactggagggggaaaagttaagattaaaaagacaagtacagtaaaagaatttctgtaattgtaaagcactttcagaaaggtaaaggattgttatgggattattgtagacactgatcctgtccctaaagggcattaagattagtttgtgttcaaaggtttactagctattgatggaatcctttttaaattttcatattgtggcaaattaaatttaaatcatgttttcagtaaaggctattgtagaatttcttcaaagggatctcaaaagtaaagtagttttttaccaatcatgtataaatagaatgtaaatctaacaagataggaagtagtctttctattcccagttagttgtttgctttctctgtttttgcattaatgctaaaggaaaatagaccatttcctttatttctcttctctagaaggcaactgtatttccttttagcatttctattttaatattttaatagattaaaataatatatgatcatgtgtagtaaaagactccagcacttcatcagcttcaaaatctgatgaagcttttttttttcttttgttattagttccaccggggccaccttcttgcccagaagttaaagataaaacgaagtcaagcatctcactaggatggaaacctccagccaaagatggtggcagcccaatcaaaggatacattgtagaaatgcaagaagaaggtactactgactggaaaagagtaaatgaaccagacaaacttataactacctgtgaatgtgtggtgcctaatctgaaagagctcaggaagtacagattcagagtgaaagctgtcaatgaagctggtgaatctgaaccaagtgatacaactggggagatccctgccactgatattcaaggtactagtacttactcagtttatgtattcctcttttgatcttattatgaaattgattaatttactgaagatatttcaattacttttgacaaatatgagctaaatcctgttaaattgtatgtggtattacagaggaaccagaagttttcattgacattggagcacaggactgtctggtttgtaaagctggctcacagattaggattcctgctgtcatcaagggacgcccaacaccaaaatcatcttgggaatttgatggaaaggcaaagaaagcaatgaaggtaggaaaataaccattctcctcttttttccactgaatcactataaggagtatttatactacaactgactgtctccttttctaataggatggagttcatgacatacccgaagatgcacaggtaaaaaaataataattaaaataattcagaatatggttgacttcaatattgctatgatttcattcaatgtatgactactattttctttgtacagctggagactgctgaaaactcctcagtaattattattccggagtgtaaacgatctcatacaggcaaatacagcatcacagccaagaataaagcaggacaaaagactgcaaattgcagagttaaagtcatgggtaagaaagactttgaaagttgctacagaataaaaacaaattatttttaagcatttaaggaacgttgcttatattgtgatttacatccaacagatgtaccaggcccacccaaagatctgaaagtcagtgatatcacaaggggtagttgcagactttcatggaagatgccagacgacgatggaggagacaggatcaaaggctatgttattgagaagaggactattgatggaaaagcctggaccaaagtcaatccagactgtggaagcaccacatttgtagtgcctgatctcctctctgaacagcaatatttcttccgtgtgcgagcagaaaaccgttttggtattggcccacctgtggaaaccattcagaggaccactgccagagatccgatatgtaagctttaaaatctaaatttaaaatatcttctcaaaattgaagtatattattataaacaacgcttaatacttcctttaattatttttacagatcctcctgatcctcctattaaactcaagattggcctcatcacaaagaacacagtgcatctgtcatggaaacccccgaagaatgatgggggctcccctgttacccactatattgttgagtgccttgcatgggaccctactgggacaaagaaagaagcctggaggcagtgcaataagcgtgatgtggaagaactgcaatttactgttgaagacctagtagaaggtggggaatatgaattccgagtcaaagctgtcaatgctgcaggagtcagcaagccttcagccactgttgggccctgtgactgtcaaagaccagacatgtaagtaccaatgtactgacaaagaatgtcctccttacagctgccttcctaggtgttcaataatagttcacaattaaaagagctatatctgtaccttaggaagctactatggcttgaatgtagacatgggcacattacttaattactcattccttcaatttccacagaattttcacattcccttacctgttaccttttccctgttcaaaggagatgatgtctgtaatttcctcgctgtaattttcctcgcagtctgttttatttatcagaggctaaagcaatttctctgcatgctcctcaaaagggacagaaagtaaccagtcattttcttagcaactgctgagacccatttatcttcacaatcaagtttttatttctctatatgagaaaagatatatccattttaatgaagtatatatatatatatatatatatatatatatggtaataattcttcctctgataattaccatcactactgttgtgtatttgtttattctctcatctaagtgtgaagaaactgtagtcactaccctctttgaatatttctgtcctaaatttgtgcaaaatggaaaattgctttccttttattaacagttatatttcttaaaaggggaattcaccttcttgtgtatcccttcataattctgtgtaaatattaaagagagtatcccatgatactctcctactacaatctcctctcttcccttttgtcaggatatgagaatataataatacacatcattacatgcataatgatgccaaataaagtgaggcaagcacagatacatagccacatgtagatccaataaaagatgctgaccccgtgtacctgctccccaaactagcgtaatagtgttaaagacagaaccattctttatattgggctgagctacaaagtctgcctacagtggatccaaacaactttatagtaactgtgaattctactttctatccctcaatgctttttgctcctaatgacaactttttttaaataatctaggccaccatcaattgatctaaaagaattcatggaggttgaagaaggaaccaatgttaacattgtggccaaaattaaaggtgtgccattcccgacactaacctggtttaaagctcctccaaagaagcctgataacaaagaacctgttctctatgacacccatgtcaacaaactggtggtagatgatacttgcactttagttattccgcagtctcgcaggagtgacactggcttatataccatcacagctgtaaataatctgggaacagcatcaaaggagatgagactgaatgtcctgggtaaagactgcatggtttggttaaaattacttgtttttctgttcataaataacatttggctttaaaatcatctgagtgataaagggttccttctttaaaccattttaggtcgtcctggccctccagtgggacccataaaatttgaatctgtttcagcagatcaaatgacactatcttggtttccacctaaagatgatggtgggtctaagattacaaactatgtaattgagaaaagagaagctaacaggaagacatgggtccatgtctccagtgaacctaaggagtgcacgtacacgattcccaaattgctagaaggccatgaatatgtattccgaatcatggcccagaataaatatggcattggagaacctcttgacagtgaacctgaaacagcaagaaacctcttctgtaagtaggagaacattttcacatacaaagccatttttactttttttttaaatttcttataatcaatatgatctttttcacagctgtccctggagcaccagataaaccaacagttagcagcgtgactcgtaactccatgactgtcaactgggaagagccagaatatgatggaggctctcctgtgacagggtactggctggaaatgaaagacaccacttcaaagagatggaagagagttaaccgagatcctatcaaagccatgactttgggtgtttcttataaagtgactggtcttattgaaggttccgactatcaattccgggtatatgcaatcaatgctgctggcgtgggtccagcaagtctgccatcagacccagcgactgctagagatccaattggtaagcctggaaaccattccttttttttaaatcttattttccaaaagtgccttggaaaagtcaagaatactaacgtatactggctctttgcagcccctcctggtcctccatttcccaaagtgacagattggactaaatcatctgcagatctggagtggtctcccccactaaaagatggtggatccaaagtaactggatacatcgttgaatataaagaagaaggaaaagaagaatgggaaaaggtaggaaaacttggcactaaggaaatgcactatgaataaactaaaaaatgtcatagttattctcaatcccattaacttctgtctatactttttggattaagaaatcaggaaaatagcataattttaactcacattccaaacatctgttaatgtcagaaatcgaatcaaaagttaagtcatgttattactaatcttttggttataaaccctggaatgtggaataaataaatcaaggtttaatcatttgacaataattttaaagcataactcctgccaagttattccattcagtgttgcctgtaatatctgatccctaaaacctaaaccagcaacaattttcccagagtaaacagttaaataggctgctggtgatgctttaggaagccattaaagcaagaagctacaaagaactattctaattataaaatgtctatgatttctccccagggtaaagataaagaagtgagaggaacaaagctcgttgtgacaggattaaaggaaggagcattctacaaatttagagttagtgcagtcaacattgctggcattggagaacctggagaggtcacagatgtcattgaaatgaaggacagacttggtaattatcaatccttccttatgccatcagtatttatgtttcagattgaaggggaaaaatcacatttgtaattttcaattgcttccagtttcacctgaccttcagctagatgccagtgtcagagatagaattgttgtccatgctggaggggtgatccgaatcattgcctatgtgtctggaaagcctcctccaaccgtcacctggaacatgaatgaaagaaccttacctcaagaagccaccattgagaccacagccattagctcatccatggtcatcaagaactgccagaggagccatcaaggcgtctattctcttcttgccaaaaatgaagccggagaaagaaagaagacaattattgttgatgtattaggtaaatactttcaatttgtctgtgcaactttttaaaccaacattcttattatatttacacaaagctatgctgtatgctgtgtaacaaacattttggaaaataagaaaaatcacccataatcatgttgaacattattagaatttttaaaaatttcctccttacttttttattctatgtgtattctgtatggtgggtgtaagtttacaaattatataattgagaaaacagatgctaacaagaagacatgcatccatgtttccagtgaacctaaagagtgcatgtacacaattctcaaattgctagaaggccatgaatatgtattctgaatcatggcccagaataaatatggcttttttatagaacttgcccccatagtgtctattatgttgttatatagttttcatagaagcaactttccttaaactgtacatgaatgtttaacaatctgcaactttccttaaactgtacatgaatgtttaacaatttgccagtgctgaccatttcacatcatgagactctacccctatcgctaaattatcataataatgcaaaaacctgtttgaagggtttcagtattctaattgaagagaagcatcatagttggttatcaatattgcatttctagtcactgaatatagagttgaactctatgaggctttttcatggctctcactggaggctttagtccagtgatttgctcagaacacgaagcctttccactcagggctctttctaagcatgtctctaggcacaacaatactccagccacagtttttatgtgaaaattgccagttctatgttgaatataattaatataagaatggcataaggaaaaatatttcattaagcagtagccccacaaactttcaggttagtttcaagcacctaaagctcttttgcctaatggttattactttaatttgagaactggtacatttccacgttaattatttgcaacctcctcaaagtcattctgaaatttggggcctcctatgctgcttgttgatccactggtcatccagaaataaaccatctctctctccgtttcccctgcagaggaaactggacatagaaactgactatgccactcttacccatctcttgtatccctctgcatgcttgcctcccagctccctcctgtccaactcacaaattgcttttaaaaagcatttttattttcccttcagcctctactaaaaccatggtaaccaataactgttgcaaacctacttcattaacaaatatggggcttgatgctatggctcacacctgtaatcccctgactttgggaggccaaggcaggtggatcacttgaggtcaggagttcgagaccagcctgaccaacatggtgaaaccctgtctctactaaaaatgcaaaaattagcctggtatggtggcacatgcctgtagtcccagctacttgggaggctgaggcaggagaattgcttgaacctgggaagcggaggttgcagtgagctgagattgtgccactgaactccagcctgggtgacagagcgagactcccatctcaaaaaaaaaaaaaaaaaaaaaaagtggttgactgtttttgtattgactagatagcagaaggaaaaactaactcaattagtagacacaaaaccttactttcttcaaaacaacatttttgtctccttttaaaaaaacaagtgttgagcattatctttcattgaaggcaaacagcttgaattattttcttcttatttccagatgttccaggtcccgttggaacaccattcctagctcacaacctaaccaatgagtcctgcaaactgacatggttttctccagaagatgatggaggctctccaatcaccaattatgtcattgaaaagcgtgaatctgaccgcagagcatggaccccagtgacatatacagttacccgacaaaatgctactgtccagggtctcattcaaggaaaagcctactttttccgaattgcggctgaaaatagtattggcatgggtccatttgttgagacatcagaggcacttgttatcagagagccaataagtaagtaaaaaaaaaaaaatgtatacttaatcacttctttactcatttagtacaagactatggtgaaaaaatatgtgtataaatgccgtacatttcattcacttgacaagcagttatcacacaactactcagtatctgatttggtagtatttggacagtgattgtgaaagagattttacaaatatgtataattcattgaatttctttttgtttttttttttcttttgggttttgttttgacacatagtcttactgttaccgaggctggagtatagtgtcatgatcttggctcactgcaacctccacctctgaggttcaagtgattcttgtgtctcagtctcccgagtagctgggattacagacatgcaccaccatgcccagctaatttttctatttctagtagaggcagggttttgccatgttggccaggctggtctcaaactcctggcctcaagtgatccacctgcctcggcctccgaaagtgctggcattaccactcctagttcatttatcaaatttcttccatctatacctcacagatttttttttaatttcccacttaatggcattaatagaaactgaattattttcctacttctaaaactaccaattctgaagacctttcctaaattattttgcctcaacaaacctctatttcctcatctgtcaagtgaagaaattcaattgtattgggtcctttttaactctaatagttttatgatgagatctcttttgctatttatgggagcagagagtttaatgtttaaatgcaatcttcagaaaaggaatattcactacatcctactacattcttaatgtgacatttttttctaccacaattcctatacttatattcgcagctgtaccagagcgtcctgaagacctggaagtcaaagaagttactaaaaatactgtaactttgacttggaatcctcctaagtatgatggtgggtcagaaattattaactatgtcctagaaagtcggctcattgggactgagaagttccacaaagttacaaatgacaacttgcttagcagaaaatacactgttaaaggcttaaaagaaggtgatacctatgagtaccgtgtcagtgctgtcaacattgttggacaaggcaaaccatcattttgcaccaaaccaattacttgcaaggatgagctgggtatgtgtctactacaatttatacttctgaaacttgcacatttgtagatttgtaataagacatcaataaaaatgacttgcctttataattacaaattttagcacccccaacgcttcacctcgacttcagagataagctcacgattcgagttggtgaagcttttgccctcactggccgttactcaggcaaaccaaagcctaaggtttcctggttcaaagatgaagctgatgtgctggaagatgatcgcactcatataaagactacaccagcaacacttgctttagagaagatcaaggccaaacgttcagattccggcaaatactgtgtggttgtggagaacagtacaggctctaggaaaggtttctgtcaagttaatgttgttggtaagtcttatttagtggaaagaatagatcttctgttctttcaaaagcagaaatggcaataacattttgtgccatgattttttttttctgcagaccgtcctggaccaccagtaggaccagttagttttgatgaggtgaccaaagattacatggttatctcttggaagcctcctttagatgatggaggcagtaaaatcaccaattatattattgagaagaaggaagtgggtaaagacgtctggatgccagtgacatctgcaagtgctaaaacaacatgcaaagtttctaaactacttgaaggaaaagattatattttccggatacatgctgaaaatctgtatggaataagtgatcctctggtgtctgattcaatgaaagccaaagatcgtttcagtatgcattatgtttctttttagtgattcaatgcttgataaaactaatataaagaaataaatttctaacgcattttccaacatttgttacaggggttcctgatgcacctgatcagccaattgttacagaagttaccaaagactctgcattagtaacctggaataagccacatgatggaggaaaacccatcacaaactacatcctggaaaagagagaaactatgtctaaacgatgggctagagttaccaaagatcctattcatccatacactaaatttagggttcctgatcttctagaaggatgtcagtatgaattccgggtttctgcagaaaatgaaattggtattggagatccaagcccaccatccaaaccagtctttgctaaagatccaattggtatagtattaatggatttattcagttttcatgttatctaactttgttttcagctatatgctaattcgttttttacttttattttttagctaaaccaagtccacctgttaatcctgaagcaatagatacaacatgcaattcagtcgatctaacttggcagccaccacgtcatgatggtgggagcaagattctgggttatattgttgagtaccagaaagttggagatgaagagtggagaagagccaatcacacccctgagtcatgtcctgaaactaaatataaagtcaccggtcttcgggacggtcaaacctataagtttagagtgttagcagtcaatgcagctggtgaatcagatccagctcatgttccggagccagtcctagtaaaagacaggcttggtgagtaaaatgctctcacttgtgtttgcaaggaaaatagatgtctgattgtatgtgtttaattgtaatctgcattatggatcaaatctgagtgttctgttctctttattctagaaccccctgagttgattcttgatgccaacatggcaagagaacaacacattaaagttggtgatactctaagacttagtgccatcatcaaaggagtgccattcccaaaagtaacttggaaaaaagaagacagagatgctccaactaaagcaagaattgatgtgactccagttggtagcaagcttgaaattcgtaatgctgcccatgaagatggtggaatttattctttaacagtggagaatccagctggttcaaaaactgtctcagtaaaagtacttgtattaggtaagaattttactacttaggccattaaaaataaattttgataattttgagctcttatatggataaaattacttatcaaactgttatttaacactttttagataaacctgggccacctagagatctggaagtcagtgaaattaggaaagattcatgttaccttacttggaaagaaccactggatgatggtggttctgttattaccaattatgtggttgagaggagagatgttgccagcgcccagtggtcacctctctcagctacatcaaagaaaaagagtcacttcgctaagcatctgaatgaaggcaaccagtacctcttccgagtagctgcggagaaccagtatggacgtggtccttttgttgaaacaccaaaaccaatcaaggctttggatcctctccgtaagttgctttctctgaatacaaaactattgtttgactgtctttaagaatattactttttcatcataacttcttctttgaaaagatcccccagggccacccaaggacctgcaccatgtagatgttgacaagactgaagtctccctagtctggaataagccggatcgtgatggtggttctccaatcactggatatttggtagaatatcaagaagaaggcacccaggactggattaaatttaagactgtgacaaacttagagtgtgtggttactggactacaacaaggaaagacctatagattccgtgtaaaagctgaaaacattgtgggtcttggtctccctgacacaactatcccgatagaatgtcaagaaaaactaggtaatttttggactagcagtattaccttatttctttttaaaattattcatataggtgaaaatcaaaatctaattttttcatgtttacttttcagtgcctccatccgtggagctagatgtgaaattaattgaaggtcttgtggtaaaggctggaaccacagtcagattccctgctattataagaggtgtgcctgttcctactgcaaagtggacaaccgatgggagtgagattaaaaccgatgagcactacacagttgaaacagacaacttctcatcagtacttaccattaagaactgcttaaggagagacactggggaatatcaaatcacagtttccaatgcagccggtagcaaaacagtagccgtacatcttactgttcttgatgttcctgggccaccaacaggtcctattaatattctggatgttactcctgaacacatgactatctcatggcagccacctaaggatgatggaggaagccctgtgataaattatattgttgagaaacaagatacaaggaaagacacgtggggtgttgtctcttccggaagcagtaagacaaagctgaaaatcccacatctgcagaagggctgtgaatatgttttccgagttagagcagagaataagataggtgttggtcctccccttgactccacacctactgttgctaagcataaatttagtcctccgtctcctcctggtaaaccagtggttactgacattactgaaaatgcagcaacagtgtcttggaccctgccaaaatctgatggtggcagtccaataactggctactatatggaacgtcgagaagtaactggcaaatgggtgagggtcaacaaaacacctatcgctgacctgaagttcagagtgactggactctatgaaggaaatacatatgagtttagagtttttgctgaaaatcttgcaggactaagcaaaccatccccaagttctgatccaataaaagcttgccggcccatcaaaccacctggaccacctattaatcctaaactgaaagacaagagcagagaaacagctgatttggtgtggacaaagcctctcagtgatggtggtagccccattctaggatatgtagtggaatgtcagaaacctggcacggcacaatggaacaggattaataaagatgaactcattaggcaatgtgcctttagggtacctggactaattgaaggaaatgagtacagattccgtataaaggcagctaatattgtaggagagggtgagccaagagaactagcagaatctgtgattgcaaaagatatccttcatcctccagaagtagaacttgatgttacttgtcgtgatgttattaccgtgagagtaggccaaactatccgcattctagctcgagtcaaaggcagacctgaaccagacataacttggactaaggaaggcaaagtattggtccgagaaaagagggtggaccttattcaggatctacctcgtgttgagttacaaattaaagaagctgttagagctgatcatggcaagtatatcatctcagctaagaacagcagtggacatgcccaaggttcagccatcgttaacgtccttgacagacctgggccttgccagaatttgaaggttaccaatgtaaccaaagagaactgtacaatttcttgggaaaacccactagataatggtggctcagaaataacaaacttcatagtagaatatcgcaaaccaaaccagaaaggctggtcaattgttgcatcagatgtcactaaacgattaatcaaggccaaccttttagccaacaatgaatactatttccgagtttgtgcagagaataaagtaggtgttgggccaaccatcgaaacaaaaactcccattctggctattaaccctattgacagaccaggtgagcctgaaaaccttcacattgcagataaaggaaagacatttgtctatctaaagtggcggaggcctgactatgatggtggcagtccaaatctgtcatatcatgttgagagaaggcttaagggctccgatgactgggaaagagtgcataaaggaagcattaaagaaactcactacatggttgacagatgtgttgaaaaccagatttatgagttcagagtgcaaacaaagaatgaaggtggggaaagtgactgggtgaagacagaggaagttgttgtgaaagaagacttacaaaaaccagtacttgatctgaaattaagtggggtcctaactgtcaaagcaggggacaccattaggcttgaggcaggggttagaggcaaaccattcccagaagttgcatggaccaaggacaaagacgctacagacttaacaagatcaccaagggtcaagattgatacccgtgctgattcatctaaattttctcttactaaagcaaagcgaagtgatgggggtaaatatgtagttacggcaactaacacggctggcagttttgtggcctatgccactgtcaatgttttagataagcctggtcctgtgagaaatctgaaaattgttgatgtgtccagtgataggtgtactgtttgctgggatccaccagaagatgatggtggctgtgaaatccaaaattatattctagaaaaatgtgagacaaagcgaatggtttggtctacctattctgctactgtcttgacacctggtactacagtaacacgtctcatagaaggaaatgaatatattttcagagtccgtgcagaaaataaaataggcacagggcctccaacagaaagtaaaccagtcatagccaaaaccaagtatgataaacctggtcgccctgatcccccagaagtcactaaagtaagcaaagaagagatgactgtggtttggaatccacctgaatatgatggtggaaagtctataactggatactttttggagaaaaaggaaaagcattcaacacgatgggtccctgtcaacaagagtgcaatccctgagagacgtatgaaagtacagaatctcctcccagaccatgaatatcagttccgtgtcaaggcagaaaatgaaattggaattggagaaccaagcttgccttcaagaccggtggtggcaaaagaccccataggtaggatgtccttgttttttctgatattacagcaactcttaatctcaagcacagaagtattcgataaataagttaatgtaacatctaaatctgtaacatccaaactgtatttagcaaatatttttccaaatagaccttttaccaaaatacctaaaaggtacaaacaatagtagattctcatttttatgaaggaaaataaagaggacactaattgaaaaattggatgacctatatttgattaactgagaataggctatataaaattacacattgaagtatcactagtagtagttaactatatgtatattttactttcagagccacctggtccaccaaccaatttcagagtggttgatacaaccaaacattccataactcttgggtggggaaaaccagtctatgatggtggtgcaccgatcattggatatgttgtggaaatgagaccaaaaatagcagatgcgtctcctgatgaaggctggaaacggtgtaatgctgcagcacagcttgtacgcaaggaattcactgttaccagcttggatgaaaaccaggaatatgagttcagggtgtgtgcccaaaaccaagttggtattgggcgccctgcagagctaaaggaagctatcaaacctaaagaaatactaggtaagtccttcccttagcatgtgattcattcacacttaatttcttatgatttccccacattctgaaaaatcaattaatgaccttaatgtcatttgcagaacctccggagattgatttggatgccagcatgaggaaactggtcatagtgagagcaggatgccctattcgtctctttgctatagtgagaggacgaccagcccctaaagtcacttggcgaaaagttggcattgataatgtggtcagaaaaggacaagttgatctggttgacactatggccttccttgtcatccccaattctacccgtgatgactcaggaaaatattccttaacacttgtgaacccagcaggagaaaaggctgtattcgtaaatgtcagagtattaggtgggttactaaaatgcttctccctcccacttcaaaaatgaatttgttaatagggatgctgaggagacatgtatatctgattttatgattctttacagacactcctgggcctgtgtctgatttaaaagtttcagatgtcactaaaacatcatgccatgtgtcctgggcccctcctgaaaacgacggtgggagccaagtgacacattatatcgtggagaaacgtgaggcagacagaaagacatggtcgaccgttaccccagaagttaagaaaacaagcttccatgtaaccaatcttgtccctgggaatgagtattacttcagagtaactgctgtcaacgaatatggccctggcgtcccaacagatgtcccaaaaccagtgcttgcatcagatcctctaagtaagtattatgctttcttcctccttttaaccccagtctcctattttagcaaggtcaagatactaataccattttaatccacttctgaaagagatttcatttgtagagaccgaaatagtgtaataaatatctatctcactcatgaaacacttttttgatctgtctcatcttatatgttttgcttttaatgtactgaactacaggttctatgtacattggagcaaatccatactaaaactcttatgtacattaacaaaggggatttgattaggttacctaggtaatcttctaaattatgtttttcttctaggtgagccggatcccccaaggaaattagaagtgactgaaatgaccaagaacagtgccaccttagcctggttacctcccctacgtgatggaggtgctaaaatcgatggctacatcactagttacagagaagaagagcagcctgcagatcgctggacagagtactcagtggtaaaagatctgagccttgttgtcactggcctaaaggaaggaaagaaatacaaatttagagtagcggccagaaatgctgttggagtcagtttgccaagagaagctgaaggagtgtatgaagccaaagaacaactgtgtaagtagtctttgcttcatttatgtcatgtggtaagtttattagaatttcttcttttatatgtagacatttctccctgaggaatctagctctagaaattcttgaaaaacagtagagaacagtggctttcaaacacatgagtgggccaaaaacacacagtaaataaacttatacaaacacatatataactaaaaaacatttcctgaaacaatacccatttattatcatgtgcattcttatgttttctaccctattctgtgtttttaaaaatattggctgtacaacaaacatatgaagaaaagctcatcaccactggtcactagagaaatgcaaatcaaaaccacaatgagataccatctcacaccagttagaatggtgatcactaaaaagtcaggaaacaacaggtgctagagaggatgtggagaaataggaaagcttttacactgttggtgggagtgtaaattagttcaaccattatggaagacagtgtggcgattcctcaaggatctagaaccagaaataccatttgacccagcaatctcattactgggtatatacccaaaggattataaatcattctactataaagacacatgcacatgtatgtttattgtggcactgttcacaatagcaaagacttggaaccaacccaaatgcccatcaatgacagactggataaagaaaatgtggcaccacatttacaccacaggatactacgcagccataaaaaaggatgagttcatgtcctttgcagggacatggatgaagctggaaaccatcattctcagcaaacacaagaacagaaaaccaaacaccacatgttctcactcataagtgggagctgaacaatgaaaacacatggacacagggaggggagcatcacacactggggcctgtcaggggttgggaggctaggggaaggatagcattaggagaatacctaatgtagacgatgtgttgatgggtgcagcaaatcaccatggcacatgtatacctatgtaacaagcctgcacattctgcatatgtatcccagaacttaaagtatatattaaaaaaaattggtggtaatacaagcattaatttgcaccagtatagctctccaccagaagaaacttatccaccttcccaaaattaatatcttttcattttactttcagtgccaccaaagatccttatgccagagcaaataactatcaaagctgggaaaaaactccgaattgaagcccatgtgtatggaaagcctcatcccacctgtaaatggaaaaaaggagaagatgaagttgtcacatccagccacctggcagtgcataaagcagacagctcttcaattctgatcataaaagatgtgactaggaaagacagtggttactacagcctcacagcagagaacagttctgggacagacactcagaaaatcaaagttgtagtcatgggtaagttaagtattagacaaatggccatctaaatatgaagctcagaaatatttttacgtatcaaatccttgttcttacatttctttcctcttggttcatgtagatgcccccggcccccctcagcctccatttgacatttctgatatagacgctgatgcttgctccctgtcatggcacatccctctggaggacggaggcagtaacatcaccaattatatagtggagaagtgtgatgtaagccgaggtgactgggtcacggctctagcttcagtcacaaaaacttcctgcagggttggaaagctgatcccaggccaggagtacatcttccgggtccgtgctgaaaaccgatttggcatttcagagcctctcacatctccaaagatggttgcgcagttcccatttggtatgtttttgtgaaggagaaaaaaagttgttttctttctagtttgttacttaatgtagaaactgacatcttccttgtcttcatctccaggtgttcctagtgaaccaaagaatgcacgagtcaccaaagtcaacaaggactgtatttttgttgcttgggacagaccagatagtgatggagggagccccattattggttatctgattgaacgcaaggaaagaaacagtttgctgtgggtgaaagccaatgatactcttgtccggtcaactgaatatccttgtgctggccttgtagaaggtcttgagtattcattcagaatctatgccctaaacaaagctggatccagcccacccagcaaacccacagaatatgtaactgcaagaatgccagttggtaagttttggggtttttttattgttgttgttgttttagtattatggaggcacatttaaatctcggagtctaagatttggactccaagacacagagagtagtagagatctgaagattacaactcccatttaagaatatgttctatctcttacaatgaagatgacatattaaaaaaagaaaaggacatataatttcctttaaagcatacagcaaggactcaaaagtgcatactagttggacggttattaaaatgggataattgtcttcctgttgagcttgttacttagcagcagggatgataatgtgaaatatggaagtttaaacttctgctggtaagataaatggtgagtgtacctctttttgttttagatcctcctgggaaacctgaggttattgatgtcaccaagagtactgtatctctgatctgggctcgtccaaagcatgatggaggcagtaaaattattggctatttcgtagaagcttgcaaacttcctggtgataaatgggtacggtgcaatactgcacctcaccagattccccaggaagagtacacagctactggcctagaagagaaagctcagtatcaatttagagctattgccaggaccgcggtaaacattagcccaccttctgaaccttctgatccagtgactatcctcgcagaaaatggtaagattctgctgagtattataggcaaagatgtaacagcattcatgatggtcatttttcctaataaaaaactaaatatacacctaaggaaaaaaggaaaattaaaatgatgttttgtatatagacacaaacattatgattatggagaatcataataacatgctaaattaaaaagcaagatacacaactgtggcaactatataatttcaatagttattcaatagtgcagttattatttgtctattaaaaataaacaaaatgaaataacactaaaattccattcttgaaagaagcagcatatgaatttcccactattattaataaggattacataatatagctttgcatacattaagtcctttatcttatttctttccagtccctcccaggatagacctgagtgtggctatgaaatctttgcttactgtgaaagctggaactaatgtctgcttggatgctactgtttttggtaaaccgatgccaacagtttcttggaaaaaagatggcacactgctaaaaccagcagaaggcataaagatggccatgcagcggaatctgtgcaccttggagctattcagcgtgaaccggaaggactcaggagactataccattactgctgaaaattcaagtggttctaaatcagccaccattaagcttaaagtgttaggtaactaataaacttcattggaatcccatattttactttggataatgggatgtaaataggatttacagaataatgtgggagaagacattcatattctaatgtgtatttcctatgcacagaattattcttatgacagaaccacgttttagagttaaaaagagctttagaaatcacatatttcaattacctaattttacaagtgaagaaactaagattctaaaaaattaactaacctcctaggtcatataggaaattgacaatagaaagactgcagcccaggtctccagacctctactctatactcattccccattccacatattcactcttcttccttattccttcagataaaccgggtcctccagcatctgttaaaatcaacaaaatgtattcagatcgtgctatgctttcttgggaaccgcctcttgaagatggaggctcagaaatcaccaactatattgttgacaaacgtgaaacaagcaggcccaactgggctcaagtctctgcaactgtgcctatcaccagctgcagcgtggagaaacttatagagggccatgagtatcagttccgtatttgtgctgaaaataaatatggagtaggcgatccagtcttcactgaaccagcaattgccaaaaacccatatggtaggaacatttcccggtggtttttcattttattttttaaaattatcttttagcctgggaaattaacttttcaatcaatttctgcagacccaccaggacgctgtgatcctcctgttattagcaacataaccaaagatcacatgacagtcagctggaagccaccagcagatgatgggggctcacccatcactggctatttgcttgaaaagcgggaaacccaggctgttaactggactaaggtcaacagaaaacctattatagaaagaacattaaaagcaacaggtcttcaagaaggtaccgaatatgagttccgtgttacagctataaataaagctggaccaggcaaacccagtgacgcatccaaggccgcttatgctcgggaccctcagtgtaagtgttcatgaacgagttccatatcctgtgttaaaagcagcattaaacacccaggaaggaagttttcatgaaaatttcctatcattatttattctcagatcctcctgcgccaccggctttccctaaagtatatgatacaactcgcagctctgtgagtctatcttggggcaagccagcctatgacggcggcagccctatcattggttatctcgttgaagtaaaacgggctgactccgataactgggtgaggtgcaacttaccacagaatctacagaaaacccgctttgaggttactggcctgatggaagacacacaatatcaattccgtgtgtatgccgttaataagattggatacagtgaccccagtgatgtgccagataaacactatcccaaggacatcttaagtaagtattaccagggggagtacataaggcttttcctattaatcatattctaagagggagactagaactcccttaggtagattaatttattaacaaggtgtagagctggtaactccaagagtactttttaggagagctgggtgggtactttacggtattgtggaacaggcaaatcaaatgcacatgatttgtggttttgaaaagcttttcatatatataagaatttcctgtcttcaaaagacatgaaatgagagaattttattggaatgtaagaattttattttaggaataaagaggccttttaactaagtagtgagctatttactattcttagggtttctgttttccaatccaccatctccctaagtatgtgactggtgggctctccatcttaatttcccttcttcttatttcttctatttgcttatcctccatgataatttcccctttatttgaattacttgatattatatgtcaccctccaggtacttttcttcctactatgaaataataaagagagctagaatatgtggcagaataccttcatggaatatagaaaggaaaaaacaagaatgaaagggagccaaaaatcaatcgtctactttccttttaatatatgtagcatttcagagtacataaggctcatgaaagaggaggtacagatcctccggggggaaaacctggttaagcctaaagcatagtggaaaatggaaagatcaacaattagtacagaacagaaaaatgattttgaggattgtattaaggaagttttaaagaacaagaaatcagctctagaaaataaatgtattttaggagtgacaaggccagtccctggaaatacatttgactattaaatttttatttaacttcttcacccaaaattaaacagttccacctgagggagaacttgatgcggacttaaggaagacactcatattacgtgctggagttactatgagactatatgtaccagtaaaaggacgcccacctccaaagattacttggtctaaaccaaatgtcaatctaagagacaggattggactggacataaagtcaactgactttgacactttcttgcgctgtgaaaatgtgaacaaatatgatgcaggaaaatatatcttaaccctggagaacagctgtggtaaaaaggaatataccattgttgtgaaagtgcttggtaagtctatttcaaaaaagaatcatatatattttaaaatagcttatgtattttttacacattcatttcttatttacctactatttatccagatactcctgggccacctgtcaatgtgactgttaaggaaatatccaaagactctgcttatgttacctgggagcctcccattattgatggcggaagccccatcataaactatgtggtacaaaaacgtgatgcagagaggaaatcctggtctacagtgacaactgagtgctccaaaacaagcttcagagtagctaatttggaggagggaaaatcctacttcttccgagtgtttgctgaaaatgagtatggcattggtgatcccggtgaaactcgtgatgctgtcaaagcttcccgtaagcaaatgaaccatcatcccatcattttgagttatatccttcctttgttatatggggcttacacttatcatttctcctttgctttagaaactcctggaccagttgtggacctgaaagtgaggtctgtatctaagtcatcctgtagcattggctggaaaaagcctcacagtgatggtggaagtcggattattggatatgtagttgatttcctgactgaagaaaataagtggcaacgagttatgaaatccttaagcctacagtactctgcaaaagatttgactgaagggaaggaatataccttcagagtgagtgctgagaatgaaaatggagaaggaaccccaagcgaaatcactgttgtggcaagggatgatgttggtaaggctctatgcacacatcttcatttttcctttattgtcatcgaaagtgcactcttgtgtcccactcactagcttatctaaaaatccgttaaaagctagaactatttgaaaaagttaatcgcctggccttaaaaataacagtaatttatctctgctattttacagtggctcctgatcttgacttaaagggtctacctgatttgtgctacttggctaaagaaaacagcaacttccggcttaagatccccataaaaggcaagccagctccatcagtctcctggaagaaaggggaagatcctctagcaactgacactagagtcagtgttgagtcatctgcggttaacacaactcttatagtgtacgattgccaaaaatctgatgctggaaaatacacaatcacacttaagaatgttgctggcaccaaggaaggaactatctccataaaggttgttggcaagcctggcatccccactggaccaatcaaatttgatgaagtcacagcagaagccatgaccttaaagtgggctcctccaaaggatgatggaggttctgaaatcaccaactatatcctagagaagagggattctgtgaacaacaagtgggtgacgtgcgcctcagctgtccagaaaaccacctttagagtaaccagacttcatgagggcatggaatataccttcagggtcagtgccgaaaataaatatggtgtaggggaaggcctgaaatcggagccaattgttgcgagacatccatttggtaagtgtcttaaattcagaagacgtaaagcaaaacacggttttgaggaggcttcttattataaatcttgcattatctacttttttctagatgtgcctgatgctcccccacctcccaatattgtggatgtcagacacgattcagtatctctaacttggactgaccccaagaaaactggtggttctccaattacaggtattttgtttgttcttatcctacagcttttacatcaagattcctcacaaatatttccctgagaacagttgaacatgtgcttatcgataacattatctgcttatacagaaatgtgtttttatttcagtacatatggttaatgtttaattttattgaaaatatcctaatgtaatagttaataaagtatttcttaattataatatctatttttgtaagttaaaattgttcaccaaaaaagacaacaactatgcatattccaagaggaaaaaaaaaatggcactatgcttgggtaataaaagtatagatactagcaagaatgactacttgttcaatatatatggatatgtataaataatttgggcaacacatatatattgtaaaatcaagctgcatttatacttgatacatccctgggtcttttgtagggtatcatctcgagttcaaggaaagaaacagccttttgtggaagagagctaacaagactccgataaggatgagagactttaaagtgacaggattaactgaaggtcttgaatatgaattccgagttatggcaatcaatttagcaggtgtgggcaagccaagcctaccatcagagcctgttgtggcactggacccaattggtaagtcattatatgaagaaaaacccaggtgcatgttttacatgaagaaaactggtatttgtttgactggttttgcttttatgttttagatcctcctggaaaacctgaggttattaacataacaaggaattcagtgactctcatttggactgaacctaaatatgacggtggtcataagttaactggatatatagtggagaagcgagatctaccttcgaagtcttggatgaaagccaaccatgttaatgtcccagaatgtgcctttactgtaactgaccttgttgagggtggaaaatatgaattcagaattagagcaaagaatacagcaggtgctatcagtgctccatcagaaagtacagaaaccattatttgcaaggatgaatacggtaggtccattttactttttatgtacttttttttttaaagcaaattaagcctccttccttttctgattaaaatgtatttttttctttgcagaggcaccaacaattgtccttgatcccacaataaaagatgggctaacaattaaagcaggggataccattgttttgaatgccattagcattcttggcaaaccccttccaaaatcaagttggtccaaggcaggaaaagacattagaccatcagatatcactcagataacttcaaccccaacatcttccatgcttactatcaagtatgccactagaaaagatgcgggtgaatataccatcactgctaccaatccttttggcacgaaggtggaacatgtgaaggtaacagtccttgatgtacctggtcccccaggtcctgttgaaatcagtaatgtttctgctgaaaaagcaacacttacatggacacctcccttggaagatggcggctcaccaattaagtcctatatacttgaaaagagagaaaccagccgacttttgtggacagtggtttctgaagatattcagtcttgcaggcatgtggcaaccaaacttatccaaggaaatgagtacatcttccgggtctcagctgtaaaccactatggcaaaggagaacctgtacagtctgaacctgtcaaaatggtagacagatttggtatgtagagcatgtgagggaattgacatggaaacatttatagcagagtttaggaaatcatggatttctaataaatttgcttccttttcaggtccccctggccctcctgaaaaaccagaggtatcaaatgtcactaagaacactgccactgtcagctggaaaaggccagtggatgatggtggcagcgaaattacaggatatcatgtagaaaggagagaaaagaaaagcctgcgatgggtgagagcaataaaaacaccagtttccgatctcaggtgcaaagtaacaggactgcaagaaggaagcacctacgaattccgtgtcagtgcagaaaacagagcaggaattggtccacccagtgaggcttcagattctgttctgatgaaagatgcagcatgttagtatttgtctttttcaacaccgttcattccagagtgccaatattttatctaaattacccaaaagccaaactctgaatatatacttttgtgtctttgtttctttctcagatcctccaggaccaccttcaaatccgcatgtcactgatactaccaagaaatctgcttctttggcatggggcaagcctcattatgatggtggacttgaaatcactggctatgtcgtggagcatcaaaaagtaggagacgaggcctggataaaagataccacaggaaccgccctcagaatcactcagttcgttgttcctgatcttcagactaaagaaaaatacaacttcagaatcagtgccatcaacgatgcaggtgttggggagccagcggtgattccagatgttgaaatcgtagaacgggagatggctcctgattttgaactagatgccgagcttcgaagaacacttgttgttagagcaggactcagtattaggatatttgtgccaattaaaggtcgtcctgctcctgaagtgacatggaccaaagataacatcaacctgaaaaaccgagccaacattgaaaatacggaatcatttactcttctgattatcccagaatgtaacagatatgataccggtaaatttgtcatgaccattgaaaacccggctgggaagaaaagtggctttgtgaacgtcagagtcttggacacgccaggcccagtcctcaacctgcggcctacagacatcacaaaggacagtgtcaccctgcactgggacctccctctgatagatggaggctcacgtataacaaactacattgtagagaaacgtgaagcaacacggaaatcttattccacagccaccactaagtgccataaatgcacatataaagttaccggcttgtctgaagggtgtgaatatttcttcagagtgatggcagagaatgaatatggaattggtgagccaacagaaactacagagcccgtaaaagcctctgaagcaccatctccaccagacagccttaacatcatggacataactaagagcaccgtcagcctggcatggcctaagcccaaacacgatggtggcagcaagatcactggctatgtgattgaagcccaaagaaaaggctctgaccagtggacccacatcacaaccgtgaaagggttagaatgtgttgtgaggaatctaactgaaggagaggaatataccttccaagtgatggcagtgaacagcgcggggagaagtgcccctagagaaagcagacccgtcattgtcaaggagcagacaatgcttccagagctggatctccgtggcatctatcagaaactggtcattgccaaagctggtgacaacatcaaagttgaaattccagtgctcggtcgaccgaagcccacagtgacatggaaaaaaggagaccaaattcttaaacagacacagagagttaattttgaaaccacagcgacttcaaccattttaaatatcaatgagtgtgtcagaagtgatagtgggccctatccattaacagcaaggaacattgtaggagaggttggtgatgtcatcaccattcaagtccatgatatcccagggccacctactggaccaatcaaatttgatgaagtttcatctgattttgtaaccttctcttgggacccacctgagaacgatggtggtgtaccaataagcaactatgtagtggaaatgcggcagactgacagtactacctgggttgagttagcaaccaccgttatacgtactacctataaagccacccgccttactactggattagagtatcagttccgtgtaaaagctcagaatagatatggagttggaccaggcatcacatcagcatgcatagttgccaactatccatttaaggttcctggacctcctggtacccctcaggtaactgcagttaccaaggattcaatgacaattagctggcatgagccactttctgatggtggaagccccattttaggatatcatgttgaaagaaaagaacgaaatggtattctctggcagactgtgagcaaagctttagtaccaggcaacattttcaaatcaagtggacttacagatggtattgcttatgagttccgggtgattgcagaaaacatggcaggcaaaagtaagccaagcaagccatcagaacctatgttggctctggatcccattgacccacctggaaaaccagtacctctaaatattacaagacacacagtaacacttaaatgggctaagcctgaatatactgggggctttaaaattaccagttatatcgttgaaaagagagaccttcctaatggacggtggctgaaggccaacttcagcaacattttggagaatgaatttacagtcagtggcctaacagaagatgctgcatatgaattccgtgtgatcgccaaaaatgctgcaggtgccatcagtccaccatctgagccatctgatgctatcacttgcagggatgatgttgaggcaccaaagataaaggtggatgttaaatttaaggacacggttatattaaaagcaggtgaagcattcagactggaagctgatgtttcaggccgcccacctccaacaatggaatggagcaaagatggaaaagagctggaaggcacagcaaagttagaaataaaaattgcagatttctctactaatctggtaaacaaagattcaacaagaagggatagtggtgcctatacccttacagcgactaatcctggtggctttgctaaacacattttcaatgtcaaagttcttgacagaccaggcccacctgaaggacctttggctgtaactgaagtgacatcagaaaagtgtgtactatcatggttccctccactggatgatggaggtgccaaaattgatcattacatagtacagaaacgtgaaaccagcagattggcatggacaaatgtagcctcagaagtccaagtaacaaagctaaaggtcactaaactcttgaaaggcaatgaatacatattccgtgtcatggctgtaaataaatatggagtgggagagccactggaatcagagcctgtgcttgcagtgaatccttatggaccccctgatccgcccaaaaaccctgaagtgacaactattactaaagattcgatggttgtctgctggggacatcctgattctgatggtggaagtgaaatcatcaattatattgtggaacggcgtgataaagctggccaacgctggattaaatgcaacaaaaaaactcttactgatttaagatataaagtgtctggactgacagaaggacatgaatatgagttcaggattatggctgaaaatgctgctggaattagtgcaccaagtcctaccagtccattttacaaggcttgtgacactgtgtttaaacctggaccaccaggtaacccacgtgttctggatacaagcagatcatccatttcaatcgcttggaataaacctatctatgatggtggttcagaaatcactgggtatatggttgagattgccctgccagaggaagatgaatggcagattgtcactccaccagcaggactcaaggcaacttcgtatactatcactggcctcacagagaatcaggaatataagatccgcatctatgccatgaattccgaaggacttggggaacctgcccttgttcctggaactccaaaggctgaagacagaatgctgcctccagaaattgaactggatgctgacctgcgcaaagttgttactataagggcctgctgcaccctgagactttttgttcccatcaaaggaaggcctgcacctgaggtgaagtgggcccgggaccatggagaatctttagataaagctagcatcgaatccacaagctcttacaccctgcttattgttggaaatgtaaacagatttgacagtggcaaatatatactaactgtagaaaatagttcaggcagcaagtctgcatttgtcaatgttagagttctcgatacaccaggccccccacaggatctgaaggtaaaagaggtcactaagacatctgtcacactcacatgggacccacctctccttgatggaggttcaaaaatcaagaactatattgttgaaaagcgggaatcaacaagaaaagcatattcaactgttgcaacaaactgccacaagacttcctggaaggtagaccagcttcaagaaggctgtagctactatttcagggttctcgcagaaaatgaatatggcattgggctgcctgctgaaaccgcagaatctgtgaaagcatcagaacgacctcttcctccaggaaaaataactttgatggatgtcacaagaaatagtgtgtcactctcttgggagaaaccagagcatgatggaggcagccgaattctaggctacattgtggagatgcagaccaaaggcagtgacaaatgggccacgtgtgccacagtcaaggtcactgaagccactatcactggattaattcagggtgaagaatactctttccgtgtttcagctcagaatgaaaagggcatcagtgatcctagacaactgagtgtgccagtgatcgccaaagatcttgtcattccaccagccttcaaactcctgttcaatactttcactgtactggcaggtgaagacctaaaagttgatgttccattcattggccgccctaccccagctgtaacctggcataaagataatgtaccactgaagcagacaactagagtaaatgcagagagcacagaaaataattcactactgacaataaaggacgcctgccgagaagatgttggccattatgtggttaaactgactaactcagctggtgaagctattgaaacccttaatgttatcgttcttgacaaaccagggcctccaactggaccagttaaaatggatgaagtgacagctgatagtattactctttcctggggcccacccaagtatgatggtggaagttctatcaataattacattgttgagaaacgggacacttccacaaccacctggcaaattgtatcagctacagttgcaaggacaacaataaaggcttgcagactgaagactggatgtgaatatcagtttagaattgcagctgaaaacagatatgggaagagtacctacctcaattcagagcctactgtagcccaatatccattcaaagttcctggtcctcctggcactccagttgtcacactgtcctccagggacagcatggaagtacaatggaatgagccaatcagtgatggaggaagtagagtcattggctatcatctagaacgcaaggaaagaaatagcatcctctgggttaagttgaataaaacacctattcctcaaaccaagtttaagacaactggccttgaagaaggtgttgaatatgaatttagagtctctgcagagaacatcgtgggcattggcaagccgagtaaagtatcagaatgttatgtggctcgtgacccatgtgatccaccaggacggccagaggcaatcattgtcacaaggaattctgtgactcttcagtggaagaaacccacctatgacggtggaagcaagatcactggttatattgttgagaagaaagaattacctgagggccgttggatgaaagccagttttacaaatattattgacactcattttgaagtaactggcctagttgaagatcacagatatgagttccgggttatagcccgaaatgccgcaggagtgtttagtgagccttcagaaagcacaggagcaataacagctagagatgaggtagatccaccacgaataagtatggatccaaaatacaaagacacaatcgtggttcatgctggtgaatcattcaaggttgatgcagatatttatggcaaaccaataccaaccattcagtggataaaaggtgatcaggagctttcaaacacagctcgattagaaataaagagcaccgactttgccaccagtctcagtgtaaaagatgcagtacgtgtcgacagtggaaattacatactgaaggccaaaaatgttgcaggagaaagatcagttactgtgaatgtcaaggttcttgacagaccagggccacctgaaggacctgttgttatctcaggagttacagcagaaaaatgcacactagcttggaaacccccacttcaggatggtgggagtgacatcataaattatattgtggaaaggagagaaaccagccgcttagtttggactgtggttgatgccaatgtgcagactctcagctgcaaggttactaagcttcttgaaggcaatgaatatactttccgtataatggcagtaaacaaatatggtgttggtgaacctcttgaatctgagccagtagttgccaagaatccatttgtagtaccagatgcaccaaaagctccagaagtcacaacagtgaccaaggactcaatgattgttgtatgggaaagaccagcatctgatggtggtagtgaaattcttggatatgttcttgagaaacgggataaagaaggcattagatggacaagatgccataagcgtctgattggagagttgcgcctgagagtaactggactcatagaaaatcacgattatgagttcagagtttctgctgagaatgctgctggacttagtgaaccaagccctccttctgcttaccaaaaggcttgtgatcctatttataaaccaggacccccaaacaaccccaaagtcatagacataaccagatcttcagtattcctttcttggagcaaaccaatatatgatggtggctgtgaaattcaaggatacattgttgaaaaatgtgatgtgagtgttggtgaatggacaatgtgcactccaccaacaggaattaataaaacaaacatagaagtagagaagctgttggaaaagcatgaatacaacttccgtatctgtgctattaataaagctggagttggagaacatgctgacgtccctggacctattatagttgaagaaaaattagaagcaccagacattgatcttgacctagaactaaggaaaatcataaatataagggcaggtggctccttaaggttatttgttcctataaaaggtcgtcctacaccagaagttaaatggggaaaggtggatggtgaaatccgagatgcagctataattgatgtcactagcagtttcacctctcttgttcttgacaatgtcaaccgatatgatagtggaaaatatacgcttacattagaaaacagcagtggaacaaagtctgcctttgttactgtgagagttctggacacgccaagtccacctgttaacctgaaagtcacagaaatcaccaaagactcagtatcaattacatgggaacctcctttgttggatgggggatccaaaataaaaaattacattgttgagaaacgtgaagccacaagaaaatcatatgctgctgttgtaactaactgccataagaattcttggaaaatcgatcagctccaagaaggttgcagttattactttagagtcacagctgagaatgagtatggtattggccttcctgcccagactgctgatccaattaaggttgcagaagtgccacaacctcctggaaaaataactgtggatgatgtcaccagaaacagtgtctctctgagttggacaaaacctgaacatgatggtggcagtaaaatcattcagtatattgtggaaatgcaagctaaacacagtgagaaatggtcagagtgtgctcgagtaaagtctcttcaggcagtaattaccaacctaactcaaggggaagaatatctttttagagttgttgctgtaaatgaaaaggggagaagtgatcctcggtcccttgcagttccaatagttgccaaagatctggtaattgagccagatgtaaaacctgcattcagtagttacagtgtacaggttggccaagatttgaaaatagaagtgccaatttctggacgtcctaagccaaccattacctggactaaagatggtctcccactgaagcagaccacaagaatcaatgttaccgattcactggatctcaccacactcagtattaaagaaactcataaggatgatggtggacaatatggaatcacagttgccaatgttgttggtcagaagacagcatccatcgaaattgtaactctagataaacctgatcctccaaaaggacctgttaaatttgatgacgtcagtgctgaaagtattacattatcttggaaccctccattatatacagggggctgccaaatcaccaactacattgttcagaaaagagatacaaccaccacagtatgggatgttgtttctgctactgttgctagaactacactcaaagtgaccaaactgaaaactggtacagaataccaatttagaatatttgccgaaaacagatatggacaaagctttgccttagagtctgatccaattgtagctcaatatccctacaaagaaccaggccctccaggtacaccatttgccacagccatttccaaagactccatggtcatacagtggcatgaaccagtcaacaatggtggaagccccgtcataggttaccacctggagagaaaagaaagaaacagtattttgtggacaaaggtcaacaaaactattattcatgacacccaattcaaagcacagaatcttgaagaaggcattgaatatgaattcagagtgtatgctgaaaatattgttggtgtaggcaaagcaagcaagaattctgaatgctatgtagccagagatccctgtgacccaccaggaaccccagaaccaataatggttaaaagaaatgaaatcactttacagtggaccaaacctgtgtatgatggtggaagtatgattacaggctacattgtagagaaacgtgatttgcctgatggtcgttggatgaaagctagctttacaaatgtcattgaaactcaatttactgtgtcaggtcttactgaagatcaaagatatgaattcagagtcattgcaaagaatgcagctggtgcaataagtaaaccctctgacagtactggaccaataactgccaaggatgaggttgaactcccaagaatttcaatggatccaaaattcagagacacaattgtggtaaatgctggagaaacattcagacttgaggctgatgtccatggaaagcccctacctaccattgagtggttaagaggagataaggaaattgaagaatctgctagatgtgaaataaagaacacagatttcaaggctttacttattgtaaaagatgcaattagaattgatggtgggcagtatattttaagagcttccaatgttgcaggttctaagtcattcccagtaaatgtaaaagtattagatagaccaggacctccagaagggccagtccaggttactggagtcacttctgaaaaatgctctttaacatggtctccaccacttcaagatggtggcagtgacatttctcactatgttgttgaaaagcgagaaaccagtcgacttgcctggactgttgttgcttcagaagttgtgaccaattctctgaaagttaccaaactcttagaaggtaatgaatatgttttccgtataatggctgtcaacaaatatggtgttggagagcctttggaatctgcaccagtactaatgaaaaatccatttgtgcttcctggaccaccaaaaagcttggaagtcacaaatattgccaaagactccatgaccgtctgttggaaccgtccagatagtgatggtggaagtgagattattggttacattgtagagaaaagagacagaagtggcattcgatggataaaatgtaataaacgccgcattacagatttgcgtctaagagtgacaggattaacagaagatcatgagtatgaattcagggtctctgcagaaaatgctgctggagttggggaaccaagtccagctacagtttattataaagcctgtgatcctgtgttcaaacctggcccacctaccaatgcacacattgtagacaccactaaaaattcaatcacacttgcctggggtaaacccatctatgatggcggcagtgagatcttgggatatgtagtagaaatctgtaaagcagatgaagaagaatggcaaatagttactccacagactggcctgagagtcactcgatttgaaatttcaaaactcactgaacaccaagagtataaaatacgagtctgtgccctcaacaaagttggtttaggtgaggctacatcagttcctggtactgtgaaaccagaagataaacttgaagcacctgaacttgaccttgactccgaattaagaaaaggaattgttgtaagagctggtggatctgccagaattcacattccattcaaaggtcgtccaacgcctgagatcacttggtctcgagaggaaggtgaattcacagataaggtccaaattgaaaagggagtaaactatacccaactatcaatagataactgtgatagaaatgatgctggaaaatacattcttaagttggaaaacagcagtggatcaaagtctgcttttgtaactgtgaaagttcttgacactccaggaccaccacagaatttggcagtcaaagaagtgagaaaagattctgccttcctggtatgggagccacccatcattgatggaggggcaaaggtcaagaactatgtgattgacaaacgtgagtcaaccagaaaagcgtatgctaatgtgagtagtaaatgcagcaaaacaagttttaaagtggaaaaccttacagaaggagccatttattacttcagagtcatggctgaaaatgaatttggagttggtgttccagtggaaactgttgatgccgtgaaagctgctgaacctccttccccaccaggaaaggttacactcactgatgtgtcccagaccagtgcatcacttatgtgggagaaacctgaacatgatggcggtagcagagtcctggggtacgttgttgaaatgcagcccaaaggaactgaaaaatggagcattgtggctgaatccaaagtctgtaatgcagttgttactggtttgagttctggacaagaatatcagttccgtgtcaaggcttataatgagaaaggaaaaagcgatccaagagtgttgggtgttcctgtcatagccaaggacttgactatacagcctagtttaaagttaccatttaacacatatagtatccaagctggagaagatcttaaaatagaaattccagttataggccgaccaagacctaacatttcttgggtcaaagatggtgagcctcttaaacagacaacaagagtaaacgttgaagaaacagctacctcaactgttttgcacattaaagaaggtaacaaagatgactttggaaaatacaccgtaacggcaacaaatagtgcaggcacagcaacagaaaatctcagtgttatcgttttagaaaagcctggacctccagttggcccagttcggtttgatgaagttagtgcagactttgtagtcatatcttgggaacctccagcctatactggtggctgccaaataagcaactacattgtagagaagcgagatacaaccaccaccacttggcacatggtatcagcaacagttgcaagaacaacaattaaaataaccaaactgaaaacaggcacggagtaccagtttagaatttttgctgaaaacaggtatggaaaaagtgccccactggattctaaggcagttattgtacaatatccatttaaagaacctggaccacctggaactccttttgtgacatcaatctcaaaagatcagatgcttgtgcaatggcatgagccagtgaatgatggaggcaccaaaattattggctaccatcttgaacagaaagaaaagaacagtattttatgggtcaagttaaataagacccccattcaggacaccaaattcaaaacaactgggcttgatgagggccttgagtatgagttcaaagtttctgctgaaaatattgttggcattggcaagcctagcaaagtgtcagaatgctttgttgctcgtgatccatgtgacccacctggtcgccctgaagccattgttattacaagaaacaatgtcacactgaaatggaagaaacctgcctatgatggtggtagcaaaataacaggttatattgtagaaaagaaagatctacctgatggccgctggatgaaagccagctttaccaacgtattagaaactgaatttacagtgagtggacttgtagaagaccaaagatatgaatttagagtaattgcaagaaatgcagctggaaactttagtgaaccatctgatagtagtggtgccattactgcaagagatgaaattgatgcaccaaatgcctctctggatccaaaatataaagatgtcatcgttgttcatgcaggagagacttttgttcttgaagccgacatccgtggcaaacctatacctgatgttgtttggtcaaaagatggaaaagaacttgaagaaacagctgctagaatggaaattaaatctactattcagaaaacaactcttgttgtcaaagactgtatacggactgatggaggacaatatattctgaaactcagcaatgttggtggtacaaagtctatacccatcactgtaaaggtacttgacaggccagggcctcctgaagggcctctgaaagttactggagttactgcggaaaaatgttacctggcatggaacccacctttgcaagatggtggtgctaatatttcacattacatcattgaaaagagggagacaagccgactctcttggacccaggtttcaactgaggtacaggcccttaactacaaagttactaaacttcttcctggtaatgagtacattttccgtgtcatggctgtgaataaatatggaattggagagcccttggaatctgggcctgttacggcctgtaatccttataagccaccaggtcctccctcaacacctgaagtctcagcaatcaccaaagattctatggtagtaacatgggcacgcccagtagacgacggaggtaccgaaattgagggctacattcttgaaaaacgagataaggaaggcgttagatggaccaagtgcaacaagaaaacattaacggatctgcggctcagggtaactggtcttaccgaaggccattcctatgaattcagagttgctgctgaaaatgcagctggtgtgggagaacctagtgagccatctgttttctaccgtgcgtgtgatgccttgtatccaccaggtcccccaagcaatccaaaagtgacggacacttccagatcttctgtctccctggcatggagtaagccaatttatgatggtggcgcacctgttaaaggctatgttgtagaggtcaaagaagctgctgcggatgaatggacaacctgcactccaccaacaggattacaaggaaagcagttcacagtgaccaagcttaaagaaaacactgaatataacttccgtatttgtgccatcaattctgaaggtgtaggtgaacctgcaactctacctggctcagtggttgctcaggagaggatagagccaccagaaatagaactcgatgctgatctcagaaaggtggtcgttctgcgtgcaagtgctactttacgcttatttgtcactatcaaaggtcgaccagaacccgaagttaaatgggaaaaggcagaaggcattctcactgacagggctcagatagaggtgaccagctcatttacaatgttggtgattgataatgttaccagatttgacagtggtcggtataatctgacattagaaaataatagtggctccaaaacagcttttgttaacgtcagagttcttgactcaccaagtgcccctgtgaatttgaccataagagaagtgaagaaagactcagtgacgttgtcctgggaaccaccacttattgatggtggagctaagattacaaactacattgtcgaaaaacgagaaactacaagaaaagcctatgctaccattacaaataattgcactaaaactactttcagaattgaaaatctacaagaaggatgttcttactacttccgagtcttggcttccaatgaatatgggattggtttgccagctgaaacaacagaacccgttaaagtgtctgaaccacccctcccacctggaagagtaactcttgttgatgtgacccgtaatacagctacaattaagtgggagaaaccagaaagtgatggtggcagcaaaattactggttatgtggttgaaatgcagactaaagggagtgaaaagtggagcacctgcacacaagttaagactctagaagcaactatatctggcttaactgcaggagaagagtatgtcttcagggtagctgcagttaacgaaaagggaagaagtgatccaagacaacttggagtgccagtaattgcaagggatattgaaataaagccttcagttgagcttcctttccatactttcaatgtaaaggctagagaacaacttaagattgatgtgccattcaaaggaagacctcaagctactgtgaactggagaaaagatggtcagactcttaaagagacaactagagtcaatgtttcttcttcaaagactgtaacatcactatctattaaggaagcttcaaaggaagatgttggaacttatgaattatgtgtttcaaacagtgctggatccataacagttcctattactataattgtccttgacagaccaggacctccaggtcctatacgtattgatgaggttagttgtgacagcataaccatttcttggaatcctccagaatatgatggtggctgccaaattagcaattacattgttgaaaagaaagaaaccacctctacaacatggcacatagtttcacaagcagttgcaagaacatccattaaaatagttcgcctgacaacaggaagtgagtatcagttccgtgtttgtgcagaaaaccgctatggaaagagctcctacagtgaatcttcagctgttgttgcagagtatccattcagtcccccaggtcctcctggtactcctaaagttgtgcatgccacaaaatctaccatgcttgtaacctggcaagtgccagttaatgatggaggaagtcgagtaattggctatcatcttgagtataaagaaagaagcagcattctttggtcaaaagcaaataaaatcctcattgctgatactcaaatgaaagtctccggccttgatgaaggactgatgtatgagtatcgtgtatatgctgaaaatattgctggaattggtaaatgcagtaaatcttgtgaaccagtccctgcaagagatccttgtgaccctcctggacaacctgaagtcacaaatatcacaagaaaatcagtgtcacttaaatggtctaaaccacattatgatggtggagctaagatcacaggatacattgttgaacgcagagaactaccagatggccggtggctgaagtgcaattatactaatatacaagaaacatactttgaagtaactgaacttactgaagatcagcgttatgaattccgggtttttgcaaggaatgctgctgactcagttagtgagccatctgaatccactgggcctattatagttaaagatgatgttgagcctccaagagttatgatggatgtcaagttccgagacgttattgttgtcaaagctggagaggtccttaagataaatgcagacattgcagggcgacctctgccagtaatttcctgggccaaggatggtatagaaattgaagaaagagcaagaacagaaatcatctcaacagacaatcatactttgttaacagttaaagactgtataagacgagacactgggcaatatgtactaacactgaagaatgttgccggcactcggtctgtggccgttaattgcaaagtacttgataagcctggtccaccagcaggaccacttgaaataaatggcctcactgctgagaaatgctctctttcctggggacgtccccaagaagatggtggtgcagatatcgactattacatcgtagaaaaacgtgaaacaagccaccttgcatggacaatatgtgaaggagagttacagatgacatcctgtaaagtaaccaagttactcaaaggcaatgaatatatatttagagtaactggtgttaataaatatggtgttggtgagcccctagagagtgtagctataaaggcactagatccatttacagttccaagtccacccacgtctttggaaattacttctgtgaccaaagaatctatgacactttgctggtcaagacccgagagtgatggaggtagtgaaatatctggatatataattgaaaggcgagagaaaaatagcctaagatgggtgcgtgtaaacaaaaaaccagtttatgatctaagagtgaaatcaacaggacttcgggaaggatgtgaatatgaatatcgtgtttatgcagaaaatgctgctggcctaagtcttccaagtgaaacctctcccttaattagggcagaagatccagtgttcctaccatctcctccatccaaacccaaaattgtggactcaggcaagacaactataactattgcctgggttaagccgctgtttgatggtggggccccgataactggatatactgtagaatacaaaaaatctgatgacactgactggaaaacttccattcagagcttacgagggacagaatatacaataagcggactaacaacaggagctgaatatgttttcagagtaaaatctgtcaataaggttggtgctagtgaccccagtgatagctctgaccctcagatagcaaaggaaagagaagaagaacctttatttgatattgacagtgaaatgaggaagaccttgattgtcaaggctggtgcctcatttaccatgactgtgcctttccgaggaagaccagtacccaatgtcttgtggagtaagccagacactgacctccgtactagagcttatgttgataccacagactcccgtacatcactgaccattgaaaatgccaacagaaatgactctggaaagtacacattaacaattcagaatgttttgagtgctgcttcactgaccttagttgtcaaagttttagataccccaggtcctccaaccaacattactgtgcaagatgtaaccaaagagtctgcagtgttatcctgggatgttcctgaaaacgatggtggagcaccagtgaagaattaccacatagaaaaacgtgaggccagcaagaaagcatgggtctctgtgaccaacaactgtaaccgcctctcctacaaagttaccaatttacaagaaggagctatctattacttcagagtctctggagaaaatgagtttggtgttggtataccagctgaaacaaaggaaggagtaaaaataacaggtatgttttaagaataaggaaattctacatatccacgttaattttgctagaatagtgtgagtcattctaattagtcgttatttcatcttaaatgcttttgggttcacacccttcacaccccaaactattcatactatggcacaaaatggaatctctagtgaagagtctttcattgattaaaaaaacagaaatttacgtagctaaaattggataatatatgttgaatttaagtattattgaatctaactgtatatatatgtaggtatacatgtttatatatatatatacacagattatatatatatagtatgtgtgtatgacatatatcatatgtgtgtatgtgcgtgtgtacagaaattgtatataaagttttttaaaagattgttcatcttgttcctcttttttatccccatggtgaatttggagtaaattttatcatttaatctggtcattttacccttaatttggatttgaatgctatagcatgtaatgacatagcttgtgggagccttggttggttcagaagcaaaatgggttatgtaaaaaggaagactaaaatcaacataaaaatatggccttcatttaaaagttttcttttgacaatacatgaagagtgcacatttaaaagtgctgtaataattattcactttcttttgatgctttgttttcttagaaaaaccaagcccacctgaaaaacttggagtaacaagtatatccaaagacagtgtttccctgacctggctgaagcctgaacatgatggcggaagcagaattgtacactatgtcgttgaagcactagaaaaaggacagaaaaactgggttaaatgtgcagtggcaaagtcaacccatcacgttgtttccggtctgagagagaattctgaatactttttccgagtgtttgctgaaaatcaagctggcctgagtgacccgagagagcttctgcttcctgttcttattaaggagcaactaggtatgtctaattttgtgtagaagcaaaatttgaaattatttgcattgatttatgttaattttcagaaacactttttcactttcactttctatactcatttttcagaaccacctgaaattgatatgaagaatttcccaagtcacactgtatatgttagagctggttcaaaccttaaagttgacattccaatctctggaaaaccacttcccaaagtgaccttatcaagagatggtgtcccccttaaggcaaccatgagatttaataccgaaattactgctgagaacctgaccatcaatctcaaagaaagtgttacagctgacgctgggagatatgaaatcactgctgccaactccagtggtacaaccaaagctttcattaacattgttgtgctagacaggcctggtcctccaactggccctgttgttattagtgatataactgaagaaagtgtgactctcaaatgggagccacctaagtatgacggtggaagtcaagttaccaactacattctactcaaaagagaaacaagtactgcagtgtggactgaagtgtctgcaacagttgcaagaaccatgatgaaagtcatgaaactgaccacaggagaagaataccaattccgcatcaaggcagaaaaccgctttggcatcagtgatcatatagattcagcttgtgtgactgtcaaactaccatacagtaagttgtccaacttttcaaagatccaggttttcttttaccataaatgtgttattgtctgtactaatctataggatttctctcttttgtagcaacacctggaccaccatctacaccatgggtcactaatgttactcgagaaagcatcactgtgggctggcatgaaccagtgtcaaatggaggcagtgcagtcgtaggctatcacctggaaatgaaagacagaaacagtattttatggcaaaaagccaacaaactggtcatccgcacaactcacttcaaagtcacaacaatcagtgctggacttatttatgaattcagggtgtatgcagaaaatgctgctggagttggaaaacctagccatccttctgaaccagtcttggcaattgatgcttgtggtacgtatttgtcatgggaagggcagttctgataacaaaaatgcaaatcttacttctgcgaagcaaaatattataagtgccgctaatctgcttctcttattaccacagaacccccaagaaatgttcgtatcactgatatttcaaagaactctgtcagcctttcatggcaacaaccagctttcgatggaggtagcaagattacaggctacattgttgagagacgtgaccttccagatggcagatggaccaaggccagcttcaccaatgttactgaaactcaattcatcatctctggcttgactcagaattcccagtatgaattccgtgtctttgctaggaatgctgttggttccattagcaatccatctgaggttgtagggcccattacttgcatcgattcttatggtaagcatgcttagcactttgaatcaaaattgctatttaactcagtatttccgcataccttttcctggttctaatcctatagaataacttttactctgtgccttaatggggtttttggaagaaattatggactagctgggagtctgaggaaaattccttaaatacctttccagccctcttgacttgactgtaaagtgagagatttagacctcaggatatctatgggcctttccaacttcaaccttttatgattgattgtatgagttggtgctttcattctgttttaaattatcagagtcaataattaaaccatggttgagttcctagagaatattgctcttaaataagccacagactaaacagagacttcattttttggtttttttttttttgtttgtttgtttgtttgtttgttttgagacagagtctcactctgtcgcccaggctgtagtgcagtggcacggtcttggttcactgcaacttccgcctcctgggctcaaacgattctcgtgcctcagtcacctgagtagctgggattacaggcatgccccaccacacccagctaattttttgtatttttagtagggacggagtttcaccatgttggccaggcaggtctcaacctcctgacctcaggtgatccacccacctcggcctcccaaagtgttgggattacaggtgtgagccaccatgcctggtctaaacacagactttgatgatgatagtattagcagcagctaacatttattgaggaattttcatgaattctttcccttagttctcacagccctcatattagccatcttatagaagggaaactgaggctgagagtgcttttgtaacttccccgttagggatggagtgggaattcagacagacagacttcagagccctctctatcatggttagtccaaaatgcgtattcttcaccattctggaaaataagtggcacattcaactcaacaatgttttgaaaattaaaacgtcatgagagtcaggtatcctgtgacactttacctaaaagatctccatttgctaagagaaaattgagccactgtagtgtctgggcaaaagtatccacttccatcttcatgctgagaatctcagggctgttcattatttatgaatcaggctttgtggatactgaatcagtgtttatgagagtataaagcaagtcgaatttagttatctttcttgataattccaaacagcatggcagaaaatctgtccagtaattatgtagctctgtgggtagagaattcagactttaagtgtctgacatgaaccatccacacttggatatcagtgaactgggatgggaaaagaaaaagaataggaggtgcgtagaagaaaaggaaagaaaagctaaagtgaaaggaaatgttttaacagcttcttccatgatgttctcactaccatatcccatttcttcactggaataaagcaactaatggactttaaaacacatgtaaaaggtgcttaagtccctgcacaactcacagtctttctaccccatctgagatagaagagtggcctataaatttttaatttttaaataataattgcatagaattataatgatggtgtgtgtgtataatttaataatggccaatgaccttactttaaggttggtgcaactatttttttttccatccttataatattttaaatatttctcatctgtttttcttgcaggtggtcctgtaattgatttgcctctagaatatacagaagttgtcaaatacagagcaggtacatctgtgaagctcagagctggcatttctggcaaacctgcgcctactattgagtggtataaagatgataaagaattacaaaccaatgcactggtgtgtgttgaaaataccacggacctcgcatctatactcatcaaagatgccgatcgccttaatagtggatgctatgaattaaaactaaggaatgccatgggctcagcctcagccaccatcagagtacagatccttggtaggtgctgaatacagaccactgtcatattacatttgcctaaagcttagtaattttgaacaagtaggctttaaagaagtactaacatcgtgttttgtcctttcactgatagacaaaccaggcccacctggtggaccaattgaatttaagactgtaactgctgagaagatcacccttctctggcggcctccagctgatgatggtggtgcaaaaatcactcactacattgtggaaaagcgtgagacaagccgcgttgtgtggtctatggtgtctgaacatttggaagagtgcatcattacaaccaccaaaattatcaaaggaaatgaatacatcttccgggtccgagccgtgaacaaatatggaattggcgagccactggaatctgattccgttgtagccaagaacgcatttggtgagacatgatttcattagaaaactgaaacgtgaaaaatttaaaaataaactacgctaacctgtgcatatgctttaattttcttttatataacacctgtctcattaccatccttttcacaaggtgaaaaatataaaaaataaaaccaatgttcttggaaagaatgcgaacatcaaaggtataatttatcagtaatgtggattcttgtaccttgttttcccttcctttctaaatagttacacctgggccaccaggcataccagaagtgacaaagattaccaagaattcgatgactgttgtatggagcaggccaattgcagatggcggtagtgatataagtggctatttccttgaaaaacgagacaagaagagcctaggatggtttaaagtactaaaagagactatccgtgacaccagacaaaaagtaacaggactcacagaaaacagtgactatcaatacagagtttgtgctgtaaacgctgctggacagggtccattttctgaaccatctgaattctacaaagctgctgatcctattggtaagtgctcatacctgcagcatcttcacctgtgtcttctatattcacctgtgtgactaaattgtacatgattgtgtaattattttattgtgaatggccattccagatcctccaggtccacctgctaagataagaatcgcagattcaaccaagtcatccatcacccttggctggagtaagcctgtctatgatgggggcagtgctgttactgggtatgttgtcgagataagacaaggagaggaagaggaatggactactgtctctaccaaaggagaggtcagaactacagaatatgtggtatccaacctgaaacctggagtcaattactacttccgggtatctgctgtaaactgtgctggacaaggagaacctatagaaatgaatgaacctgtacaagctaaagatatacttggtatgtacctactggtttgattatgttttttaataagcatacttccaggaaatcactcttttttgcttttaaaattcactgtatgtatccattttatgtctacagaggcaccagagattgacctggatgtggctctcagaacttctgttattgccaaagctggtgaagatgtacaagtgttgattccctttaaaggcagacctccacctactgtcacatggagaaaagatgagaagaatcttggcagtgatgccagatacagcattgaaaacactgattcatcctcattactcaccattcctcaagttactcgcaatgatacaggaaaatatattctcacaatagaaaatggagttggtgaacctaagtcttcaactgtgagtgttaaagtgcttgacacaccagctgcctgccagaaactacaggttaaacatgtttctcgaggcacagtcactttgctctgggatcctcctctcattgatggaggatctccaataattaattatgtcattgaaaagagagatgccaccaagagaacatggtctgtcgtgtcacacaaatgttctagcacatccttcaagctaatagatttgtcggagaagactccattcttcttcagagttcttgcagaaaatgaaattggaattggggaaccctgtgaaactacagagccagtgaaggctgctgaagtaccagctcctatacgtgatctctcaatgaaagactcaacaaagacatctgtcatcctcagctggaccaaacctgactttgatggtggtagcgtcatcacagaatatgttgtagaaaggaaaggtaaaggtgaacagacgtggtcccacgctggcataagtaagacatgtgaaattgaggttagccaacttaaggagcagtcagtcctggagttcagagtgtttgccaaaaatgagaaaggactgagtgatcctgtcactattgggccaattacagtgaaagaacttattattacacctgaagttgacctgtcagatatccctggggcacaagtcactgtgagaattgggcacaatgtgcaccttgaattaccttataagggaaaacccaaaccatccatcagttggctgaaagatggcttgccactgaaagaaagtgaatttgttcgcttcagtaaaactgaaaacaaaattactttgagtattaagaatgccaagaaggagcatggaggaaaatacactgttattcttgataatgcagtgtgtagaattgcagtccccattacagtcatcacccttggcccaccatcaaagcccaaaggacccattcgatttgatgaaatcaaggctgatagtgtcatcctgtcatgggatgtacctgaagataatggaggaggagaaattacttgttacagcatcgagaagcgggaaacttcacaaactaactggaagatggtgtgttcaagtgttgccagaacgactttcaaagttcctaatctagtcaaagatgctgagtaccagtttagagtgagagcagaaaacagatacggagtcagccaaccacttgtctcaagcattattgtggcaaaacaccagttcaggattcctggtcccccaggaaagccagttatatacaatgtgacttctgatggcatgtcactaacttgggatgctccagtttatgatggtggttcagaagttactggattccatgttgaaaagaaagaaagaaatagcatcctctggcaaaaagttaatacatcaccaatctctggaagagaatatagagccactggactggtagaaggtctggattaccaattccgtgtatatgctgaaaattctgctggcctaagctcacctagtgacccaagcaaatttaccttagctgtttctccagtaggtaagtgattattattcaaatacatttagtttagcaattgaacatattagaaacaaatatatcaaggaatgcttttcttctctgcatcaccttcttacatatcttcttgtcactagagaactggtcatgtaaagcaagaggaattattttaagtcagtctaataaactaatttgaagttcattttaaagactatgaaatggaaagttgaaattaatgaccaatatgagtttgggagattgaataaattacttattataaaaattttacttatttattaaaattatagaataattgtattgttcttccatggatgattaagacctggttacaaatgtaatgatgcatttaccttccttataattttttagacccacctggcactcctgactacattgatgtcacccgggaaaccatcacacttaaatggaacccaccattgcgtgatggaggcagtaagattgtgggctatagcattgagaaacggcaaggaaatgaacgctgggtgagatgcaactttactgacgtcagtgaatgtcagtacacagttacaggactcagtcctggggatcgctatgagttcagaataattgcaagaaatgctgttggaactataagcccgccctcacagtcttctggcattattatgacaagagatgaaaatggtaagcatttacaacttatttccaatgagactaagagcattcacatttttaaaaaacacatttggcccctggcctgtaaaatggtaacagaaacaaattacccaaggttgctaagtggatgaattatgtctttctacctttcagatgaaaagaagaaaaaaataattggcatcaattattttttctattatttcactccattcccatataaagagcatgcagcaagtgggaatgagtttttagctttgtaattttcgccacttaacagtacataaagaaaaggttctcgagaataagtgtccatctttactgaagttattaaaatacaacatacatccaacaacacaatcatccccttgcttgaatgcagctgatggcctcttaaaagaacttgtgtgactgtgcagcagtattaggaagtacatgatctgtaaatgtttcactttcctttttacaaagagcaatgcaaaattaaaaacatgacaggcattacaaagggaataataataggcaaatatttaaccccatagtccaaattctcaattatcaatcctactttcaaaataggctttggtagcacagtagaagtcactactcttcctggccttgtgatatggcactactgaaaaatatatatttatgtatgtctttattaagccaaactaatacatagtatttctctttcttttatagttccaccaatagtagagtttggccctgaatactttgatggtctcattattaagtccggagagagccttagaattaaagctttggtacaaggaagaccagtgcctcgagtaacttggttcaaagatggagtggaaatcgaaaagaggatgaatatggaaataaccgacgtacttggatccaccagcctatttgttagagatgctactcgggaccatcgtggtgtatacacagtggaagccaaaaatgcatctggttctgcaaaagcagaaattaaagtgaaagtacaaggtacttttaaaatagcttcttaatgctacaatttatgaacttggattagagacatgcctagttgtattttaatggacaaggaaaaagaaactaactctagaaactttttcttatagatacaccaggaaaagtagttgggccaataagattcaccaatattactggggagaagatgactctgtggtgggatgccccactcaatgacggttgtgctcccataacccactacatcattgaaaaacgggaaaccagcagacttgcctgggcactaattgaggataaatgtgaagcccaaagttacactgccattaaactaataaacggcaatgaataccaattccgtgtttctgcagttaacaagtttggtgttggcaggccacttgattctgatccagtggttgctcaaatacaatatagtaagtttgcgtttttactaagcggtactatgtcaaaagtttaaccttccaagcaaatgcatctaattgatttggggttttgtttttgttttacagctgttcctgatgcccctggcattccagaacctagcaacataacaggcaacagcattaccctgacatgggcaaggccagaatcagatggtggcagtgaaattcaacagtatatccttgaaagaagagaaaagaaaagcacaagatgggtaaaagtgatcagcaaacgaccaatctctgaaacaagattcaaagtcactggtctgacagaaggcaatgagtatgaattccatgtcatggctgaaaatgctgcaggagttggacctgcaagtggcatctcaagactcattaaatgtagagagcccgtcaacccaccaggtcctcccacagtggtcaaagtaacagacacatcaaagacaactgtgagcttagaatggtccaaaccagtgtttgatggtggcatggaaataattgggtatattattgaaatgtgtaaggccgacttaggagactggcacaaggtgaatgcagaggcatgtgtgaaaacaagatatacagtcactgatctacaagcaggtgaagaatacaaattccgagttagtgctatcaatggtgctggaaaaggcgacagctgtgaagtgactggcacaattaaagcagttgaccggttaacagctcctgagttagacatagatgcaaacttcaaacagactcatgttgttagagctggggccagtattcgcctcttcattgcctaccaaggtagacctactcctacagctgtgtggagcaaaccagactctaaccttagccttcgggctgatatccatacaacagattccttcagcaccctcactgtggaaaactgcaacagaaatgatgcagggaaatatacccttactgtggaaaacaacagtggtagtaagtcaatcacattcaccgtgaaagtgctagacactccaggcccacctggcccaattaccttcaaagatgtgacccggggatctgctacattgatgtgggatgcccctcttcttgacggtggtgcccgaatccatcattatgtggtagagaaacgagaggcaagtcgccgtagttggcaggttatcagtgaaaaatgcactcgtcagatcttcaaggtcaatgacctggccgaaggtgttccgtactatttccgtgtttctgcagtaaatgagtatggtgttggtgagccctatgaaatgccagaaccaattgtagccacagaacagcctgctccacctaggagacttgatgttgttgatactagcaaatcctccgcagtcttagcttggcttaaacctgaccacgatggaggcagccggatcactggctacctgcttgaaatgagacaaaagggatctgacttctgggttgaagctggtcacaccaaacagctaactttcacagtagagcgtcttgttgagaaaactgaatatgaattccgtgtgaaggccaagaatgatgctggctatagtgaacccagagaagccttctcttctgtcatcattaaggagcctcaaatcgagcccactgctgacctcactggaattaccaatcagcttataacttgcaaagcaggaagcccatttaccattgacgtaccaatcagtggtcgtcctgcccccaaagtaacatggaaactggaagaaatgagacttaaagagacagatcgagtgagcattacaacaacaaaagacagaaccacactgactgtaaaggacagcatgagaggtgactctggaagatacttcttgaccctggaaaatacagctggtgttaaaacatttagcgtcacagttgtggtcattggaaggccaggtccagtaaccggccccattgaggtctcatctgtctcagctgaatcgtgtgtcctgtcatggggagaacctaaagatggaggaggcactgaaattactaattacatagttgaaaagcgtgaatcgggtacaacagcttggcagcttgtcaattccagtgtcaagcgcactcaaattaaagtcactcatctcacaaaatacatggaatattctttccgtgtcagttcagagaacagatttggtgtcagcaaacctctagaatcagcaccaataattgctgaacatccatttggtaagaaaaataaaaatcctatttcaaagtctctattattaaatgtttcccctgaattttataaaattgtattcatacttaatacctttgtttatatttagtcccaccaagcgctcctaccagacctgaggtctaccatgtgtctgccaatgccatgtctattcgttgggaagaaccctaccacgatggtggcagtaaaatcattggctactgggttgagaagaaagaacgtaatacaattctttgggtgaaagaaaacaaagtgccatgcttagagtgcaactacaaagtaactggtttagtagaaggactggaatatcagttcagaacttatgcactcaatgctgcaggtgttagcaaggccagcgaagcttcaagacctataatggctcaaaatccagttggtatgtatcacaatttaagggcatatttgtttattattactgattctagtagaactcagagtggtatattttaaccttatttttgcatcccttccagatgcaccaggcagaccagaggtgacagatgtcacaagatcaacagtatcactgatttggtctgccccagcgtatgatggaggcagcaaggttgtgggctacatcatagagcgtaagccagtcagtgaggtaggagatggtcgctggctgaagtgcaactacaccattgtatctgacaatttcttcaccgtgactgctctcagtgaaggagacacttatgagttccgtgtgttagccaagaatgcagcaggcgtaattagcaaagggtctgaatctacaggccctgtcacttgccgagatgaatacggtaggaaatagtcaacattctcctttttaaaattatctcaatttatgtgaaaataaactctcagatattcattcatatctgttttgcctactgacagctccacccaaagccgaactggatgcccgattacacggtgatctggttaccatcagagcaggttctgatcttgttctggatgctgcagttggtggcaaacctgaacccaaaattatctggaccaaaggagacaaggagctagatctctgtgaaaaagtctctttgcagtatactggcaaacgagcaactgctgtgatcaagttctgtgacagaagtgacagtggaaaatacactttaacagtgaaaaatgccagcgggaccaaggccgtgtctgtcatggtcaaagtgcttggtaagcatgtcaaatgttctcacatttatatagcattttccagtgtgggcagaaagaatgatcttcatcatggcttgtcattacacctgtttcagattcccctggcccatgtggaaagctcaccgtcagcagagtaacacaggagaagtgcactttagcctggagccttccgcaggaagacggaggagcagaaatcactcactacatcgtggaaagacgcgagactagcaggctcaactgggtgattgttgaaggcgaatgcccaaccctatcctatgtcgttaccaggctcatcaagaacaatgagtacatattccgagtgagggcagtaaacaaatatggccctggtgtgcctgttgaatcagagccaattgtagccagaaactcattcagtaagtattaacacttttaaataatttgacagttgaaatgtaatagaatcagggggagaagggagaagggcagtcttatcaatagtaattttgtgcaattctcatcatccttattttcataaacagctattccatcaccacccggcatacctgaagaagttgggactggcaaagagcatatcatcattcagtggacaaaacctgaatctgatggtggcaatgaaatcagcaactacctagtagacaaacgtgagaagaagagcctgcgctggacacgtgtcaacaaagactatgtggtgtatgataccaggctgaaggtgaccagcctgatggagggttgtgattaccagttccgggtgaccgcagtgaatgcagctggtaacagtgagcccagcgaagcttccaacttcatctcatgcagagaaccatcatgtgagctccaagaatcatacataaatacaatgctcctcaaaactatatgacagataattttccaacacacaatctctaagaatttttagaatttatgaatggtctagaaaagcacatgcttatttgcatgatcataaatatagcttaagtcagagaacattttaactattacatctgttaagttagcaattagaattgctaaaagttgtacagcattttccaattaatgaaaaaatattctatcaatatgaaaagaatctattttataaattttccttagagaaaaatgcattgtactgtaataactgaaaagaaaaatggcaaaactccttttaagaagaggtttagcaggaacatacagtttctagtggtttcataagttactgacaaagtaattgtgacaagagcttcaaaaataagtggcaaatccttttacagagtctgagcccaagaactataaaggaatagtcactgggactgaattggggaagctaaggaaaccaattcttgtattcattagaaatgtattggtggcaagtgatactaacccagtgaaagataagcaactaaagaaaagtccctaagaatgggtactttaagtaatgagcttagctaatagagaacacacagtaaagctggccaaagaagtagggaagaaatatctactttcctaaagcaatttaattcttaagataataatattaaattataatgtggcactctgtgctgtcctataatatcaggagcccagttaataaagattatcttggtgagtgtggacaagagcaataatgcctttgtgagtcttgaaaacaaaaaatacaaatctcaacatttccttatttgcctaatatctgcatctcactttttaaattccacagatacccctggaccaccttctgctccaagagttgtggataccaccaaacacagcattagtttggcatggaccaaacccatgtacgatggtggtactgacattgtaggatatgttctggaaatgcaagagaaggacactgatcagtggtaccgagtgcataccaatgccacaataagaaatactgaattcactgtgccagaccttaaaatgggccagaaatattccttcagagttgctgccgtgaacgtgaagggtatgagcgaatacagcgaatcaattgctgaaattgagcccgtggaaagaataggtatttatcacagaagcttttaggtgaattattttcttctcacacctgtccatgaattaattaaattttgtcattaactttccagaaataccagatcttgagcttgcagatgatctaaagaagactgtgaccatcagggctggggcctccttgcgcttgatggtgtctgtatctggaagaccacctcctgtcataacgtggagcaagcagggcattgaccttgcaagccgggcaattattgacaccactgagagctactcattgctaatagtggacaaagttaatcggtacgatgctggaaaatacacaattgaagctgaaaaccaatctggcaagaaatcagcaacagtccttgttaaagtctatggtaagcattttacttaaaattggctatacaatgagtagatcctctaaaacaatatagcttgacctatgattgatcacctctctagaaaggaactatgttgattatatttccccaagaaaaaaaaagctatcaggcaaataggaaatatgaatctttcattctgtttttcagatactcctggtccctgtccttcagtgaaagttaaggaagtatcaagagattctgtgactataacttgggaaattcccacgattgatggtggagctccagtcaacaattacatcgttgagaagcgtgaagctgctatgagagcattcaaaacagtaactaccaaatgcagcaagacactttacagaatttctggacttgtagaaggaaccatgtactatttcagagtgctgccagaaaatatttatggcattggagaaccttgtgaaacatctgatgcagtactggtctcagaagtgcctttggtgcctgcaaagctagaagtggtcgatgtcaccaaatccactgttacccttgcctgggaaaaaccactctacgatggtggtagccgactcactggatatgttctcgaggcctgcaaagctggcacagagagatggatgaaggttgtcaccttaaaacccacagtcctagagcacactgttacttccttaaatgaaggtgaacaatacttatttagaataagggcacaaaatgagaaaggtgtgtcagaaccaagagagactgtcacagccgtgactgtacaagacctcagaggtatgtaccaaatagccaaaaaaaaaaaaaaagtaaagtaaaatgaaaacattcagaattcgtaacaatttaccataaaaataatgcttaagaataaatgcctgatttctttcccatagtgttgccaacaatcgatctttctacaatgcctcagaagaccatccatgtcccagctggcagaccagtagagctggtgatacctattgctggccgtccacctcctgctgcttcctggttctttgctggttctaaactgagagaatcagagcgtgtcacagttgaaactcacactaaagtagctaaattaaccatccgtgaaaccactatcagagatactggagaatacacacttgaattgaagaatgttaccggaactacttcagaaaccattaaagttatcattcttggtaaggatgtgtgacaaagatacaagcaagttgatgttcagtcacccaattttgatttgaagtaaaaattaatttcctgtatttcttctctttcatagacaagcctggtccaccaacaggacctattaagattgatgaaattgatgctacatcaattaccatttcctgggaaccacctgaattggacggtggtgctccactgagtggttatgtggtagaacaacgtgacgctcatcgtccaggatggctgcccgtttctgaatcagtgactaggtccacgtttaagtttaccagactcaccgaaggaaatgagtatgtgttccgtgtggctgcaacaaaccgcttcgggattggctcttacttgcagtctgaggtcatagagtgtcgcagcagcatccgtaagtccacaggcccttccaccactctccccacctctgattctgaatgttaacaaaaaagaatttgtttttaatatgccctaatgtaaataaaaataggtcacaaaattaaccctgtggtctttctaaggtttctaaacctccttttctcaggtttctaaacctccttttctcagaggttttcaacacacttaggcttgattttttttttaatatcttcactcttatgaaagagaagaggagggagttaggaagaaaggaatggaaggaagaaaagagagaagggaaggaggaagagaggaaaggaaggaggactggcaatgttatagtgagaaaaaaatacagagtgcatgcttaataaatgtagaattgaagaaaatgaggaacagcaaggaaagtacaaaattaaacctcagcatcatgcaatatacccatgtaacaaactgcacatgtacccctgaagctaaaagtcaaaaatttttaataaaaataattaaataattaaatgatttaaattaaaatttacaaatagtacaaaagtgaaactattggaaaaatagtcatgtgccttatgtaccttttaaaataccaaccaaaacctaaggaaaacacaaatatatgagtcattgttttaacgtattcatattgccatatcgtgttaacctctgtcttgctgcaggtattcctggacccccagaaacattacagatatttgatgtttcccgtgatggcatgacacttacttggtacccaccagaggatgacggtggctcccaagtgactggatatattgtggagcgcaaagaagtgagagcagatcgatgggtccgtgtaaataaagtacctgtgacaatgacacggtaccgctccactggccttactgaaggcttagaatatgaacaccgtgtcacagccattaatgcaagagggtctgggaaaccaagtcgtccttccaaacccatcgttgccatggatccaattggtaaggacattttgtatcagtcaaattgattgagttacaatttatatgtgggaaaattcacctttttgaaatatatagttctatgacttttgaaaaatgtactgttttgtaatcaccaccacaatcaaaatgtggaatatttttattaccccgtaaagttcccttgtgtccgtttgtaatcagtcccttccccaccccagctgctagcgatttctggcaaataatttttaatattcttctctggagtcaatttccacttctttaagatgagattcataatatatgctttctatcacacttaaaattttaaaacaagttaatatttctggaagcactttaaaaactgctgataaatgtaagataataatagtgattacaaatgaagcacatttaagagaaaggaaagtgaaaaaatgttaagtatttttagctgataaaatgaataaaattttcttttttctttcttttgtttttttgtgtttttttgagacagagtctcactctgtcacccaggctggagtgcagtggcatgatcttggctcactgcaacctctgtctcccaggttcaagcaattcttctgcctcagcctcctgagtagctgggattacaggtgcctgccaccacgcatggctaatttttatgtttttagtagagacgcggtttcaccatgttggccaggctggtcttgaactaactcctgacctcaagtatctgcccaccttggcctcccaacttgctgtgattacaggcatgagccaccacacccagccatgaataaaattttcacaagacaaaaaaacaggctaatgttaacagtccgtttcaacaactcattgaatttgttaggtggcacagctaattttcaactttgcagcaactttaaccagtatattcttattcttattctcagctcctccaggaaagccacaaaacccaagagttactgatacaacaaggacatcagtctccctggcctggagtgttccagaagatgaaggaggatctaaagtcacaggctacttgattgaaatgcaaaaagtagatcaacatgaatggaccaagtgtaacaccactccaaccaagattcgagagtatactctaacacacctacctcagggtgcagaatacaggttccgcgtcctagcttgtaatgctggtggacctggtgagcctgctgaggtaccaggaacagtcaaagtcactgaaatgcttggtgagacatatgatcatttgctttctgcaataattgccatagacttatttcttagtccccctaccccaaatgctaaattgaaaccctacctttttttccagaatatcctgattatgaacttgatgaaagataccaagaaggtatctttgtaaggcaaggtggcgtcatcagacttaccataccaatcaaaggaaaaccattcccaatatgtaaatggaccaaggaaggccaggatattagtaagcgtgccatgattgcaacatctgaaacacacactgagcttgtgatcaaagaagcagacaggggtgattctggcacttatgacctggttctggaaaataaatgtggcaagaaggctgtctacatcaaggtcagggtgataggaagtcccaacagtccagaagggccactggaatatgatgacatccaagtccgctctgtgagggtcagctggagacctcctgctgatgatggtggtgctgacatcttaggctacatcctcgagagacgagaagtgcctaaagccgcctggtataccattgattccagagtccgaggtacatctctggtggtaaaaggcctcaaagagaatgtagaataccatttccgtgtttcagcagaaaaccagtttggcataagcaaacccttgaaatctgaggaaccagtcacaccaaaaacaccattgagtaagtgccctttcaaccacaaaattataaacattatttcagcacttttctgtttttaaatgaaagtcattggcttataatacttgggactgtattctaatacatgtgtgctttccacttatatttacagatcctccagaacctccaagcaatcctccagaagtactcgatgtaaccaagagttctgttagcttgtcctggtcccggcccaaagatgatggtggttctagagtcacaggctactacatcgaacgcaaagagacatccactgacaagtgggtcagacacaacaagactcagatcaccaccacaatgtacactgtcacagggcttgttcccgatgctgagtatcagttccgcatcatcgcacagaatgatgttggcctgagtgagaccagccctgcttctgaaccagttgtttgcaaagatccatttggtaaggaattcagaagaaggggttaaattaaagaagcaagccatgtttggtccttttatttcaccagtaaagctgactcccttttcattattttaaaatatttcagataaaccaagccaaccaggagaacttgagattctttcaatatccaaagatagtgtcactctacagtgggagaaacctgaatgtgatggtggtaaagaaattcttggatactgggttgaatatagacagtctggagacagtgcctggaagaagagcaataaggaacgtattaaggacaagcaattcacaataggaggtttgctggaagctactgagtatgaattcagggtttttgctgagaatgagactgggctgagcagacctcgcagaactgctatgtctataaagactaaactcacatgtaagtagcctttggttctctacttatgatttacaaactaaacaagttaaggctaattccccctctatactaagtagaaccctggaaagctttattggagagcaagtgttaagaaagaaaagcaagtacacacacaggaaatatgacaagttctacaggaaaccattccaagcacacaacctcagcagatgttagatggagtgaactgagcactttccttgagtaattccctctaatgcaatggtttctttttaaaaatatttcccaacaagatttgaaaggtcaacaattgtatgccacttcaatgaacctaagtaagggcaagaatactacagaattatagagagaatttacagtcccttaaaagcctatacattattaatccccttccaatcataaagagaaaaaaacactctacataaaatgtgacgatgtgctcattgaatccctatttaccatatgatcctaggaaaatcacttcaaagagtttttaagaattaggctaatatgtaaatcatggtatgtgtcagtaaataaggtaaattcattcctgatatacaaggacaaaggattacagattgagtattaacagtcacttaatattatctttcatattgttcagctggagaggccccaggaatacgcaaagaaatgaaggatgttaccacaaaattgggtgaagctgctcaactctcatgccagattgttggaaggcctcttcctgacattaaatggtacagatttggtaaagagctcatacaaagccggaaatacaaaatgtcttcagatggacgcacacacactcttacagtaatgacagaggaacaggaagatgaaggtgtttatacctgcatagccaccaatgaggttggagaagtagaaaccagtagtaagcttctcctgcaagcaacaccgcagttccatcctggttacccactgaaagagaaatattatggagctgtgggttccacacttcggcttcatgttatgtacattggtcgtccagtacctgccatgacttggttccatggtcagaaacttttgcaaaactcagaaaacattactattgaaaacactgagcactatactcatcttgtcatgaagaatgtccaacgtaagactcatgctgggaaatacaaagtccagctcagcaatgtttttggaacagttgatgccatccttgatgtggaaatacaaggtattttatttttattttcagtgctttttatttttaaagaaaaaaaaatctcaaaaacacactatgaaaaccaccacaattgtattttcccccaacagataaaccagacaaacctacaggaccaattgtgatcgaagctctattgaagaactccgcagtgatcagctggaaaccacccgcagatgacggaggctcctggatcaccaactatgtggtggaaaaatgtgaggccaaggagggggctgaatggcaattggtgtcttcagccatctcagtgacaacctgtagaattgtgaacctcacagaaaatgctggctattacttccgggtttcagctcagaacactttcggcatcagtgaccctctagaagtgtcctcagttgtgatcattaagagtccatttggtgagtacaacttgatttctgtatcttcctatggtaaagttccatctttgcataaaattcttttaaacagaaagaaattttgaaaggaaatagcaaagattcagataaagtacaagtgccttttctttcactttaattgaatgtttgcatatctaaaaggagaaatatatatcctaaccccattgtaaaaatagaactttggtttttgatatgtcttagtataaagtaaccaatttcatctttctggaatagctattttttaacaaaattttggactcatataacattcttttttaaaaaaataagctttaataaagctgcctgtttcatctcatgactcaaatcttttttttgtttaatagaaaagccaggtgctcctggcaaaccaactattactgctgtcacaaaagattcttgtgttgtggcctggaagccacctgccagtgatggaggtgcaaagattagaaattactaccttgagaagcgtgagaagaagcagaataaatggatttctgtgacaacagaagaaattcgagaaactgtcttttcagtgaaaaaccttattgaaggtcttgaatacgagtttcgtgtgaaatgtgaaaatctaggtggggaaagtgaatggagtgaaatatcagaacccatcactcccaaatctgatgtcccaattcaggcaccacactttaaagaggaactgagaaatctaaatgtcagatatcagagcaatgctaccttggtctgcaaagtgactggtcatccaaaacctatcgtcaaatggtacagacaaggcaaagaaatcattgcagatggattaaaatataggattcaagaatttaagggtggctaccaccagctcatcattgcaagtgtcacagatgatgatgccacagtttaccaagtcagagctaccaaccaagggggatctgtgtctggcactgcctccttggaagtggaaggtaaaaataaataaattatcatcaagttgaggctaaatgagttattaacttgggggtggaggctattgcacttaaacacatactgttagatgttgctaaattatattctttttttttttttttctgatacagttccagctaagatacacttacctaaaactcttgaaggcatgggagcagttcatgctctccgaggtgaagtggtcagcatcaagattcctttcagtggcaaaccagatcctgtgatcacctggcagaaaggacaagatctcattgacaataatggccactaccaagttattgtcacaagatccttcacatcacttgttttccccaatggggtagagagaaaagatgctggtttctatgtggtctgtgctaaaaacagatttggaattgatcagaagacagttgaactggatgtggctgatgttcctgacccacccagaggagtcaaagttagtgatgtctcacgagattctgtcaacttaacatggactgagccagcctctgatggtggcagcaaaatcaccaactacattgttgaaaaatgtgcaactactgcagaaagatggctccgtgtaggacaggcccgagaaacacgttataccgtgatcaacttatttggaaaaacaagttaccagttccgggtaatagctgaaaataaatttggtctgagcaagccttcagagccttcagaaccaaccataaccaaagaagataagaccagagctatgaactatgatgaagaggtagatgaaaccagggaagtctccatgactaaagcatctcactcttcaaccaaggaactctatgagaaatatatgattgctgaagatcttgggcgtggtgagtttggaattgtccatcgttgtgttgaaacatcctcaaagaagacatacatggccaaatttgttaaagtcaaagggactgatcaggttttggtaaagaaggaaatttccattctgaatattgctaggcatagaaacatcttacacctccatgaatcatttgaaagcatggaagaattagttatgatctttgagtttatatcaggacttgacatatttgagcgcattaacacaagtgcttttgaacttaatgaaagagaaattgtaagttatgttcaccaggtctgtgaagcacttcagtttttacacagtcataatattggacactttgacattagaccagaaaatatcatttaccaaaccagaagaagctctaccattaaaatcatagaatttggtcaagcccgtcagctgaaaccaggggacaacttcaggcttctattcactgccccagaatactatgcacctgaagtccaccagcatgatgttgtcagcacagccacagacatgtggtcacttggaacactggtatatgtgctattgagtggtatcaacccattcctggctgaaactaaccaacagatcattgagaatatcatgaatgctgaatatactttcgatgaggaagcattcaaagagattagcattgaagccatggattttgttgaccggttgttagtgaaagagaggaaatctcgcatgacagcatcggaggctctccagcacccatggttgaagcagaagatagaaagagtcagtactaaagttatcagaacattaaaacaccggcgttattaccacaccctgatcaagaaagacctcaacatggttgtgtcagcagcccggatctcctgtggtggtgcaattcgatctcagaagggagtgagtgttgctaaagttaaagtggcatccattgaaattggcccagtttctgggcagataatgcatgcagttggtgaagaaggaggacatgtcaaatatgtatgcaaaattgaaaattatgatcagtctacccaagtgacttggtactttggcgtccgacagctggagaacagtgagaaatacgaaatcacctacgaagatggagtggccatcctctatgtcaaagacattaccaaattagatgatggtacctacagatgcaaagtagtcaatgactatggtgaagacagttcttatgcagagctatttgttaaaggtgtgagagaagtctatgactattactgccgtagaaccatgaagaaaattaagcgcagaacagacacaatgagactcctggaaaggccaccagaatttaccctgcctctctataataagacagcttatgtaggtgaaaatgtccggtttggagtaactataactgtccacccagagcctcatgtaacatggtataaatcaggtcagaaaatcaaaccaggtgacaatgacaagaagtacacatttgagtcagacaagggtctttaccaattaacaatcaacagtgtcactacagatgatgacgctgaatatactgttgtggcaaggaacaaatatggtgaagacagctgtaaagcaaagctgacagtaaccctacacccacctccaacagatagtaccttaagacccatgttcaaaaggttactggcaaatgcagaatgccaagaaggccaaagtgtctgctttgagatcagagtgtctggcatccccccaccaacattaaaatgggagaaagatggtcagccactgtccctcgggcctaacattgaaattatccatgaaggcttggattattatgctctgcacatcagggacactttgcctgaagacacgggttattatagagtcacagccactaacacagctgggtccaccagctgccaggctcacctacaagtggaacgcctgaggtacaagaaacaggaattcaagagtaaggaggagcatgagcgacacgtacaaaaacaaattgacaaaaccctcagaatggctgaaattctttctggaactgaaagtgtaccactgacacaggtagctaaagaggctctgagagaagctgctgtcctttataaaccggctgtaagcaccaagactgtaaaaggggaattcagacttgagatagaagaaaagaaggaggagagaaaactccggatgccttatgatgtaccagagccacgcaagtataagcagactaccatagaagaagaccaacgcatcaagcagttcgtgcccatgtctgacatgaagtggtataaaaagatacgtgatcagtatgaaatgcctgggaaacttgacagagttgtacagaaacgacccaagcgcatccgcctttcaagatgggaacagttctatgtgatgcctcttccacgcattacagatcaatacagacctaaatggcgtattcctaaactgtcccaagatgatcttgagatagtgagaccagcccgccggcgtacaccttctcctgattatgacttttactaccgacctagaagacgttctcttggggacatctctgatgaagaattactcctccccattgatgactacttagcaatgaaaagaacagaggaagagaggctgcgtcttgaagaagagcttgagttaggtttttcagcttcacccccaagtcgaagccctccacactttgagctttctagcctacgttactcttcaccacaagctcatgtcaaggtggaggaaacaagaaaagacttcaggtattcaacctatcacatcccaacgaaggctgaagctagtacaagttatgcagaactgagggaacggcatgcccaggctgcgtacagacagccaaagcaacggcaaagaatcatggctgagagggaggatgaagagttgcttcgcccagttacgaccacccagcatctctcagaatacaaaagcgaacttgacttcatgtcaaaggaggaaaagtctagaaagaaatcaaggcgacaaagagaagtgacagaaataacagaaattgaggaagaatacgaaatctcaaaacatgctcaaagagaatcatcctcatctgcgtctagactactgagacgacggcgctccctgtctccaacttatattgagttaatgaggccagtgtctgagctgatccggtcacgtccacaaccggctgaggaatacgaagatgacacagaaagaaggtcacctactccagagagaactcgcccacgatcccccagccctgtgtctagtgagagatcactctcgagatttgagaggtctgcaagatttgatatcttttccaggtatgagtccatgaaagctgctttaaaaactcagaagacatcagaaaggaagtatgaagttttgagtcagcagcctttcacactggaccatgcccctcgaatcacactgagaatgcgctcgcacagggtaccatgtggccaaaatacacgttttattttaaatgttcagtctaagccaactgccgaggttaaatggtaccacaatggtgtggaactccaagaaagcagtaagattcattacaccaacacgagtggagtcctcaccctggaaattctggactgtcatactgatgacagtggaacctaccgtgctgtgtgcaccaactacaagggcgaagcttctgactatgcaacgttggacgtgacaggaggggattataccacctatgcttcccaacgcagagatgaagaggtccccagatctgttttccctgagctgacaagaacagaggcgtatgctgtttcatcatttaagaaaacatctgagatggaagcttcgtcttctgtcagggaagtgaaatcacagatgacggagacaagggaaagtctctcctcatatgaacactctgcatctgcagaaatgaaaagtgctgcattagaagaaaagtcactggaagaaaaatccacaaccagaaagatcaagacgactttggcagcaagaattctaacaaagccacggtccatgaccgtctacgagggcgagtctgcaaggttttcttgtgacaccgatggtgagccggtaccaactgtgacctggctgcgtaaaggacaagtgctaagtacttctgcccgccaccaagtgaccaccacaaagtacaaatcaacctttgagatctcttcagtccaggcttccgatgagggcaattacagcgtggtggtagaaaacagtgaagggaaacaagaagcagagttcactctgactattcaaaaggccagggtaactgaaaaggctgtgacatcaccaccaagagtcaaatccccagagcctcgggtgaaatccccagaagcagttaagtctccaaaacgagtgaaatctccagaaccttctcacccgaaagccgtatcacccacagagacaaaaccaacaccaacagagaaagttcagcacctcccagtctctgccccaccaaagattactcagttcctgaaagcagaagcttctaaagagattgcaaaactgacctgtgtggttgaaagcagtgtattaagggcaaaagaggtcacctggtataaagatggcaagaaactgaaggaaaatgggcatttccagtttcattattcagcagatggtacctatgagctcaaaatcaataacctcactgaatctgatcaaggagaatatgtttgtgagatttctggtgaaggtggaacgtctaaaaccaacttacaatttatggggcaagcctttaagagtatccatgagaaggtatcaaaaatatcagaaactaagaaatcagatcagaaaaccactgagtcaacagtaaccagaaaaactgaaccaaaagctcctgaaccaatttcctcaaaaccagtaattgttactgggttgcaggatacaactgtttcttcagacagtgttgctaaatttgcagttaaggctactggagaaccccggccaactgccatctggacaaaagatggaaaggtaaccagttcttaaatgtctctttcttttatcttctaaaatattttatcttctaaattcagcttcccaaaaaaagcttaaaatgaaatcactttttaaaacacaaatcatttgcattctacaggccattacacaaggaggtaaatataaactctctgaagacaagggagggttcttcttagaaattcataagactgatacttctgacagtggactttatacttgtacagtaaaaaattcagctggatctgtgtcctctagctgcaaattaacaataaaaggtaggttggcttttgtttttacccacatttcttcagaagataatattagggaaatattttcaaacatccccccttatatacacatacaagaaagtattaaaataaaattattttcctaattccagaatacaatttgtacaccaaagcagaaacacacatttgaagttagcatatgcttttctatgagcataaaaagcagttattaagtacctagttatatgtggtattatataagattccatagtgtcagcccctgctcccaggaatatttaagaataaagtcagtgaatatacaaaatggcactacttgcctaaaccttcacagttgctaattttccaaagcagtgcaaagttaattaaagaactatttctattttaccaattaaaattagtttgctttcatttcaatcttctgaaagataatttaatgttttggttactcaaaatctcccaaatccacttatctcctaaatccgttgactattcttttcaagacttttttccttaagtcatatgaatcatctttggctcagtttagtttaaggaatcattacagtgatctcaaaagtcacacatgataattttccaaaagtggaactgagaaagtattaggtattacctacattgcatgaagaagttgactttttttctttttatgtttttcacacgcagaatctagaagagtaaaaggtgggggtctctttctaattaagtttgccttacagaggtttcttttttagctataaaagatactgaggcacagaaagtctctacacaaaagacttctgaaattacacctcagaagaaagctgttgtccaagaggaaatttcccaaaaagccctaaggtctgaagaaattaagatgtcagaggcaaaatctcaagaaaagttagccctcaaagaggaagcttcaaaggttctgatttctgaagaagtcaagaaatcagcagcaacctccctggaaaaatccattgtccatgaggaaatcactaaaacatcacaggcatcagaagaagtcagaactcatgctgagattaaagcattttctactcagatgagcataaacgaaggtcaaagactggttttaaaagccaacattgctggtgccactgatgtgaaatgggtactgaatggcgtagagcttaccaactctgaggagtaccgatatggtgtctcaggcagcgatcagaccctaaccatcaagcaagccagtcacagagatgaaggaatcctcacctgcataagcaaaaccaaggaaggaatcgtcaagtgtcagtatgatttgacactgagcaaagaactctcagatgctccagccttcatctcacagcctagatctcaaaatattaatgaaggacaaaatgttctctttacttgtgaaatcagtggcgagccatcccctgaaatcgaatggtttaaaaacaacctgccagtaagtttaattatgaatatattattgaagaaaaactaaaataccatgtcttccacatctgaagaacttcaacatttcttttctttttcctttgtcttagatttctatttcttcaaatgtcagcataagccgctccagaaatgtatactcccttgaaatccgaaatgcatcagtcagcgacagtggaaagtacacaattaaggccaaaaatttccgtggccagtgttcagctacagcttccttaatggtccttcgtaagtatctcctcacccttcttccttacatgtttaaggcctttagatcgtttttttgcctctctttcaagcacagaaaactctaagaagccttattaaattccatgtgaaagagggacagccaactgatgtgaattcattcttgtagtcaaactttctttatagctacacagaaacttggatagattacatttcaaagtaaagctaccaactgccgtgtaacatttatttgcaggatgcacaatatgtcaattactttctatatgactaatcatttttctcctagtgattcctagcacctgcatgtaatgtaatgatagaaatataaggattcatgttttggagacattgagctagctcttgacaaatgtatgtatatatgtatttgcttatgcttcaacagcaaattgtttgggttatgctgctgtgtgtgtgttgaagtttccatttctgtaagtcagcgtcatatgtcatcaattaaccagatgtcattgatgttcactgtgtatctgctatgctccacagctctagttgaagaaccttccagagaggtagtattgagaacaagtggtgacacaagcttgcaaggaagcttctcgtctcagtcagtccaaatgtctgcctccaagcaggaggcctccttcagcagtttcagcagcagcagtgctagcagcatgactgagatgaaatttgcaagcatgtctgcccaaagcatgtcctccatgcaagagtcctttgtagaaatgagttccagcagctttatgggaatatctaatatgacacaactggaaagctcaactagtaaaatgcttaaagcaggcataagaggtgagcaataaaattactggtagaggtagacaagccaagtaacatggtgtagtctttagtacacacaattcagtagaaagcaaatctttatttttttcagtgattctaagaccttttttttgtcattgttccataaaggaattccgcctaaaattgaagctcttccatctgatatcagcattgatgaaggcaaagttctaacagtagcctgtgctttcacgggtgagcctaccccagaagtaacatggtcctgtggtggaagaaaaatccacagtcaagaacaggggaggttccacattgaaaacacagatgacctgacaaccctgatcatcatggacgtacagaaacaagatggtggactttataccctgagtttagggaatgaatttggatctgactctgccactgtgaatatacatattcgatccatttaagagggcctgtgcccttatactctacactcattcttaacttttcgcaaacgtttcacacggactaatctttctgaactgtaaatatttaaagaaaaaaaagtagttttgtatcaacctaaatgagtcaaagttcaaaaatattcatttcaatcttttcataattgttgacctaagaatataatacatttgctagtgacatgtacatactgtatatagccggattaacggttataaagttttgtaccatttattttatgacattttacaatgtaagttttgaaactaactgttggtaggagaaagtttcttatggaacgaataccctgctcaacatttaatcaatctttgtgcctcaacatactgttgatgtctaagtatgcctcagtgggttgagaaaatccccattgaagatgtcctgtccacctaaaagagaatgatgctgtgcatatcacttgatatgtgcaccaatacctactgaatcagaaatgtaaggcattggtgatgtttgcatttaccctcctgtaagcaacactttaacgtcttacattttctctgatgatgtcacacaaaattatcatgacaaatattaccagagcaaagtgtaacggccaacactttgttcgctcattttacgctgtctctgacataaggagtgcctgaatagcttggaaaagtaacatctcctgccatcccttcatttaaccaaagctatcaagtattcctatgccagagcagtgccaactcttggaggtcccagagtgcagccaatgcctttgtgtggtagttctaaattttaattgcacctgaaaaacctgggcacctaagcaatgagccacagcaaaaagtaaagaacaacaacaaaataaagctgttgttaaattttaaacaatattactaattgcccaaaatgtcaatttgatgtagttcttttcatgcaagtataaattcaattgttagttataattgttggacctccttgagatagtaacaacaaaataaagcaagctatctgcacctcaaaatgtgtggctggttgttttctgtgaaattctggggtggggaagtatgcatcttc

SEQ ID NO: 23954 - DNA, 2272 bp, Homo Sapiens
tggaccagccgtgcaaatctctagaagatgacggtgttctttaaaacgcttcgaaatcactggaagaaaactacagctgggctctgcctgctgacctggggaggccattggctctatggaaaacactgtgataacctcctaaggagagcagcctgtcaagaagctcaggtgtttggcaatcaactcattcctcccaatgcacaagtgaagaaggccactgtttttctcaatcctgcagcttgcaaaggaaaagccaggactctatttgaaaaaaatgctgccccgattttacatttatctggcatggatgtgactattgttaagacagattatgagggacaagccaagaaactcctggaactgatggaaaacacggatgtgatcattgttgcaggaggagatgggacactgcaggaggttgttactggtgttcttcgacgaacagatgaggctaccttcagtaagattcccattggatttatcccactgggagagaccagtagtttgagtcataccctctttgccgaaagtggaaacaaagtccaacatattactgatgccacacttgccattgtgaaaggagagacagttccacttgatgtcttgcagatcaagggtgaaaaggaacagcctgtatttgcaatgaccggccttcgatggggatctttcagagatgctggcgtcaaagttagcaagtactggtatcttgggcctctaaaaatcaaagcagcccactttttcagcactcttaaggagtggcctcagactcatcaagcctctatctcatacacgggacctacagagagacctcccaatgaaccagaggagacccctgtacaaaggccttctttgtacaggagaatattacgaaggcttgcgtcctactgggcacaaccacaggatgccctttcccaagaggtgagcccggaggtctggaaagatgtgcagctgtccaccattgaactgtccatcacaacacggaataatcagcttgacccgacaagcaaagaagattttctgaatatctgcattgaacctgacaccatcagcaaaggagactttataactataggaagtcgaaaggtgagaaaccccaagctgcacgtggagggcacggagtgtctccaagccagccagtgcactttgcttatcccggagggagcagggggctcttttagcattgacagtgaggagtatgaagcgatgcctgtggaggtgaaactgctccccaggaagctgcagttcttctgtgatcctaggaagagagaacagatgctcacaagccccacccagtgagcagcagaagacaagcactctgagaccacactttaggccaccggtgggaccaaaagggaacaggtgcctcagccatcccaacagtgtcgtcagagggtccccagggcattttcatggcaagtacccctctgcccccactccagcagtgcttcccaaagtgtgctctgtcacctgctttgcaatcggcttccattagcgcatgttttattttggtgtgacggttggccctcctaaacacggactttcctcaggctggttcaagacggaaaaggactttcttctgttttcttccaaagtgcaaccacagtggagagcccacggtgggcttagcctgcctaggcccttccatttctcttctttgaccgtgctaggaattccaggaaagtgcattcctgccctggtgaccttttcctatgtctaggctcctccacaggtgctgctattttgtgagctccggctcctgtttagcttttatttcagttctaacctcagtccagaaacatatgtgaggttgtttccctcttcagccacggctacaataccggaaaatgctagtttttatttatttttttaagtagtgcttcctaaatggtttgcatgagagccacctggggtacatgttgaaaacttatttggggtctaccccaaacctaataacccaaatttggggatggggcccaggaatatgcatttttaaaaagtcatctgcccctcccaggtgattctgtaagttgtccctcaactgtacttggagaaatcgtgttttaaagcagtagtccacaaagtattctgctcatgtgcccccaaaagtattttgaaaaatcatgtataccctcacccacctaagttgatatctaaaattttatctaagttggtatctaaaatttttcatgggaagttaaatagttgacaaagtatgtatttgctggtgtcgtgtaaatattggtattttaaaataaaaactgttacatcacta

SEQ ID NO: 23955 - DNA, 3781 bp, Homo Sapiens
cagatggccggggctcaacccggagtgcacgccttgcaactcaagcccgtgtgcgtgtccgacagcctcaagaagggcaccaaattcgtcaagtgggatgatgactcaactattgttactccaattattttgaggactgaccctcagggatttttcttttactggacagatcaaaacaaggagacagagctactggatctcagccttgtcaaagatgccagatgtgggagacacgccaaagctcccaaggaccccaaattacgtgaacttttggatgtggggaacatcgggcgcctggagcagcgcatgatcacagtggtgtatgggcctgacctcgtgaacatctcccatttgaatctcgtggctttccaagaagaagtggccaaggaatggacaaatgaggttttcagtttggcaacaaacctgctggcccaaaacatgtccagggatgcatttctggaaaaagcctatactaaacttaagctgcaagtcactccagaagggcgtattcctctcaaaaacatatatcgcttgttttcagcagatcggaagcgagttgaaactgctttagaggcttgtagtcttccatcttcaaggaatgattcaatacctcaagaagatttcactccagaagtgtacagagttttcctcaacaacctttgccctcgacctgaaattgataacatcttttcagaatttggtgcaaaaagcaaaccatatcttaccgttgatcagatgatggattttatcaaccttaagcagcgagatcctcggcttaatgaaatactttatccacctctaaaacaagagcaagtccaagtattgattgagaagtatgaacccaacaacagcctcgccagaaaaggacaaatatcagtggatgggttcatgcgctatctgagtggagaagaaaacggagtcgtttcacctgagaaactggatttgaatgaagacatgtctcagcccctttctcactatttcattaattcctcgcacaacacctacctcacagctggccaactggctggaaactcctctgttgagatgtatcgccaagtgctcctgtctggttgtcgctgtgtggagctggactgctggaagggacggactgcagaagaggaacctgtcatcacccatggcttcaccatgacaactgaaatatctttcaaggaagtgatagaagcaattgcggagtgtgcatttaagacttcaccttttccaattctcctttcgtttgagaaccatgtggattccccaaagcagcaagccaagatggcggagtactgccgactgatctttggggatgcccttctcatggagcccctggaaaaatatccactggaatctggagttcctcttccaagccctatggatttaatgtataaaattttggtgaaaaataagaagaaatcacacaagtcatcagaaggaagcggcaaaaagaagctctcagaacaagcctccaacacctacagtgactcctccagcatgttcgagccctcatccccaggagccggagaagctgatacggaaagtgacgacgacgatgatgatgatgactgtaaaaaatcttcaatggatgaggggactgctggaagtgaggctatggccacagaagaaatgtctaatctggtgaactatattcagccagtcaagtttgagtcatttgaaatttcaaaaaaaagaaataaaagttttgaaatgtcttccttcgtggaaaccaaaggacttgaacaactcaccaagtctccagtggaatttgtagaatataacaaaatgcagcttagcaggatatatccaaaaggaacacgtgtggattcatccaactatatgcctcagctcttctggaatgcaggttgtcagatggtggcacttaatttccagacaatggacctggctatgcaaataaatatggggatgtatgaatacaacgggaagagtggctacagattgaagccagagttcatgaggaggcctgacaagcattttgatccatttactgaaggcatcgtagatgggatagtggcaaacactttgtctgttaagattatttcaggtcagtttctttctgataagaaagttgggacttacgtggaagtagatatgtttggtttgcctgtggatacaaggaggaaggcatttaagaccaaaacatcccaaggaaatgctgtgaatcctgtctgggaagaagaacctattgtgttcaaaaaggtggttcttcctactctggcctgtttgagaatagcagtttatgaagaaggaggtaaattcattggccaccgtatcttgccagtgcaagccattcggccaggctatcactatatctgtctaaggaatgaaaggaaccagcctctgacgctgcctgctgtctttgtctacatagaagtgaaagactatgtgccagacacatatgcagatgtcatcgaagctttatcaaacccaatccgatatgtgaacctgatggaacagagagctaagcaattggctgctttgacactggaagatgaagaagaagtaaagaaagaggctgatcctggagaaacaccatcagaggctccaagtgaagcgagaacgactccagcagaaaatggggtgaatcacactacaaccctgacacccaagccaccctcccaggctctccacagccagccagctccaggttctgtaaaggcacctgccaaaacagaagatcttattcagagtgtcttaacagaagtggaagcacagaccatcgaagaactaaagcaacagaaatcgtttgtgaaacttcaaaagaaacactacaaagaaatgaaagacctggttaagagacaccacaagaaaaccactgaccttatcaaagaacacactaccaagtataatgaaattcagaatgactacttgagaaggagagccgctttggaaaagtccgccaaaaaggacagtaagaaaaaatcggaacccagcagctctgatcatggttcatcaacgattgagcaagacctcgctgctctggatgctgaaatgacccaaaagttaatagacttgaaggacaaacaacagcagcagctgcttaatcttcggcaagaacagtattatagtgaaaaataccagaagcgagaacatattaaactgcttattcaaaagttgacggatgtcgcagaagagtgtcagaacaatcagttaaagaagctcaaagaaatctgtgagaaagaaaagaaagaattaaagaagaaaatggataaaaagaggcaggagaagataacagaagctaaatccaaagacaaaagtcagatggaagaggagaagacagagatgatccggtcatatatccaggaagtggtgcagtatatcaagaggctagaagaagcgcaaagtaaacggcaagaaaaactcgtagagaaacacaaggaaatacgtcagcagatcctggatgaaaagcccaagggggaaggttcctcctcattcttgtcggaaacttgccatgaggatccctctgtttcccccaactttactccccccaaccctcaagctctcaagtggtgaccaccgtccttccggccagctgcaggtggagctggagcaagaataccaagacaaattcaaaagactgcccctcgagattttggaattcgtgcaggaagccatgaaaggaaagatcagtgaagacagcaatcacggttctgcccctctctccctgtcctcagaccctggaaaagtgaaccacaagactccctccagtgaggagctgggaggagacatcccaggaaaagaatttgatactcctctgtgaatgctcctg

SEQ ID NO: 23956 - DNA, 68689 bp, Homo Sapiens
tgaggttgatttacccaagttaaagtgaaaacaaattaacattttttgagtgtttactaaatgttgaggcacttattaagccctttatatttatagtatataacatgatattcactgcatccttatgaaataggtaaccattattattatttccattttacagatgaggaaacagacatgtagaggtcaaataatttgcctcaaattgcataatcaagaagcatagagcccagcttaaaacccagatagtctggctcaaagtgcagatgataaactaccatgctaatgagtagcactgggagttctccaatgaagcacacgatgttacttgtatttgctactaacgtcttcttttttttgagatggagtctcactctgtcacccaggctggagtgcagtggtgtgatctcagctcactgcaacttccacctctcaggttcaagcaattctcctgcatcagcctcatgagcagctgggattgcaggtgcaggccatcacccctggctaattttttttgtatttttagtagagaccgggtttcaccatgttggccaggctggtctcaaactcctgaccttgtgatccacccacctcaatctcccaaagtgctgggattacaggtgtgagccaccgcacctggccaactactaacatcttctaacccctggttcaattctgctacttgaggcttttttttttttttttttttttgagatggagtttcactgtgttgcccagcctggagtacagtggcatgatctcagctcactgcggcctctgcctcctgggttcaagcgattctcctgtgtcagcctcctgagtagctgggattacaagcatgagccatggtgcctggcctaggctactaattttttttttttcaaagctgtctgcagttttgccttgacttagaattcatcaactggagcccacagtgatatcattgcacaggattgaagttgtatcaactaaattcagataaagatctcctacgttaattaattaaacaaattgttgagtacatttgctaattttgttagaggtgctcattgcttaataactacaggacacattctattgaatatactgggaaaaagctgtatctttctctgaaggtatacaaaacaatattaagaagcataaaaaatatctgtccataaaaacatgattatggccaggtgcagtggctcacgcctgtaatcctagcactttgggaggctgcagcaggcggatcacgaggtcaggagtttgagaccagcctggccaacatggtgaaaccccatctctactaaaaatacaaaaaatagccaggcgtggtggcaggtgcctataatcccagctactcaggaggctgaggcaggagaattgcttgaacccgagaggcagaggttgcagcaagccgagatcgtgccactgcactccagcctgggcaacagagcaagactccatctcgggaaaaaaaaagtgattatatgagttatttttatttttattttttgatacagggtcacccaagctggagtgcagtggcacaatctcagttcactgcagcctcagcctcccaggctcaggtgatcctcccacctcagcctcctgagtagatgggtctacaggtgcatgtcaccacgcctgtcttatttttgtattttttgtagacacggggtttctccatgttgcccaggctggccttgaactcctgggctcaagccatccacctgccttggcttcccaaagtgctgggattacaagcatgagccaccctgcctggtctatatgagttctttttaaatcattatctcttcaaggagataacaatcatcaataggttttgtacagatccaaactctctgcttgtggattctcttaacatgatactttgtaattgaaaagagaatatgaaaatgccaagctttgtaacttcaaagaacaacaataacaaaaagcctttgcctagagatctagataggaaagtgatcccgccaaaattttgggcctgtgtacagggctgtgacccaagtgggacacctggggtcaatgagcagagttcggtgcagagggtcatttgtgtatcttttgaatattactaactgcatctcaagatcatgttagaacgagtattggctatttggctttttgtgtcatcttgccccttcccgtctccattatggagaattgaggttttaatatacggtagtgacattctagtagatgaaggaagggggctgtccccagtgggcaatctgaacttctgcttcgtatatttactcttgctgttttcgtttctcctcatttgtaattcaggaggctctctgagaagagacagcaaagcttcttagatggatcgaaagaccacgagctgggataccaagttctatgaaaaggtcagctattgaatttactctgctaccttcaggcaaatcatttgatcatcggatgctctggtttcttcctgtgcctgctaaatgtaaatagcatgggtttgagtgtttggtggttattatagagtattttaaatgtatgagtgatttatttttctaggccagctgctcagatataaaacaaaatctgctcctttgagctgttaggcttcgtggcagtcaactgaccccaaaatccttctgactacagcagccatctacttgcttgttcatctgataacattttgcagtctctcagctacagctatgtggtctcactctatagctggggcatacctttttgtctcctttgtcttcagaaaggaaatatgccattttatgcactcctgctgctttcacccccactttaaaaagatgaaggcttccttttgtgacagagttgctttgtctgttacactgatcctaagagacaggaaggagaggtgtcatagtaaataaacagttattggacttgctaccatagttcctttttgatgacttgggccaggaccactagaggtttgaactagatttagtaaggcttgggcttttcggggttttggcaggaagcagtcagggagtatattggaaagagagaacacaaaataccgaaccccacccaccctgtgcctttttgtttgttgttacagcctgttacattaggcaacaagatatccttgttagccaaaggtgccaagctgagattcttaaaagctaatgaaagagctgttgggccaggtgcggtggctcacgcctgtaatcccagcactttgggaggccgaggcaggcggatcacgaggtcaagagatggagaccatcctggccaacatggtgaaatcccgtctctacgaaaaacacaaaaattagctgggcatggtggcgcgcacccgtagtcccagctgctcgggaggctgaggcagaagaattgcttgaacccgggaggcggagtttgaagtgagccgagatcgagccactgcactccagcctggagacagagcgagactccactccgtttcaaaaaaaaaaaaaaaaaaaagctgttgggtaaggaatgattttgttccccatctgtggctcaccaccccactgtttcataaatgaaaatctctgatgtgcaacgctgaattaaccaaaaggcttacttcttttgttttgaacttagacacatttacattatttctggtgcagttaaattaaaagcactttccaaacaaacctaggaaagtattaaagttagggactcccacgaaatgttactccttaattgtggcttggataatagcaggaagaactgcagacaggaacacagtgtaactaacccttcagttctgaaatgttgctaggtctcctcgtgttataaatgatcaaataaatatccgggttaaacactgctcccagagctgagttcactcttaagagtgttgggtccaacttccctgtgctaattcaaggaaacaaggcagccaaggagtctaacttgaggtcttcattcttgggcagggccatcaatacatctaaaacattacttgtgggtaccccagctgcggtagcttccccaaaaggcagaattttcactcattctttatagaaacacgtagccagcaacttctcaggcttggggaacggggcaggcgggtcgtggtggtggggagagtagaggagggagtctggcaggtcggttctaaatgtaaactggaaactacgcatccgagcgggcaaccatcactggcaccattcgtctccgggaagaacctgtgtgtgtcaggatgcacgaaaggaatgactcccctctttgcgcccccggggttaactgcacgaccctgtcaaagtcccgccgtggagtgggatgagggtcgagaggtaaccctgtcaaagtcccgccgtggagtgggatgaggcgaggaaagactggaggtccttccagcaccaccttggaggggcagggaggctgcagttaccgccttcggaagtgatctcctcagccctcaaaaaaattaaaaccacctccgccatttactagaggccaaggcagggccgggacacgagaacgcgctccgggcggatgcgcgctccctttgtcccgcctcccagcggcccgctcattggacggagggagggcgccgggggagaaagcgacgcggccgctcgtaagtgctccggatggaaactggtgcagggggcagcggcgttccgcggccggaagggaagggggaggtgccgaggctgcgcgccggctgctcctccccacccccagcctttgccctgaagggggctggatgggcaaggcggccgcgatggctcgagctcgggcggtggcggcggtggccggaggcggcggtgcctcctcctcctcgccccggcgccggcggtgatccgagcgagcggccgcggcccccgatgagactgctggcgggctggctgtgcctgagcctggcgtccgtgtggctggcgcggaggatgtggacgctgcggagcccgctcacccgctccctgtacgtgaacatgactagcggcccgggtgggccggcggcggccgcgggcggcaggaaggagaaccaccaggtacgggctggggccggggccggggcgggggcgtggcggcccggccttcccgcgctgggcccggctattgtgcgggacggctccgcgagggggcggcccggccctcgcccctccgcctcggccccttggaaagttttccccgcgccttccccgccgggcgtcgactccgcgagccccgggcacccggccgcggccccgcgagcgccttttgttccgcagcgcaggcggggcatggcctcccgggcccgatcgtgagcggcccggagccccgcattgttcctgggtcccgggcggtgactgcggacgcccggcagcgggactggggaactttggggccagagcgtggctgggggcgcccgcctggcaccgaggcctgagactgaagagacccggccagatccattaccccgagaaacaaaacgaaaagccagcccctcttgttgtctcgttgaatcccagaacgtacaaagggtcgtgaagaaatgtaactgtacatcgcaagccattgaactctccaggctgattggggtgacatttctccctaagcacttaaaaaatgggtttgacaggttgtcgctcccatcctacggaaccttcccctcctacctagcagagatctcctttaaacttggatttagtcagcctgctagaaagattgtgtgtgatgaggaggaagattatgcaagttttacaggaagggtttttaaaacagaacgggacgggagggagttttagttatgcatcgtgagcgttacgctgtgaccgggtaggtaggcttttcattagctcagtcttgcgccacttaaacgtgtacaggttaactgtagaattaagtgagatatttcgtatatgaccttaacatagtttgcagttaatgttaaattcattgaaaagaggcttttgaactctgccagagtgttggcttgtcatagctagcatttataatacattttgcttttccatagagtattaattattccctatatcatcttgtgtctcatcattttcatatatttctcattttcctacattacttttttattatgccaggtgttcagagaatttacacccaggttgatttcatgtgttttaatgagggtagagaattgtctaagaaggagatagagcaatttagaaaagtagcatttagtctttagtaatatgtatattgggcttttttctattgttaaaggaatcctaaatttctgtaaatttttttgaaagcctccagccattgcagtttgttaggtgcaatatcagtatcattgatcacttgtatgatatggttaggaatgtatgtaaacttaaattgcaaaaccacatttattcctatggattatttgcttacactagttcattcttatagagacaactcaaaggtactgtaccgttgactgtacagttaccagaatgtcacatatggaacaatggggtagacaatgaattagaaatgtcatttttaacatttttaagcagttgatagaaataaggtcctggataggagaaaaagcgatttatctccattgatgggggattatggttgagtctcttagctattggtatttataacacttatcatgattacccctactgcagccacttggtaggtttttagtgctcataaaagaattgcacttattttaaaattgaaacactatttcaacactgtgatgtgtatggaggcggaattgcagctgtagacatagcctcagaatatctcccagcagaggatactttctgactgtaccttttaaaagctgaatctgttaagttctaatgaaaactaatactggtttcagatacgtttatttcagataccgtatttatattctgtgtgtgtgtgtgtgtgtgtgtgtgtgtgtgtaccccttcactaacaattcagcagataatttctttagggtgaagacttaatatggtgttttctgaatatttgggggatgggtcaactcttttccttagaataatgaatccagacattattttgacatgaatacattcatattatgaaaataatcgtgcatgaataaagattaaaaggaacagaagaaaggtgtgtagaaaccaccatgagataaagtaggaaactgtcctttctgcactgtggctggagttgataatttgttttccacttaatattccaggatcctgggtttgccttataacttcgttgcttgtgaagtaactgtaactgtttttcctccttcagattaatagttttatacaaggtcttctaagtgttcagttgggtgtgtgagttccatagccagccacatctgggccttttggagttgcataaaagtagggttgtggatttgattgaaccatacttagcaaaagtgttccttctggttattttattaaggaattatgatggaggattctgtggttaaaagagagatcttgggcaatgtttattcgttaaaaatggctattttgttagtatagtttggagaggcaaggctcctttgggctaaagctgctctaaaactgtagtagcagtgccattttagtaacttggtttggtgtgctagcttcaaaactgggattatgtttcactttgggcaagcaagaagcagggtttcacttagagcagggaagtggctgggaggccagactggtctcacagacttattttacagcctatgaaataagaatagttttatatttttaaatggttaccaagaaaatatcaaaataacattttgtaatacatgaagtttcatttatggaattcaaatttatttcagtgtctacaaataaagtgttttttttttgagatggagtctcgcttcgtcacccaggctggagcgcagtggcccaattttggttcactgcaacctctgcctcccaggttcaagcaattctgatgtctcagcctcccgagtagctgggattacaggtgaacaccaccacgcccagataatttttgtagttttcagtagagatggggtttcactatgttggttaggctggtctcaaactcctgacctcaagtgatccttcttcctgggcctcccaaagtgctgggattacaggcgtgaggtactacacccagcccacaaataaagttttattgaaagagaactaccacattcatttacctgtggtctatgagctccctggctacaatagcagcatatttgctactgtatggcctgcaagcctaaaacatttactacgtggcttcttacagaataaagactttttccaagagaaattcccagcttccttaacaaacagcttttttttttttttggagacagggtctcactgtgtcacccaggctggagtgtagtggcacaatctcagctcactgcatcctcgacctcctgggttcaagcggttctcatgcctcagcctctccatagctgggattacaggcacgtgccagcacacctggttaatttttgtagttttagtagagacagggcttcaccatgttggccaggctggtcttgaactcctggcctcaagtgatcttcccacatcggcttcccaaagtgctggaattacaggagtgagccactgcaaccagcctccaacagcatattcttaatcacaggttgcagggtgggtagattgactcactgggaagaaatagaggcaggcagtgagaaactagtagatattgtcactttgcaatgttggcagactcagaatttaaaaagacaacaacaaaaaacttaggatctattctttttgatgcattgcacctagtgcttaaagttaatgcaactattatggagctactgaaactttgaaaggacccttaggccccaggttcttggtaataatagcggttcagtagcttctcaattgatggagtgaaaaaattgttatagaactcgctgaaccaaaccacaacgatttctccgggtgacatactgcaaggttttttaaaagcacagataacattcaatatctggaattattaagttgtaacttaaaattgcaagtatgtgtatatttttgtgacttattttttcactttcttatataagctcagaactgcgctatgccacaagtgatgaagaattcaagaaagaattaaaatccttttttttcccccaaatgaaaaaatacttggacagcatagccagagccaaacactgtgctaaaggacagagtgtttcctgtccctttacccctcacttaccctgtggaggcagactggagtcaggcatgagttaacaatgcttcaaggatagtcagccagctaagccggacagacactgatggattggcgtccttctctgaactgccttcgagagtctggaggcctttgcagctgaataccaaagagacttcagaaaggatttctttgcttcctcataatctgtgttgaaaccccaagtgtttgcttcagtttcacagaacactagaatctctttcttgtgctggatataccaggagtctttatgtttctctttgaaggtgccctagaagaccctaatagcttccagtaaaaagctctgttgtgtagaccctctgaagctttgttaaaattttaggattatcctgtcctatggggagtgagtatttagtatttgcaatgaggattgccagtaattggttattaaatcaaagctgaagccatttaatctgttttaattgattcccctcatggatatgagggtgcctgtcactgtacacattgaaatctcacataaagaggttattgggttgagtttatattgtttgtgggaaaatggtgaatggtctgaatatttacgcctatgctgtgcttaaatgcaaggtgtgcatggtgaaatgtctggactgagttgactgcattgtaaaatcttagaatgtgaattttgaatccttagctgtcaagctctgttgatggagttggtctggccaacttagaaaagattctgtgttcatagatcctgagcagtggagcttttctgattgtttttggtagccctgaatgccttgggtctttgattacccatttcttttgagaatggctggatgcctagacctacagtttggtttttaggcattcccttgaactgtacttctcctctgaccagcccttgccttggagagaaaggggaaggaaatatgaagagctactggccttctattgtgtgccaggcacttcaaatatattatccccagtagtccacatagaactcttggaggttggtggtatcatccgcactttacatacagaaaagtgagggtgagagagagaagagacttgctcaccagcacagagttaatggatgatagagttgggctttgcacccagctttggtttcaaggcaacacattttctgctgctttatgatgcccctcctggtaaaccttgtgttgtctgaggggtggtaaaaataggcttgccttctttttttttttttttttttttttttttttttttttttttgagaaacaagttcttactctgtcacccaagttggaatgcagtggcctgatcatatctcactgcagcctcaaactcctggcctcagtacatcctcctgcctcggcctcctgagtagcttctaaatcttttgtagaggcagggtcttgccatgttgttcaggctggtctcaaactcctggcctcaagcagtcctcctgcctcagtctcccaaagtgctgggattacaggcgtgagccactgctcctggcctaggcttgccttctgaataggaaactgccctcattctagtgaggcctctgtgtagacactgaagttaggtagctgtgtgcacaatacttgttgaagattttgtagtttgtgaattagatgagaataagacagctgcttgaagttctggcctttatctggtttgtgcatgctttttttaaggcttaaagttgaaaaaagattcttacatgtattgtcattttttcctgacatcagccattctctaattttccatcaccaagtgggtgtttaattgttcaatcctgttctgacattaactacctggagttagggtcacgctttacagagttaagagctcagtcccacaagactgccctcacttcagaggccagctggaagtcctgggttcccaggctgccagtgcttttgtccaccttgaacaaatttgggagttcccacaactctaccttcaccctaccccaccccaccccctaatttcctataatagaatgactcatagaacttaggaaaacacaggtgcggtggctcacgcctgtaatcccggcactatgggaggctgaggtgggtggatcacgaggtcaggagatcaagaccatcccggctaacagggtgaaacctggtctctactaaaaatacaaaaaaattagctgggcgtggtggcacgtgcctgtaatcccagctactggggaggctgaggcaggagaatcgcttgaaccgtggaggcggaggttgcagtgagctgagattgcgccactgcactccagcctgagcgacagagcgagactccgtctcaaaataataataataataataataaaccacttaggtttactggtttattacaaaggatacaattggggaacggccaagtggaagaggtgcatagggtgaggtgtgggaggtggtgtagagtttctctttcctctgatgagccacccaaccatcatatcaatgtattcagcaaactaaaagctcccaggaccccatagtttaggggtgtcattacataggcatgattagactcagtcttcaactcctttctcatccttggagattggaaggtggggctgaaagtttgaaccttatacccacatcctggtccccatcctgaagctgtctgggtctcccacccctatcaggagtcatcctgttagcatacaaaagatactcttattaccctgagattcccgaagggttttaggaactctctatcaggaacctgggacaaagatcaaatatgtattttttattataccacatcatctaaaatcagtcagtttttaaaattactttctgactctgctagtgtgcttaaatcctttgtattttgggaatgttgtattttggatatgttgtatatcacatgtttgattagttgataaactccaaaaataatttcagaaaaacttttaaccatatttggtctgattagcaaatctaattttataggaaaattgcattcctactttgaacgagtgattcatcaaccaaggttatatataaatattaggaggagttcatgggcttaatgagaaattttttttttttttttgacagtcttgctttgtcgcccaggctggagtgcagtggcacactctgggctcactacaacctctgcctctctggttcaagtgattcttttgccttagcctcccaagtagctggaattataggttcctgccaccacgcctggctaatttttgtatttttagtagagacggggtttcaccatgttggccaggctggtcttgaactcttgacttcaagtgatctgcccacctgggcctccaaattgctgggattacaggtgtgagccatcgtagccagccaggaaatttttaagacagtatgacctaatatttaataacttcggttggcgaatactgtcagacatgcattcaaaacgcgtggcagccacctgatttggctgtttactgcctggccaattattagtatctttgcagttgtgttgccagtagggagaatattgctatttactgtaatttttagatatcacatcctgttctgtacttggcatcagcagatgactgaatggaatcattctcatttgattagaatttgtcatttaaaagattcccttgtttatttagatgaaacaacatttgagtgagctttaaaggcagatgctaataagatgctttttcagacatggtaggctccagccaaggagtccagcctcacagtagagtgggcgtgtagtcctgtcagtgtgtgaatttaacgggcatagtactttgttcttgcctgtgcacctttgtctctgtagtctttaaggagcacacatttaaagaactcaccatgcggctgggcgcagcggctcacgcctgtaatcctagcactttgcgaggccgaggcaggcagatcacctgaggtcaggagatcaagaccagcctggccaacatggtgaaaccccatctctactaaaaatacaaaaattagccaggcggggtggtaggtgcctgtaatcccagctgcttgggaggctcaggcgagagaatcacttgaacccggcaggcagaggttgcagagagcctagatcacaccactgcactccatcctgggcgacagagcaagactccgtctcaaaaaaaacaaagaactcacctgcttgaaagtacacaggagcatacagacaagccacccagtgctgcgagcttagcgtagctttttatctaagctggttgtttggagagaggtgaaaccaggagtcctgcccattgggttaaaggggttcctgcagattttttctctccttggtccttggtatttcaccttaagggcaaggtgactgctcctttaaggctctgaagctcctcgccaagatcatagtcacattacttgtttcccttggtttctgattttattttcactctggaatgtaagttctctgaggccagcgagtccatcttttaattcagtcagctggagtccctagaccatagttaggctgggatagtgggaaacactactggagagtcagtacagtgacattttgtgggtaaggccatgtatgggttctcaagcagtggcagttttgcctcccaggggacatttggcaatgcctgggacattttgggctgtcatttggggtagtgccactgtaacctgatggataggcactaggaatgctgctgaacatcctacaatgtgcaggtcagcccctataacaaaggatcatttagctccaaatgtcagtagtgtgaaggctgagaaaccctggcttacaggactttagttactatctagaccagattatcttttctctacacacatgtagttcagtttaattggcaggatagtcctgctttcttttctttagcagacacactgggtagagttaagtgaagagaagcttctttgaaagaaacgcttataaaacaacacgtacctggagcaggagcttgaatcagctggagctgcttagggaccctatgcttcccatttattcagaaattgcaaggtggtaaatgaaatgtaaagcacatggcttggtgcctggtgcatgataggtgctcagttggtgtcttccttcattgcttgcttccttgcttgtggtaatgcaattttgtggtgagtgggtagctgtaaccactggttgcaaaattaggtttaagcaaggccttgcagagtttgagaaattgacagaaaccccatggcagcgrtctctgtggttatccttatgtttcctctaggattttgttagaaactccaaattctgtttaggctgcctgttgatgaacrtttattgtttgtctgtatctgtgccaggcactgaagccattcattttctctgcctttatgaagctctcagtctacctgggaagataggcactgaacatgcgattgtctacaattattcaattcagagattgtaaatattaccaaagggacaaatgggatgtatgaaagggtattagaacagggggcctagcctagcctttcgtaggtatattttcctttgaaaagaaaatatacctaggaaatatttaggctgaagttgaacgaaccaggtgaagagagagtgggttaggtggtgggaaatgttggggggcagagcaaataccatgtgagacagccacgggaaaggggccttccagaaaaaagaaggaaggggtggagctgtgtgatggagtgagggtccaggggtcatgggttggtagggaatgtcatgaggtgaggctggagacacagaatgaacaaaaatcgtgcagggccttataagccatattaagcattttggatgttatcctaagattcctgttaagcagggtagtgatgtgatcagatttgcatttaaaatttgcattttaagaggttttctaggttacttatgttttcaggccacttttaatttctggaagatctaactgccacctgcatatttagggaggggtgtgtgtgtgtgtttaaaaaacagctttattgggatataattcacataccatgaaatttatccttttaaagagtacaattcattgatttttagtataatcacagaattatgcagccatcaccagtattaattttggaacatttcatcaccccaaaaagaaacctcatgtccattagcagccactccacattgtcccagctccccagcccctggcagccacaatctactatctactttctatctctggatttgcatattcaagacatttcacgtaagtggaattacacagtatgtggtcttttgtgactgacttatttcacttagcataatgttgtcaaggttcatccatgctggagcatgaagcagtgcttcattcctttgtatggcagaacatgctattattttatatgaatctattatcacatcttgcttatccaccatttgatggacatttgacttgtttgcagtttctgacattgctgctgtgaaatcgacatttgtgtcatgcaaatggtcagaaaggacatacgtttcacctttctttttaaagagaagagctttgctctatttttgttctgtagcacattctgttcaataagcagtttctttccagaaagacctgtgtgacagtaagggttcaaccacacgtgttaatgttgatgaattgagaaaaatgctattaaaaacttgagttttcctcttggtgcttgaaagcactatttgcagctaatggtgccagttcctgcttggttctagaagtcagaatctattgttgttctagtccatttacaagtggatgccaaggaattcttagctcctctgtttcacttgaatgacttctcatccacattaataaaatgtacctgattgcctattatcaaggtgatggctttcatcttgattagccatttcagagaataaaaaataaataaaagtcagagtggcctccatattacagagttcagaacgtgcaccaggaggtcatgagtataataaaaaacggtttatgacctgcactggagcataacttcaggcacaataagtattaagaattagaaaatcattaagcaagaacattttcagaccaagggaaaaaatgtaggcagtgaatgtaaaaagcttcatagcttgtcatatagagtaggaaaaataaaaacagttttatatataaagtccaagcagttttgataactgtgatgaaatggcaaattagcacaaattagtccacaactggaaaggtttggtttacccagtttagggaacagagtttgtaaaatgattaatctctgaaatttaacgtgcctgtttgtttgtgttgatttgtaactagttccttttaacgttagcatcaggaatgttacttaagatttcactgaacattagtaagcttaggatgactgtaaagctggtctaccaattgtgcaagcacttatgggacgtctactgctgataaaaggtcgtatttgtcaaggggaagcaaattactcttggccaattgactgggaaaaatttgtgtttcatggcagataatgggttaataataattgatatactttgtagtttcatcactgtacttaaggggcttattcttatttctcaggctatgttagaggaatctcactgctattattattgtaggattctcactacgtgctttgtattatgttgaggacttgcctgcattatcttgtttaatcctcatcgtaccctgccaggatatatagaccccagtgacatctctagtctacaaatgaatggaggctgagagatttaagtgatttgtctgagctcacataggaagggcagagccgggacttgattgtggggctgacgctaaagctgatgtacagtctgcttccccacctctctggtatgctgactcatttattatgaaagattaaatttcatctacaggtgaagctttttgaattttgttctagaatgtggattctgggtagagccaattcctggaaatctggttcttagcatgttactatttggtcttctcgttgattgcagtatgaccttaagtaacttcttaatctttcttgagcacatgttgcctctgtaagaatgtcatatgacctatttgtaaagcatacctcaagatttctaaagatctcttttacatagtccacaagaggaaaggcaacttaatctggtcactggagtgttaaattctgttgcttactttgctatttgggtttgtttggtgattttgagttaaggcattggattatgtgactgttttcttgtctaaaaacaaggatgctgctagctgtttgccttctgatgttgaatctcagtgaaagagaggccagcagagctttctaaatctcgggtacagtgactgaagcactgggctgggagtccgagtgcctgagctgtggtctggttctgctgcctactaagctgaatgacccaaaagcctctccacccttccctcacccactctacctaccttgagggctgtaagagaattaaatgagaagtcatgtctgaagaagtactttatattttataggttatatgagtatacgaaatgattattctcagagtatcatgagatggtaatatttggaaatcttagatgtgatttagtcttctggttttttgtttttggatttcttaggtgacacttcggttgtgtgttttaatttttgttctttttttttttttttttttagtggtatgtgtgcaacagagagaaattatgcgaatcactccaggctgtctttgttcagagttaccttgatcaaggaacacagatcttcttaaacaacagcattgagaaatcgggctggctatttatccaattatatcattcttttgtgtcatctgtttttagcctgtttatgtctagaacatctatcaatgggtaagtgaatcttggacatttatttttttctttatccttaggtttacaaaaggaaaaacacaaaaagaaaagttatcttgttcagcatgttgactacctgagctacaatacttctactagtcagaaccttggcagttggtccagcgttctatctttctgtggttctgccctttaaattcaccataacgtgacagcctcattagtatgtttattcatagcgggagttacttacggtagtgcttcttggctttgatgtacataggaatcacctgggggtcttgttaaaatgcagattatgagttagtacatcaggggctaggtctgagagtctgcttttttttttttttttttttttttttttttttttttaaagacagtcctgctctgtttcccagactggagtgcagtggcaatctgggctcactgcagcctccgcctcccgggtttaagtaattctcatgcctcagcctcccaagtagctgggattacaggtgtgcaccaccacacctgtctaatttttgtatttttagtagagacgaggtttctatgttggccaggctggtctctaactgacctcaagtgatccatccacctttgcctcccaaagtgctgggattatgggtgggagccactgcacctggagagtctgcatttttaacaagctcttagacgatgccagtgatgctgaatgctgctggttctggaccacaaagtagcaagactcctggaaccaagccctgaagctgagggctttacgcccttaggctgaaaagtaakatctttgccttaaacatacttcgcagtggcaaattttttttgggagatataattagtcagcccaacagtggatgatggcttattttgagtgaagagtcctgcatctgttcttaaataatgtctaggttcaccagaattttatgaacttattgtggaattctctgtccccagagtggttccctcatataaatccatagaaaaagctttaggagttttttttgttttttttttttttcaatcctttcttggccatgttttcaagcattcctaaggacctagaatctaaaatgccaaagagaaaagcaacaggctcaatggttaagaagcctcattggaccactcaaaccactggttgggcccacttttcttttcccttgaggtttggagcagtttctactgactgactggatccccagtgtatcatctggtcctaagtcttcaggcaccgcaagccatttctcaagatttctcagttgattttcttcattgtttatgtgaaattgccatacgtttgctttggcaaacagttgttatttttatatgggtggttgagttgatacaacttggtctgacattttgttccttaaattggttatattgaatttctgttctataccatttattcttcctttggaattcagatgagtcactgtagcagagattcttatcctttctggggtcctgtagctctttgaaagtgataaaggtaggaatcctctcttcaaaaagtgcttacattcaacattttgtgtatgattttgggggcttcaaacttttatttcccctttcctctacccataagaccctggttaaaattccgtgctctagaatttcacagtttgatcaaagaggcaatgcagttaataaaccccttttggcttcccttacttaaaactcttctgctttttccttctgatacccaccctgctttcagtccttcttgccttgtgtcccattctcagctaaaaactaaattttagggcccatcagtactttccggtcatggcagtgggagataattactacaggtggccatctctcacagaaatcattactgtagtactgtcttgtattaccttaggatacttatcaaacttcctttattttggaaaggagaaggccaagtaaggaaagacttagtagatgttccagagtttattttataaggaagaggtgcatctctccgtagactcttaagtctagagagaacttagattgtgatcagagaacctaggatggttattaaacactaaagttaaacccaaattagagggtcatatctcttcatggtttgtgtttatgggaaactttgtattgggctcagtattttaggtgatactgtttttcattgtgcgagactgccccccacactgcaggaagtctaacttttctggccttgcccactaaatggcagtagtacccccaggtccttgtgattactggaaactctcctgtctactcccattgccccctagagggcaaaatcaatcctggttgataaacactgggcttgatggattttgatttattttttgacagtgttaatctttttgtagagcccctgttgctaatgttctttcgaaataggacaatgcttcccctctttctctagtgccttctttctttcttttttggagacagggtctcgctctgttgcctaggctggagtgcagtgtcacaatcatggctcactgcagccttgacctcctcaggctcaggcagtcctcctgcctcagtctcccaggtagctgggactagaggctcatgccaccgtgcctggctaatttttgtattttttatagagacggggtttcaccatgttgcccagctggtctcaaacacctggtttcaagagatcctcccacctcggcctcccaaaatgctgggattacagaygtgagccaccatgcccagcctctagtgcctataaatgtagaccagtcagatgaacttgtgagctctgagctcaggtgacctcttgttctagaattttataattatcatgtcaagattcctcacatcccaaggagatggcttgggaagcacgctctgggaaaatttaagcaaaataactattttgtgacttacttttggtcctgtggcaagtcagcatcagtatttgaaattcgcctcccctcagccatgctgccagtagcctctttctgctgtgactggtttctgtgttaaattttgtacagctacttcagcaagttcagatttgcttattttcttactgtaatatatgaacaattgaggattaaaacaacttgtcttttatgagacgtgattttctttggtaagcagttgtagtcggtagcatcacgtttagtggtctctgaggtctttctccaaatttttagcatttctatgggggcagaagatttactgtaaacttggttaaactctcctatggccttaatgggaaaaggaagggggactttgttacatgaactccattatttgtattttttcctaaaactggtcttaccttgggcaccgtgttgcatgcatctttccagtcactgtatagcagcaaacattctgtaccttatgattgtttccagagagcagcagtacagaacaggtttccctgccacttcctggaccagtggtccccaaactgttttctagggtctgaggaggaagtgcctcaggaactgcttcaggctgcagagaaaggcctagaagtgggctggccacagctcctgggctcccaacctcattcgaacagcagcagctctcttaggatcttatgttatctgtgagttccacttcatttaaagaaagggttctgctgcttaaaggagggttgagaatccctgtcctagataaactagaatttcagagctagaaaacaagtcctaaatagggattgcgctttatttcccagagtgatgcttccatgagacttggctggacctatagttgcttttctgagggttctcttcaatctccagttaaactcccctcagtctcttttttcaaaggcatcactatggttttgagtgttttctaggacctttagaaataataggacccagacagttgtaaccatataaactgacataagtacgaatctactttaatgcatattaaccgacatcacaaggaccactcttttccctcttttctctagtgtctcttaaaaatctgttatactaaagctcttttttcctgatccatggtttagttccatatttgaaatcacttttttttcctatttggtttctctgctactgtggtctggctgtgttagcttgtcatctttttcaactgataaacatgttttctgttactccttccacttttccttcctattttgacttaagttcttcacattcatctcttacttatttcttcttccttcccctgtcatcctttccactttccaccttttatttccctcctcccatgcttttttggggcattatttgcaactccaaagacaaatggtatctggaggcattttcttattttattaactttgtcttctaatcatagaaatgacataaaagataatatctttgctgggcacggtggctcatgcctgtaatcccagcactttggaggcagaggcgggtggatcacgagggcaggagatcgagaccatcctggctaacatggtgaaaccccttctctactaaaaatccaaaaaattagtcaggtgtggtggcgggcgcctgtagtcccagctactcaggaggctgaggcaggagaatggcatgaacctgggaggcggagcttgcagtgagcagagatcgtgccactgcactccagtctgggcgacggcagagcgagactctgtctcaaaaaaaaaaagaaaaaaaaaaattaggccaggcgcagtggcccatgcctgtaatcccagcactttgggaggccgaggcgggtagatcacctgaggtcaggagttcgagaccaacctggccgacatggtgaaaccctgtctccactaaaaatacaaaaaataagccgggtgtggtggtgcatgcctgtaatcccagctactcaggaggctgggacaggagaatcgcttgaacccaggaggcgaaggttgcagtgagccgagatcatgccactgcactccagcctgagtgacagagtgagaccttgtctaaaaaaaaaaaaaatcttaaccatgtaataagtgattatggttgttggtgctgagtcactatattcactttgtgtgtgtatgtgaggggtgcttaatttgcatagacacttccatttttgtcctttttttctttcaggttgctaggaagaggctcaatgtttgtgttttcaccagatcagtttcagagactgcttaaaattaatccagactggaaaacccacagacttcttgatttaggtgctggagatggagaagtcacaaaaatcatgagccctcattttgaagaaatctatgccactgagctttctgaaactatgatatggcagcttcagaaaaagaaatacaggtataattttcttggttttagatgcatttcttcttgaaagtatattatttaaaggatatgaataaaaaatgatcttccatgattagaaatttaaaaaatcatctcatacataattaactggaaatgtagagaaataatcttctggtagcagtatttttctggagcggaggggttggcactataggtaagaaaagcactagcgagagacaacttggaaaaggcagatcagaagaagggacttcttccctaatcagaatgtggcattctcaaaaaaaatttttttaagtagtggtaaaatacacatagcatagaatttactgttgtaactatttttaagtgtacagttcagtggtattaagtacatttacattgttgcataatcatcaccactattcatctccagaaatttttgtcttccgaaacggaaactctgtacccaataaacaataactccccatttttccctcctcgtaacccctgacaaccaccattctactttgtctatgaatttgactattctgggtatttcgtataagaggaattatatacattagctccttgtgactggcttatcgcatgtagcataatgtcttcaaggtttactcatgttgtaccatgggccaaaattttcttttcttttcttttctttttttttttgagatggagtcttgctctgtcacccaggctggagtgcagtggcacgatctcggctcactacaacctctacctctcaggttcaagcaattctcctgcctcagcctcccaagtagctgggattacaggcatatgccaccatgcctggctaatttttttgtagttttagtagggatagggtttcactatttggccaggctggtctcgaactcctgacctcaagtaatccaaagtgctgggattacaggtgtgagccactgcgcctggcccaaaattttctttaaggatgaatgataattcgctgtatgcatgtaccacattttgtttacccatttatctgtcagtagatatttgggttgtttctaccatttggctgttgtgaataatgctgctatgaacatgggtgtacagataccgacttgagcccctacttttacttcttttgggtatagacccagaagtggagttgctggatcacatggctaagtctgggtttaattttttgaggaattgcaatacttttccattgctgctgcaccattttacattcccaccagcaatgtagtacaagggtttcagtttctccactccttgacaatacttgctattttctgttttgttttgcttttagtttatagtcatcagtgtkaatcttggttttaaggtcatctggagtttgaaagactaggaagaagggccttttttttttttctggagatgaagtttcacttgcccaagctggagtgcggtggcgtgatctcagctcactgaaacctccacctcctggattcaggcaattctactgcctcagcctcctgagtagctgggactacaggcacatgccactatgcccggctaattttttttttttttttttttttktgtatttttagtagagacagggtttcactatgttggccaggctggtctcaaactgctgacctcgtgatctgcctgccttggcctcccaaagtgttgggattacaggcgtgagccactgcacccggctggaagaagggtattcttatttcagtatgatttattgattgggagatttctatatattggctcagtgcagaatcagggaggtagagctggagtcagcctttctctgtgatatttttggaagtctggttagccttagaaagaaaggagaagaaattatgtaatcactcactttcctatccacatgtttctacttttacagattaatcctagagatagagcatcagtgtagcttttggagcaggactggtttgagcatttgcaaaacatggagatttttagcctggagaagggaagatttctgtgaacagatacgctgtgggatttttatatggaaggaaaggaataggtatagtctctggtgtaatcaggcacagctacgccttagaagttgagttacagcttagggagatcgaccttcctagcttgaactgtttaagtccttatcactgtcagtgtttaaattgctgttagggttgttataggaagagacataaggaaggtgtgagtttgaactgagtgatttgaaagccccttagctttagcaagctgtctcagataaggttctggtgggtctgcatggtgataattgacatgttttccttcagttagagattaattcggcatttcaaaacttagaatgctttgacctttgttataacagtggcttaagtcaggctgaattcctaatctgattccacctcccccccttaaaaaaatccatgctttgaagtgggtcgaagaggaaggtgttaaacccatcttcagatgattgaccgccccagccttcttttgctttgatgctaagtgcctaaatggaattttcagggaaacttcagatgtttgaaattagtaatatatctggagtgtacatggtatgtaaagatatctaccacataaaaaatacttggtttaattttttccctaatatacagcacataagccaaaaatctgcagtttgacctgcatgggaaattcatactgattggcattcctttcataatattagtatgaagtgaaaacattttcacaaaagtggtaaattttgtgactattggtgcagtttgaggttttaatgaggaagtagtatctttatttcctaagattagaggtcacccaatccaagatggcaaggcagactttcagctgaattttacatttttttcttccttttgagattagagctattttctatttctcttcaatatctgggccatgaaaaacaggctttttattaatttatatatatatatttttagagacgggtctctctctgtcacctgggctagagcatgtggcgtgattatagctcactgtagccttgaacttcygggctcaagtgatcctctcacctcagcctcctcagtagctgggactacaggtgcctgctaccatatctggctaatttgagagagagagtgtgtgtgtgtgtgtgtgtgtgtgtttttgtgtgttgtgtgtgtagagacaggagtttcattatgttgaccaggccagtcttgaactcctggcctcaaacagtcctcctgccttggcttcccagagtgctgagattacaggcatgagcaaaacacacctttttaaataaaggttctgtaattttttttttttttgagacaaagtctcgctccatcaccaggctggagtgcagtggcacaatctcagctcactgcaacctctacctcccaggttcaagtgattagcctgcctcagcctcccaagtagctgggattacaggcgcatgccgccacacccagctaaattttttgtattttagcagagataaggtttcactgtgttgcccaggctggtctcgaactcctgaactcaggcaatccgcccgccttggcctcccaaagtgctgggattataggtgtgagtcactgcgcccagccaaagtttctgcatttcaaaaataggtcaataaacagaaaatggccaggtttttcctttgtattcgcaagttgtcattgtttatgccagaaaacccaattgtaaaactaaaggatgtggttttgatttttacagcaagacagttttctttatattgttagtgtttcattttttatttaggaattatcaaaatacagattgcttatttcctaagtttagagctctcccaacccgagatggcaaggcatctttttttttgggagacggaatctctccctgttgcccaggctggagtgcagtggtgccatctcggcttactgtgcagcctccgcctcagcctcccgagtagctgggactacaggcgcatgctgccacgcccagctaagtttttgtattttagtagagatggggtttcactgtgttgcccagctggtcttgaactcctgagctcaggcaatctgcccgctttggcctcccaaagtgctaggattataggtgtgagccaccatgcctggcctttttttttttttttttttttkwkwywkkwtyttkytttktygwsacaggmtskwgykywgtsrymcarkcwkgagykcastgwmacmatcawagctcwygtgtwcamsycawmctcytgysttcaagcyryccwmstrsctyagctagsmcwaswrgyktrtgcyassactmcaggtgtgtgcyaccatccttggctatttttaattttttatagagatggggtcttgttgtgttgccccagctggtctcaaactcctaggctcaagcgatcctcccaaagtgctggaattacagatgttagctactgcacctgactgctttatcattctctaaggagaaatatattttacatccttctggaagtattaactcattttcttgaaaataataatcacttgaatagataccctcattctaggtttagaaatactgttttagaaaaaggaaaattctgacaacttgttaggattcctgggctaatacgcagttttagtggggctaagcaatttgtcttcatcagtggaactgagtgagtttacaaataaaaatcacaaaacagaagtaagaatgcacttgagcttctataggtatagatttaactgtcttagtgttagtcacctttttgtgttatgagcatatatttctcttccaaaattaccaacacagaggctacctatctgaaactcattctgaggtaggtttagtgagattattctagattagaacatgctgatgatgtttggcttctgcttcattgcagatagacatcagattttttttgttgttttgtttttaaaaatcaaatatataatttgtgttttacaatttgtgtctttaaattggctgcttagctaaggcgttaatatatacaaatagtcctttctttattcatttccattttttagaatgggaattgatgacatttttgttctgaaagtagtcttcttagtaatgtttggaaactcttggaatgagctaaattgaatttccaaaattgctattacagttgacttagtacaacaaagtgattttaaagcctgaatgctctacttatttcaaacagtatttagtgcaatgaaacacctgcaccagtaaggaatctgactagtccctggaagtttgttaggctgctatttggaagaggctttagtttgacaaaaatatagattgaaaagaaaatgcagctaagtgctttgtgtttttaaaattctgctattcagaaatgctctaaatatcattatgctaatgaggttttcaaaacaaccctcattatacttttagaattttctgagctatcttactgtatctgctcaacattactaaagacttgtttaccaaagatcctttttttatgtttccttttttacctgtctctatcataacatatctcacctaccacattctgattggtataaccaagcaggagtaagtaatttgtaaaattgcctaattgtgtggctaacaaagactcttgatataaaaactccccctttctagagataacaacattgtagaggactgaaaatgttctctgtgttctgtgtacgtgtgtatgaaagtgagagattgaggatcgagagtggtttttttttaaaccatgctcttaatgttaataggatgtcctgggctttatcttttctgtatagtttttgttttgttttgttttgttttgagatggagtctggctctgtcctcaggctggagtgcagtgatgtgatctcggctcactgcagcctccgcctccctgattcaagcgattctcctacctcagcctcccgggtagctgggattacaggcacgcgccaccacacccagctaatttttgtatttttagtagagacagtgtttcaccatgttggcctggatggtctcaatctcctgacctcatgatccgcctgccttggcctcccaaagtgctaggattacaggcgtgagccaccgtgcccggtccttttctgtatagttattcagatatgaagattctcaagtatgaaatatgtctttcctgggaacggaaatgtgctcaaaggtcataagttatcaatggaaattattttataccactcccagccatttttaagaatagaagggatcctaggaatagaaaacattaattatatgatgcattttttgattaagttccaatgaatggtaaaaagctggactcttgttcattaactgatattcaaaagaatttgatgttttagtttcataactttgtcaggttacatcttcatacttattaaacatgattagttcttgtaaaggaaacttcgtatgtgttgagatttggaaataggtgaaatgctaaatttaaagaaatatgggccagtcgtggtagctcacacctgtaatcccagcactttgggaggccgaggcagtcggatcgcttgaggtgaggagttcaagatcagcttagccaatgtggtaaaaccccgtctctactaaaaacacaaaaattagccgggcatggtggcaactgcctgtaatctcagttactggggaggcggaggcaggagaatcacttgaacctgggaggcagaggttgcagtgagccgagattgctctactgtactccagcctgggcaacagagtgaggctgtgtctcaaaaaagaaaaaattwaaaaaaaaaaaaaatggttgctatttttctcttccttggccatgtcattattgcaaacataaattataacagaagattttgaacttaatttagaagacaaagttaaagcctttattgtcatctcagttatttttaaagatgtctttagagggactttatgttaatacagttatttctgatttttctagagtccttggtataaatgaatggcagaatacggggttccagtatgatgtcatcagctgcctgaacttgctggaccgctgtgatcagcccctgactttgttaaaagatatcagaagtgtcttggagccaactagaggcagggtcatccttgcccttgtcctcccctttcatccctatgtggaaaacggtaagtgtggtcagtcaggctagctcttactgaggatagctgtttattggtatttgtgattttgtgctgtgtacaattaaatattgtctagtatgtcttataatagcctgcagtttaaagtaatccagttaatccatgtaaaacaccatcttggttaatgttcaccttaaggtggactttatagaggtctagcattccccttgcagtggtaataattaatatttagctgggtctgactgcttgagattgaaagctaaaaatgcaactgtatctctggttttaaatggagcttgaaccatttatttattagctttacaactgaatcgagcaataaacagtgcctttaaatctggtcgtatatacttgctgaatgtcatggctgttttgttttccgttttgcatctcttgtgccagactctaaaaatgataaatgcttttatctgtttttttctcttttgaagaccatgtgtgttgttgcagcatgtatcatttctttctgtaacatttgattttttgattgcatggtcttgctcttcagcaatattgaatgaagaatatgttagaagaaacgggttgatttcatatcacttcatagttactgtgacttctggccattctgacttaatgccacattaagttatagttttagtttgtgtggtttgcattttaggtcatcttgaaagttatgattttaagtctcctgcattttcataagttaatgtacattaatataaaattatttattttatgaataatacaagttactatttaaaaatcttcagtgtttcatttatttttttgagacagagccttgctctgtcgcccaggctggagtgcagtggtgcgatcttggctcactgcaacctctacctcgtgggttcaggcattctccggcctcagccttctgagtcccaagtaactgggacttcaggcacatgccactatgcctggctaatttttgtattttcagtagagatggggtttcgccatgttgaccaggctggtctctaactcctgatctcaggtgatcctcctgtctctgcctcccaaaatgctgagattacaggtgcgagccaccatccctggctgaaaaatcttcagattttctatttcactgcctcgattgaccttgacttcagaaactcttaagagctcacagacattttgaagaaatctattaggattttgcaaatgtcattattatcaaatatgaaaatctatgtcttaaggaataatgcccgtttcatataaccattggattctgtgtggatttgtggtgtcacaaattaatttaatttcttgtatgtgttttttctccccagatcttagtgccttcagatttaatgcttgtcttaatatttaccaaatggtttcagatttgtgttgataatggggaaaatggggaattctttcgatatagaagggtgtggaaaagagcagagagaacagatctcccctttcccatcttagatctccatttttatgttcctgttgtcgagtggtttgtcatggtaaagaaaaaatgcttttaaatgtgagtgtatatatatcatctatatgttgcaaaatgtcctccttcgtgattcagcaacctgatcttacttcagtgctactccttcctgtgtaattaagcctcagctccagctctctgtattgcactcactagtcatcaggttggaaggtcctgggttcctgtgtcctgttgggcaaccgcatgatagaactttaatgctacttcctggcatagcaggagatgaaagagcagggggaagaaacatcaatctaaccacgaattttatttccttgtgtttctgatgctaaaaatggagaggaagtcaaactagacaagagggaagtctccatgaagtgtggaaaacaagctccttgattgtggatgtgcagagctgcctgttgagtctgaggagtctggcatgtgacacactgcagacctgagacaagaagccttgttgctatgggtgacttttagtgacctataaattttgcaggcgcgccacggcactctattattgctttctttctctgagtcactaattagatcctgatgatttccatgtgaaaccatgaggactgggagatgcaaaatggttttgctgtgtagattcatgaatgctggactgttggaggatatctgagtgtgctttgcatacttggcttaatttgtttttttttaactaaaagtagttgtaggtgaaatgattacttaggtaattgttttggtaaatggcttgaagttgaaccacagcagttttgctatttggaaaaaaaatgaaaaaaataccattctaatttcagtttatttggtttactgacccagttttggctaggggttattgaatctagtgagaattattttaagcaccccccaaagaaggaaagatatgaagtcaagagaaggataattatattgtaaaaataaaaatttaatgatgtttaatttttcaaaattgtaatttttattaaaaagtaattcagtaattaaaaaaaaatacttcaagcaacttactagagggtttacaataaaaagtttctgggctgtgcgtggtggctcatgcttgtaatcccagcactttgggaggccaaggcaggcagatcatgaggtcaggagatcgagaccatcctgagttaacacagtgaaacaccatctctgctaaaaatataaaaacaaaattagccgggtgtggtggtgggcgcctgtagttccagctactggggaggctgaggtgggagaacggcgtgaacccaggaggcggagcttgccgtgagccgagattgcaccactgcactccagcctgggtgacagagccagactccatctcaaaaaacaaacaaaacaaaaaaagtttctcatccagtccagttccacartcttgttcaggtttcttgaatattctttaaaagatagtctatgtaaatgtaagtctgtatgtacattaaaaaaattatacaggcagttcccaattataaataacttctgttgcctttttccacttaaatgtatctaggaaagtagttcttaccagcacatatgtctccacatggttgtctacatgtaagctgtagatgctggagctggcgtggactggttcatgagagctgattgttgttttggtaggaatttaagtgaactggttgttaaacatggccattattgaaattgaccatgatgggagtatttacactatagaaattggcaaacactgcaaatagccattttcttctccaagctggtagttacacatttaccagcacaccactagatgtataactttactagaggaggtctctagatagcaatttgcttagtaatgtttaaaaacaaaacaccctcccctgtcctcccccacttttttttctttctttctttttctttcttttctgaaagggacttgctctgttgcccagacgggagtgcagtggtgctgtcacagctcactgcagccttgacctcctgggctcaagctattctcccacctcagcctcctgagtagctgggactacaggtgcataccaccacacccatctaacttttgtatttttttggtagagagggcgtctggcggcgttgtccaggctggtcttgaactcttggaatcaagtgattggcctgccttcgcctcccagcgtgttgggattatagrtgtgagccactgcacctggccttgtttctaactttaatgaaaatattactactttaaatatgatgctaattttttttttttttacttgaagttgctgttgtttggcttgagatgtttcttttttttttttttggagatggagtctcactctgtcaccgaggatggaatgtggtggcacgatcttggcttactcactgcaacctccgcctcctgggttcaagtgattttcctgactcagcctgctgagtagctggggttatagatgtgtgccaccacacccggctcatttttgtatttttagtagagacagggtttcgctatgttggccaggctgatcttgaactcctgacctcaagtgatgccccctcagtctcccaaagtgctgtgattacatttccctcttaaagttgtgttatagactgcgtgtttgtttgtgttcctcccagatatatattttgaggcccccaccccccatcgtgatggtattaggaaggggtctttaggaggtgattaggattagatgagatcatgagagcagagccttcctgaatgggatgaatgcccttttaagagttccgagagaccttgcttctctctaccttctgccatgcaaggatacaacaagaggtcagcagcctgtacctagaaagagggtcctcaccagaactcataaatttctattgttctgtgtctggaattggtgggttcttggtctctctgacttcaggaatgaagctacaaacctttgcggtgagtgttacagttcataaaggcggcctgtctggaggtgttagttccttctggtgggttcctggtcttgctggcctcaggagtgaagctgcagacctttgcggtgagtgttacagctcttaaaggtggcacggacccaaagcgtgagcagcagtaagatttattgcaaagaacgaaagaacaaagcttcctcagcatggatggggacccagcaggttggtgctgctggcttgggtggcctgcttttattcccttatctggccccacccacagcctgctgattggtccattttacagagagctgattggtccattttacagagagctgattggtccgttttgacagagcgctgattggtgcgtttacacctttagttagacacagagtgctgattggtgcgtttacaatcccttagcaagacacaaaagttctccaagtcccctacctgattagctagacacagaacgctgactggtgcgtttacaaaccattagctagacacagagtgctgattggtgtgtttacaaacttttaggtagacacagagtgctgattggtacatttacaaacctttagctagacagaaaagttctccaggtccccacccgacccagaagcccagctggcttcacctctcaatggcactggctgcgggactttgcggcacctagcctgggcactccgacagcccagtgggagcttgtcccccgatcaagcccagcaggcgctgggctggtggcgccaagtgcggggcctgccgagcctgcgcccacccggaacccacgctggctcccgcctgcacctctcccttcacacctccctgtgagcagagggagccggctctggcctcggccagccccagagaggaggcccctacagtgcagccgtgggctgaagggctcctcgagcacagccagagccgacgccgtggccgagggggcgccgagagcgagcgagggctgctagcacgttgtcacctctcaatcccccgtctaaacaggatacccccaactgctgttgggaatttggctgatgaccactctagctacttcctgctggataggggcgaagaaggggccctgcagttgtagtgtcctccagaggggaactctttaggccagtggaagggccagcgggttggtccaggggtcctcggtagaagttgttagttgagctcatttggggttccatttgtaagaccatctatagcttgatggcctccattctagaggaaacaaatttgacaagaaggttaaaattacagggcccaaaggtgagtaacagcaagatggctgccacaggacctagaaaggggagaagccatgttgcccaactccagaggttggtacaagagtttgaaaggtggtgtctgatttcagaagccttttcctgtaaacgctgggcggcatctcgtactatccctgcctggttagtgtaaaaacaacactcttctcctaagaaggtgcagagtcctcccttctcagcagtgaggaggtctacgcctcaggggttttggagagtcactattgccagagagtctatttgggattgtagagtatggatagattttgttatttcttgcaaactatctgagaaatcctttgatagtgtgtaatagtaggataatgaagtagataaactggctattccggttcctgtagcagtagccattcctaaccctataaataggggtattagttgtatggctctgtgctgacggacttgagctttgaagagtattgatagggtctgatttccacaagattagaagttaggataatatatgtttacactgttaacttttagcaaactttacttttgttgaaaaccttttaagtttgggatttcaattattctttgctattaataagacctcgtttagtgtatattaacttagaattggtatagatggctccttcctgattctgtaagtactttaaggctcagctgagtgcaaacagcttgcaagtttgagcagaccaattattaggcaattttcctaactctgtttctacaagagtttccttatcatttactgaatactcattgtgtcgtttttccttaatcgcccgggaggaaccatctatcgtcctgtcctgaagggagttcctcctatgtctgattggacctttgtatggtgattaagatttagatcccctgttaggaaacctgctgggttaaggatttttgataggaaggctatgggttgtcagtggcctcagtgctttcgcgctacgcccttgtttacactgacaacaaggtggtattggagtgttacagggttacagagaagaccttcaattatcaattataggttttaactttaccctggcttttaaaggaatagggtacactgttttttctttactacttccatctctctttctctttgactttttctttgtctctctctctcactgactccctctttgtctctgtctctttgactttgtctctttctttctttctctctgactccctctgtctcttcctctcttccctttctgctggtttttccctgcctctgccagccacttatcctgctgttctcccctctccttccccttttgatggctttggcagtgtaagactgccgcctccttgggtttttgcactgcatgcaaaaactccrtaattgccttgtggtatttaatgggggttccccccagaggttaggaactccctttctttccatattgcagcattggcatgtaggattacataagcatacttgctatctgtatacacatttattctttttcccttttccagttctaaggctcaggtaagtgccactagttatgctaactgggcactggtccctgggggaagaggcttactttcaagtacggttacatcatgaactatggcataatctgccctttgtatcccattctccacaaatgaacttccatcggtatataggttaaggtcaggattagctagggggccttctaagagatcatctcgggccacataagtctggactataatttattggtagtcatgctcgattggttcctcatcctctgggagaaaagtggcagggttgagggccacgcacatacgtatttgaagcactggtccctcaaggagtagtgcctggtatctaagcaggtggttgtctgatagccataaacttcctttggcacctagtatgccacttacatcatgagtagtccagacagtgagatcctttccttgtattattttgatagcctctgacactaagatggccaccgccgcaactacccgtaaacaggccagccttttgctactacatcaatttccttacttaggtatgccactggttgtggggtcatcccacaagtctgagtaaggactccaagagctatccctgctctctctgtgatgtataaagagaagttttgttctgtgggaaggcttaaagtcagagcttatactagggcctgctttaaggttttgaaggctatttctgcctctggttccccttctactagatgagtatttgctctctgggtctcctcgattagagtatagaggggcctggctatctcgctgtatctggggatccatagtcagcaaaagcccgtgattccaaggaacccccgcaactgttttaatgtcttagggcaaggataagccagtataggctgtatttgttccttgctgagggccctcattccttgctgagggccctggtccctctggctaagattaggtctggatatttgacctgctgtaggcaaagctgggcctttgacctagacaccttgtacctttgattagctagaacgttcaagagatctagagcagcctgctggcacgaggcttctgaactggtagccaaaagtaaatcatccaaatactgaaggatcagagtgtctggacttgagaagtgtcctagatcttgggccagtgtctgaccaaacaggtgagggctatccctaaacccttggggcaagactgtccacgtaaattgggatgtgtggtctgtgggatcctcaaaggcaaagagaaactgggagtcagtgtgcagggtaatacagaagaaggcatccttgaggtccagaacagtgcaccattctgcctcctctggtatttaagagagcagggtataggggttgggtacaactggatatagaggaattactgcctcattgatgagtctaagatcttgcactagtctccactgaccgttcagtttctgtattcctagaattgaggtgtttcagggactgctgcatttccatactaagccttgagcttttaaatgtttaacagtatcctgtaatcctttatgagctttaggccttaagggatagtgcctttgataaggaaaagtggtggggtcttttagcctgatttggactgggcgggcatttttttgcccttccaaattgtccttccaatgcccagacttcagggytgattccctcttcaagtaggggacaacagatgggtaacttgttccccatattcatgtagataatagctccagctttggctaatatacccctccctaataaggatgtgggactttcaggcttaacaagaaaggcaagtgaaaagagcaaagtttccaattacaactgaggaggtgggagaaatacctggttacaggctgtcccaggattcctcggatggtaacggaccttgaggacagtcatctggacaggagattaacactgagaaggccacaccagtgtccatgaggaagtcaatcctggcactcaatagttaagcatacctggggctcagtgagtatgatgacatgagctggcgcttgccccgggcaccctcaatcctgttgttggatcatccggttgggggcttctgacccagagaacctttgtcttctggggcagtgcaccttccagtgattgccccagcatagtggacatggatgagggggcggcttatttctcattggacaatctttcttaaagtgtccttgtaaaccacattgataacaagccctaccgggtgattgacctgccccattttctgtcctctctgaaccaccaaggtttgtttgtctgaaggctatgactaaggctgtggcctttctctgatctcacttttccttttgggcctgtccctattatagaacaccgaggttgccaggttaataatgcctccagattttgttcagggcccagggcttgcttttggagctttctcctgatatctgcagccgattgggtaataaacttaccttttaggatcaattgacccttgagtgatttgggcgacgggagtatattttcttaaggcctcctgtagctgctcaaggaaggcagaaggattttcttcctttccctgagttacggtggacagcattgaataattcatgggctttttcctaattctccttagtccttctagaacacaggtcaacagatgtttacgactccagtccccatgatctgcatcaaggtcccagtggggatctgtactggggacggctggctgaccagtagggaatttatccctttcttcggctgtcatttacttgactaggataccaggtatctccaaactctcgggctgcagctaaagccgtattcttttcattaaaggccagggtttgatctaacagtagcatgacatctctccaagcgaggttgaaggtttgccctagaccctgtaggacatctgtgtacctatcatgatcatctgaaaacttccccaggtctgccttgatctgctttaaatcagagagggagaaggggacatgtactcaggttgggccaaattcccctccccctacagcttgaagggaacataaccgatagcctggggaggtttgtggtcctttggagatttctttgcttatttccttctgggcaggggagattagaggaggattatcattaataggagggggagctatagggaggctaggatatggggggtaagctgagcggtcctcctgtgggatgtaaattgcaagctctgtatagttgtgtattctcgtgtattctccttcaatgaaaagaaagcttggacataaggtatttcactccatttgccttccttcttacagaaaaggtcaagctgcaggatagtattgtaatttctacttccctcaggtggccatttttccccatcagagagagaatattggggctaggccatagtgcagaaaaaaatgagccgcttctttttcagggtttgtgggtcaaattggtcccagtggcttaggatgcatttcaagggtgagcctgttgatgcctgtttcccatctgaaagacaaaaccgcctgtgtttttggtttgttttgtttctccccctgcccaagaacctgcagcagtccccggaccctgctaattggaatagttgcgctcaccgaagcagcagcagaaacggtagttttcctcccagaccacaaggaggactgaggaaggccggatttagtggcccttactgacgcattctcgaaaacctgcacccttgcctgtcctcgtagaccacaaagactgagaaaaattggatttagtggcctttactgatgcattctcaaaaacctgttagagtcctaagcattctcctgttagtattgggaccttacctgtgtcctataaagatgttgtgcctcaaaaatgaagtggagggccataccctgagggagggaagggatctccagggttggaagagtgacaccttttgtcctcacttatatgaataggaaggatacaatttctgaggctccccatatcctagcttcaggaatagcatttgttaggcctgcttttctaaggagggatcctaaaattccagagttccccctatgacggggctttgggcaaaaattatgtctttctgattggtgagcccaggtgcctaaagaagggagtagactcctggagtttatactagaaatcatcctcataggagaaactggaaaagcaccagagacagggagtgattttgagaagtgggactagcctcagagactccaagaggtgagaggaagtttgtctgacaggcgttaggacccaggaggcaagggtcagggtagatagaatagatgggctagtctcgcttgggcgacattgagagttctgctcatggccgcagggtcaaccaacttcttgttgggaccccggagctgaatggctttcctctctgtcgaccctcggttcagcccagaagtactggaaaggcggaagctggttccaggccaaccaccgctcccaactctgaagagtcgggggttgttagccctttcccagaaagcctgacacccatgtctttagcccggtggctgcgctaatcacttttaactggctgacaggtgcccagtatttagcccccgaactctaaggaaaaataggacagaatagcaagtgaaaagggtccgatggtacttaccgcttggcgataggcgatagtctcaccacttggcgataggtgatagtcccatctgggtcgccaaaatgtgtctggaattggtgggttcttggtctcgctgacttcaggagtgaagctgcagacctttgcagtgagtattacagctcttaaaggtggcacggacccaaagagtgagcagcagcaagatttattgcgaagagtgaaaaaacaaagcttccacagtatggaaggggacccgagcgggttgctgctgctggctctgttggcctgcttttattcccttatctggccccaccaacatcctgctgattggtccattttacagagagctgattggtccattttacagagcactgattcgtccgttttgacagagcgctgatttgtgtgtttacaaacctttagctagacacagagtgctgattggtgcgtttagaatcctttagctagacacaagttctccaagtctgctacccggctagctagacacagagcgctgattggtgtatttataaaccattagctagacacagagcactgattggtgcgtttacaaacctttaagtagacacagagtgctgattggtgcatttacaaacctttagctagacagaaaagttctccaggtccccacccgactcagaagcccagccagcttcacctctcaatggcactggctgcgggactttgtggcacctagcctgggcactccagcagcccagagggagcttgtcccctgattaagcccagcaggcaccagccagtggcaccgagtgctgggcctgctgagcccgtacacacccggaacctgtgctggcccgcgtgcgctgcgcgcagcccggctcctgcccgtgcctctccctccacacttccccgcgagcagagagccagtccggcctcggccagccacagagaggggtccccacagcacagcggcgggctgaagtgctccttgagtgcggtcagagcggacaccgaggccgaggaggcgctgagagcgagcgagggctgctagcacattgtcacctctcaataagccactcagtctatggtaatttgtttttgcagctcgaagtaaaacaagttgtttcagtattaattcttttttaattgtcataggaaacccaaatctaaacagaaagttacagcttaggctgggtgcggtggcttatgcctgtaatcctagcattttgggaggccaaggtgggcagatcacctgaggtcaggagtttgagaccagcctggccaacagagtgaaaccccatctctactaaaaatacaaaaattagccaggcatggtggcagatgcctataatcccagctactcaggaggctgaggcaggagaatcacttgaaccctggaggcagaggttgcagtgagccgagatcacgccattgtactccagcctgagcgtcaagagcaaaactccatctcaagaagaaagaaaaagttgcagtttaattcttttctggatgctcagatagcaggacaattagtactgttggggtttgttgaatggtctttatggaaaggggtgaagcttcatggtgagggactgaagtatgctacatatctcaatttaaatgctgaaggaacatttttctatagaaacattgttcaattgcatttatagaaggcatttgagggcctactgtgtaccaagtggaaatataaagataaatgagaatcacgcttttgctcttaaaacacagaatagtacacaatatagatagaaacagataatggcaggaaattgtggtaagaaatatgtcaaactaagtactgaagaattagagacgaatagatctgttagcctgtgggtgagttagggaaggtttcatgttgaggtgagctgtgtttgtagtctgaagcattttaccaggctgaggggaacagcatgtgcaaaagcatgaaggtgtgagtaaggtttgtgtgggggtggagcaagttcagtatgacccgaggatagtttgcaaaagaggcctttgattgtatagtgtagcactcagtaaatagtgttggcgcctgaaatcaatgactgtacatcccaaactaatctcaaagctatttccttttggtgtgggtttggttttgttgttaattttgaaatatacttttgaacactgaaatctctgaaactgctaagatctctagaagtgtaattgggaaagaaacttgcttgtagctttaacaaaataagaaactcttcccaaataaaacttattttgaagtttgaaaatatatacttttggtgagatagatgaataaatgaatgaatactgtgtatacaccagatattcttatataagacctagaggaatggaactctttgcgaaagtatattccgtatttcagcttcaaaatcaatctttgaaacacggtccttgcttacatgggaaaggcatattgtgagtcaaatactagtttatctgagggattttgtctcctggttagacaatgaacagtgtattttcagtcctggaattcagtaccaaaatgtaatgactcccagaaatgaaaagcaaatgatcgaattcaacacttctgttcatttcgatggtattagtgcttgcccttttttgcagtctggcttagaagctcattactttacctgagctagtggtctcagagtggggaagtacacactgcagagtacacaagacagtttattttggaatatggcaggaaagtattagcattttttatttatattgctgcttatgccattgtttaatttgtttttgtgtataaggtacaaaggtacattttcatgcatataccgtatacaaaacacatgtggccccacacatatacacatgtgcactcacgtgtacacacagatacacacaaaaaaatgaggttccatgctgcctcctttcccctgcccatttttctgggcacataggatcaggaaagtttgatatcactgatttaaaccatcaatgcaaaaacactttcaaaggaatcttaaaatatttaacaattctaagttttataaagaatacaccttaggcaataccagtttaaaagaaacactttattttatttatttatttatttatttatttatttttgagacagtcttgctctgtcacctaggctggggtgcagtggcgtgatctcagctcactgcaacctccgcatcctgggttcaagtgatctcctgcctcagcctcccaaatagctgggattacaggtgtgtgccaccaaaccccgctaaatttttttgtatttttagtagagacgggtttcatcatgttgttcaggctggtctcgaactcctgatctcatgattcacctgcctcagcctcccaaagtgttgggattacaggcgtgagccaccacacccggcctaaaagagacactttaatgaaataaacatagtaggttgtaaggttgtaatttgtgtctaataatgaatgcatacttatgggcactttagatttttttataccaaagtagctttcaaaggacaatttatatcatgttttcttagtgaagtggtaatgaattccataaatatccttgtaccatgcctcctatctgacatttccctcctaaattggttaaaaatcagtattatagactgtgcgcggtggctcacgcctgtaatcccagcactttgggaggccatttcaggcagatcatctgaggtcttgagtttgagaccagcctggccaacatggtgaaaccccgtctctactaaaaatacaaaaaaaaaaaaaaaaaaaaattagccgggcgtggtggtgcgtacctgtaatcccagctacttgggaaactgaggcagaagaatggcatgaacccgggaggtggaggttgtagtgagccgagattgcaccactgcactccaccctgggcaacagaacgagactctgtctcaaaaaaaaaaaaaaaagaaaagaaaaaaaatcagtattacaaacgtgcttgtaaagtagatgtgttgcccacatcttccctggtgctgttatttggcacaacactgacatctagagtccgttgtggcttatttgttctgaagttacctctgtttaaccttcagctttggattttctgtattttggcttttatggtcttactctagccactatattattctcattttgctgatagcatgatgtaagttactttgcataccctggcaggcaaatgtgcgttaccccactgccccattacaacatcagaggaaataactttactaaggtgcttttcaaaatgaatgtctctaactcaaattttgtcacgttgtccctcccaacttattttaattgtgccatgatttccacaaaccataaaggtgattcttccactcaagactgaggcacatggtttggcttcagatcttcaggatggcagtcatcacacatctcatgttgaatgaaacagactcaggatacaagtttaaaatagaattttttttcttggcaaatttggaaggtatttttcagttgcattttgttgggttttagtattttggtaatgactattagttatagtttccttacattctgacatccttctttgtagccagttgtcttttcagtttacctttatttttttttaagacctgatgatatatgttcattaacactgccatagctcctggagttggattttcagtgacttcattgaaaattaaaacgtttctatggcctttcatagttggaaagtactcttctgttttcataagtgttgttatctttctcctgcaataataaataaatagaaagccatgtttaaggttatgtaaccaatgaagccaactgccaaggaacatgcaaaccactgggccatcttggattctgggtcctaagtgtccatatggtaatcttaaaggccagattaccgttttccccatccgtatttagagtaggatgtgggaactgaaaaatactttttttttttgtttggatgctactgtcaaaatcgtggctgggagctttacaattctcacttctaagactgctttcaggccacatacctcggccttgttgttgaaaacatgtcccagcctcagaaagaaaaatgatttgtaattactcagcatggcatcttagtaattagaccacctatctttatgtattcatatatacactgtaggatgaaacgactacttagacaatattctttccttggcaaaaatcctttgtgaaagttagatttttagcgcttgctttggcagcacatacactaaaattggaacaatatagagaagattagcatggcccctgggcaaggatgacacacaagttcgtgaagcgttccatatttttttaaaaagaaaacaattaaagtaaaagttggacttaaaaaaatcgccttatttcagtctcctgatgcatttgccctcttggctgctgtttaagaggaaaatatctttactagtttatcagttcagcttattttgtgctcgctttggcagcacttacactaaaattggaatgatacagagaagattagcatggcccctacacaaagatgacatgcaaatttgtgaagcattccataaattttaaaaaataaataaaaataaattaaccttattttgtatacattttagcttatttgagctatctcatcatgcatcatggaaacaaagtatctgttctattggcattaagataatattttgtttgaagaacctgtttatataagactttaaaggaatactttcaggatgtattatagatatacatgtattcttttcagttcaactccagacactggagaaatacttgttttttaatatcattagctgcatcttttctaatgtgaatttatttttgccttataagtaacaagtaattttttttcataatttgacccacaaacatttgcagtatctactgaacgcctaccactgcatgcaggatactgtacagagtagcttttaatctatccttttaaagcatcattgtctgtattgaaaacattgctcgtgtctaatgtgtttctgaaagtttccatgtcactaagatgccagcctggggctatttaatattgtatcagatgtcttttgttatgtatttattaaaacaggttctatataaaaatacattcttgtgaaagttctctttcagactcttctgaaggaaaacatggttcttgacagctccttggcagcttagttttttcaaacgtgctttatatctgtatttacatttttttttgacattttacacttacagattgctgatttgtttccacatgtctcttatggtatagttcttgagcaatttcctgaaaaatacgccgagcactcttcttctataaagacaaatgagaaaaaaaaattctcttttgggaatataagcgatgataacgacgcatcatcagaacttttcttgctctattgccaccggtcccaaaaactaccccctcccccaacacatatgtgcctacagttaactcttttgtatttgagaactttaaatataatttatggttgagaactgtccaatttaagtcacagtttaccccttgagattattttgtcattgagtttctcaacaataggaaatagtgtctgcagttgaaagttaccttgatattctgtttaaacttaacatttaaatatttaaaagctaaaaaatatttcagttttgaaatcgttacaaccagccacaatttaaaaaatatttttcaagtgttggtctgtaccttttgtgagtcttcttttatttctttstttcttagagggttggattttgactgccaagaagagaaggaaagtctatgaaacattttatgtactcataacaatggtggcagatatctcatgccctaataagattaaactaacttaatatttaagtgatatacaatgagacttaatttttacatcatttttgagatgcttttactccattaaaaactaattgaacaaactgacgttgattgtaggatttatagtaatcctaacacaatggtatacatctcccttcttatacacatagccaaaaggtattcttttttaataactttagccctttttgaagattttaaggcggcttttagtttcttcatcaacccatttttgttcttaaagactgttcttaaggctttcgtagataacagtaatatctcgccctccacctgcccacacctcacccctacagcagaaagatagcatagtggatggctctcttcttaatcccatgctactgggctttaaagagaaaacagcaaactatgtcccctggctaataatttcagtgatgagaatgtatgatgccttcttccaaagacctcttctgcaggtggtgttccctgcagatgcacaggaaaatgttaattagggagctcttgctgaggcccataacttgtggagagatagaaattatttttcttttgataatattcaaggatatagggacattccatgcaagaggatttgacttactttggagaggagtatgaaggccacgcacacaccggtcacatagacagagagcagtgatacaagagctgtcaggaagctccgcagttccttgctgagcagcttaatttcttaatgacaaaaacagaaagaagcacattgactattaaagcctattctttcaaatacatgtgtaaagtatccttcacactgcgttttagaggtgaaacgtgaacttactctgcttgcctattcgtataaaaactagacctcaaaaggtactcaagtatgtaatagttaaagccagttcatcagttctttaaatgtgttaaaccaaaaatgttactcgtttttaaacattaaaaaaattcaaccaaccatttgtcatattgctaagcatcactttttagataaaggattatttgaagttagataaacatttccagacagtttgttcaagggcatctaaaatctcttttggtagaaacggtttaccagtatcatcaagagtctgcctatgtggttaagatattttcatatgtatttgttaagggtgatatttatagccttggaactagtacacatagctgaagagtcccatctgtgaaagaacctgggaaggccatacattgaggagcgcagtgctcactgcgtgcttgaaagacaggcacttttgccaaatgtgctcttctttctttatgataaaattctggaaatagagttattgaatccattttcacattcggaatttctctctccttgcagaaattgtcttgtgctctgggtagggattaagtaacatgccatgtcttcaattacctgactatttggagtacaaaatacaattagatttgtacttactgtctgaatagcctgtactttccaactaaatatcccatagatgagactgagtgtgatggctcatgcctgtaatcccagcactttgagaggccgaggtgggcagatcacttgagatcaggagtttgacaccagcctggccaacatggcgaaaccccatctctactaaaaataccaaaattagctgggcgtggtcgcacatgcctgtaatcccagctactcaggaggttgaggcaggagaatcgcttgaacccggaaggtggaggttggttgcagtgagctgagatcacgccacggcactccagcccgggcgacagagcaagactcttgtcttaaaaaaaaagaaagaaaaatcccatagatgcttatcctgtgaatgcagtttatgcagcatacatttttatttgtgaaactaacaaattaaccacatctatacaactaaaataaaaaagcttcagtgtgaaaataggagttctgtagaagagacaggaagttgccatgtctgccttaacactttcaattctgcctttcactttcacttcactttatataagccttgcagctttgagaccttcatctttttacaagccatttttccctttgactaacatgtttttagaaggctaatgcagtgagacatacaaatctctaaagctgtgtgtgttttcatatcagtagctaacatttgttatttgctatatgccaggcactattaaaaatgctttaagtgccttaacttatttataatttagctgacagatgagaataaactaaggttaaatgacatttgaatatcaaaagcccattagaaccctcgtagtttaaaagcacaggttataatactggatggtctcccttcctcagagtcctattttgaaatcgaagggctggttgattttgagttcatgttttaacaatctctgctcatcataccagggtccttcctaagggaagagaccccaacaaggcgaggagttgctgctgttctcttttttccttcagaatcatgtaaagctttttctctgaaattccccctttttttttctcgggaatgtcttaatctcagtttactcaagggaatgacttggtgaaattactgataggatttagctatgtttgatgtcctcgctcggctgaggaattgtcatgggttttatcaaatctcaggaagtgagagtcatcactttccgttcactgatgtccaggcagaatgggaagggtcagggatccctgagtagcttctctccaaatctgtgcttattctccatgttgcatagtttctgtgggtccaatttattgatcttttacacttctctagtgctttgttctaggtggtgcattaccagactagttcctgagaaagctgatagttactcaccacaaggttccctttggacatggtactttacactaaatcactgtaatatacaaaagaggtgaacatggttggttaaacatcaccatgtagggagaatagagcacccagcaaatcactgactttgtgttagtggatgttcgagatggattggagtagttcttttgtttttctgagatggagtcttgctttgttgcccagactggagtgcagtagtgcgatctcggttcactgcaaccttcgcctcctgggttacaagcgattctcctgcctcaacctcccaagcagctgggactacaggtgcatgccaccatgcgcggctaatttttgtattttgagtagagatggggtttcaccatgttggccaggctagtcttgaactcctgacctcaagtgattcgtccacctcagcctcaaagtgctgggattacaggtgtgagccaccacgcccagccagttggagtagttctttagtccaaacctcatggtgacttgtgttcagatcacacccatcactggctagggtattaacttagcaaatttatctcctgatttctacatgtgagtgaggtaatgattttacaggcctgaacaagatgcaatgatgcactgaaataaagcctcgctgactgacctcttaccaccagtgtggtccctcctcctgtctgtttagctctcgcttccggcacactggggaatgctattccacagatgtaaattgcactgtcatttgaagtcactctgtttacagtgagggaaacttggttttctttgagggcctccctcactgtgaacttgtctgcctcacttttgcacccgtccaagcacaggttctcaggctggtgagcaccgtagcgaaaccacaggcatgttggttgctcagaagggcatccggttgcggagaaggtacactttatggtgacggcctcatgagtgtagtccacttctaggtaccacggttgtgtgacagagagagtacaggcgcccacagcacctgtgggaggaagcagatgagtgggttaatgggcctgccacctcactttgtgcttttattatatttttgaggtaggaaacccagccattctgttatttttcttaccttaatcccaatataaataagactaaaaataaacaccagtggtcctcacttgccccaactcctcctgttttctgaccttgacctgctgggtcacatgatgtctgttcactggaggccagccctagagaggcttcaggggaacagagtccctgtgcaggaggcctgcatagaggtggcaccgtattggactcagaagtttggggtccatctgtgactcttgctccttacaagctttccttcgatccaatcacttaatctcctgcctgctttcttgtccgcaccctggcctccccagagtgctgtgttcagtgtggtaacctgtgtccccagacgaacgttgctgccgctgatggagcctatgagcagcagcgatgtttgtgctttgtgggagttgagatcgccaggaattcatggccattcacaattgtttctttgtgagcctggtgtccctttgggaaacatgataaaaggcaacatgtacacctgtggaaatgcagccctggcttagcctaccatgtctttgattactgagcagggaccatatgagctcgccaggccatagctaagcagatttggtttctccctggcgtgtgtgctgctttgtaggcccttgtagcatttatcttatttaattaacaatattgtgataaagagcacagacttgagttcaaatcctagctctgcctgttcccagcattataatctcagtatctcagtttcctcattagaaaatggggatagtattgttgacctcatgcagttagtgtgacgttcaagatgatgcctaggaagtgtttacctgcctaagctatagtaagtattaaatacaagggagcgattgctgctgcagccgccactgctactgttcccacagtgtcagatggctgttggagagatggttgtggacgtctagccacaaggtgttcacagagctgggattagtcacccactccagtgtactgtccaccatgtggtgctcttccaagttatgaggattgagtcccccaccttggcctttatatcccaggcatgtgaagctggaaagccactcgagtgcacaaatggaaagacccgccctaaacccttcttttgcggcaggggaggccataggtaaaatagtattggttgagacaaattggaatttgtcaagtttttggtctgagttccgcctggtcatatattcccaaatggtcctatttgtgtgagtttgtcctttgctactgtaaatgaaactgaaaagtcatccaagtggtctgatgcttaattttcagacaggggcttttttctcttagcgtttctcttatggatccccattcataacagcagaggaattaaagttagaatcatggcgtttgtgatgcgagtctcttctcaccatgtttttttgtttttgttttcatttttgttattgtttttggacagagtctctgtctcccaggctggagtgcaatggtgcaatcacggcacactgcaactgtgacctcccaggttcaagccatcatcctgccttagcttctcaaaagtagctgggactgtaggcctgcagcactgtgcccagctaatttttgtattttttgtagagacagggtttcaccttgttacctaggctgatcttgcacccctaaactcaagcgacccgcttgcctcggccttccaaagtgctgggattacaggtgtgagccactgcgccttgctctcttctcatcatgttatattttagtatttgtgcaacatgagatgagctgggagctctgtggtgacctgataaatgcaaaccagacaagagggtgcagtcacctggaggaggcctgcaagcttctctgagcttcgtgtctgtgggaggcccagctcagctccatctccagccaaggggattggattccctctcaagtctgagaaatacaacctcatgtctcctgcccagactcaagcaccttacaagtacagtgaaacattttatagtatatactgagtggaaatttaaaatggaattgggtctgccaaaacttagcaaagttaagcactgtctcagtctcaagtcatctttcagataatgtttttatttttatttgtaaaattatttttaaaaagtggacgattccattatttacacatttttatttttgagatagggtcccactgtgtcgcccaaactggaatgcagtggtgtgatcttggctaacttactgtagcctttgtcttctgggctcaagcaatcctctcactgcagcctctggagtagctgagactataggtgtgcaccaccacgcctggctaatttttttatttttagtagagacagggttttgcgatgttggccagcctggtcttaaactcctgggctcaagcaatccactcgcctcagccttccaaattgggtagtgtttttaaaagggaagccaaagagccaggcgtggtggtgtggccattagtcacagctactcaggaggctgagaccggaggctgattgagcccaggaattccaggctgcagtgagctgtgatggcaccactgcactccagcctgggcagcattgtgagtccctgtctctattaaaggaatagagtctggacgtgcactccagcctgggcagcattgtgagatcctgtctctataaaaggaatagaggctgggcatggtggctcacgcctgtaatcccagcactttgggatgccgaggcgggcagatcacctgaggtcaggcgttcgagactagcctggccaacatggtaaaaccccatctttactaaaaatacaaaaaattagccaggtgtggtggtggacgcctgtaatcccagctacttgggaggctgaagcaggagaatcgcttgaacgtaggaggtggaggttgcagtgagctgagattgtgccactgcactctagcctgggtgacagagtgagactcttgtctcaaaaaaaaaaaaaaaaaaaatagaggttggggtggcggggatagctgactttcaacacttttctttaaaaactagtagtataggataaaaacaggtatttgtaactttggaatttcatatctctacttatttccaccttcttcccaattaggctatgtgtgggagaaaaccaattgtaatgatttcctctgtgagcaggaacttgtgatgaaactgtggttccctcccccaaccagttaggcaacctattaacaaaaaagagaagtttggatatgtcacaccacagcctgcttctgtgaatgatttcttttaagaatcctcatattctaggaattgttttttaaacacagtatccaatgaaaaggttgaagatttatttcctccatggagggaatagaaagattattcttattattttaaaaaaccatattgaggctgggcatggtggctcatgcctgtaatcccagcattatgggaggccgaggcgggcggatcacgaggtcaggagatcgagaccatcctggctaacacggtgaaacgctgtctctactaaaaatacaaaaaattagccgggtgtggtggcagatgcctgtagtcccagctactcgggaggctgaggcaggagaatggcgtgaacccgggaggcggagcttgcagtgagccgagatcttgccactgcactccagcctgggtgacagagcgagactccgtctcaaacaaacaaaaaagccatattgaaagtaggaagagaactaattcttgacatttaaacaaagctgtctctctatctagtaagtaagaagtaagtaaatgtcttgctctgttgcccaggctggagtgcagtggcacaatcacagctccctatagcctgaaagtcctgggctcaagtgatcctcctgcctcagcctcccaggtgggtgggactgcaggtgcagtgcaggtgccatcacgcccagctatttttttttcttgtgtagaaatgggggtctcattatgttgttcatgctggtcttgaactcctgagctcaagtgatcctctcaccttggcccccaaagtgctgggattacaggcatgaaccaccacgcccagcccaaagctttattatattagatttcaaatttctaacatatcaaagtagcgaagtagtacagtcaaccccctgccatcacatggcttcgacccaatcttgtttcttttctcctcccacctactccctcactcccatattattttagagcaaatcccagccattttatctgcatctttcagaatatatctctaaaagacaggaattcttctttaaaataatgctaattaaaatagtctatgaaagtaatatatacttattagcaaaaaacaggttattaaaagtagaagcaaaaagtcacccatagtccttttgcctgaaataactcccattaacattttgatatatttcttcacagatgagaaaaaattaagaactttccccccttccctgccctataatccaaattgtgtgggcaaatctgagattactagatgtattggaaatcctttctctttcatagataaaaaaacagaagtagacagaattttaaaaatagatatactatgggatggctattggagtcatggcagttttttttttcttaaatgaaaagtacttttatagaaattgttctttgaaaatattcagcaaataatcatttattgctttctatgtgcagatcaagtttgtatgataattaaattattgataacttatacctacgattttaagaatattttcaaccctttggtcagattgtctccaattagcataatagcaaagagacttttcaaggttaatatgaaactttttctcagctatttttttattgtctatttctcaggggaaaaaggaaacttatcctcttaggcagttttcataatgttatacatttaaaaattaatctgaaggagcttaaaatataaatgcattaggtgaaaaatagcagttgatttaaataaaatgaaggaggagaagaaaaagaaccttaccgacacaaaatagaatgagattggtttgcagatggcgagcgatgttgcttctgctcgcagtccccatttctgtgtatgccggggcgggttggggtgtgtatttgaaaggaaagttggctttcttttttcagaagggaagaagagctgaagagaggaacctcttatgaaggaaccataatcaggaactttttgaaattgtgcaaggatggcttcaccatttaacattgagattttggcctggagcacatttagaaatgtgcatatcttttttttttccatggattttacagttgtcataggtgttagatgtttctgggtgagattttgatttacacctagcacatatttccaggaaggagtattgtttgacaaataattcgtacttggatttttcagaacagttcagtcactgtctagggtacctgctctgggtgccactctgggccagtaactgctgggaacaaagaacagcagaaggagaagtggctttgtgtagagatgagaaaagttagtaaacaacacattctaatgcagcgaataaataaattgtctgttattaactttttgtactccagttttgaatccaaagacacctgccttccccccttttttgacagggtctctatcacccaggctggaatgcagtggcaagattgcaggtcattgcagcctcagcttcctgagtagctgggactacaggcatgcaccaccacccctggctaatttttttttttttttgtagattctgtgttgtctaggctagtcctgccctcaagcgatccccctgccttggcctcccaaagtgttaggattacaggtgtgagccaccatgcctggcccaaagacccccttttaatgtgttgagaaacaaatatgtgggccctctgtcctctgtgtcctctcccccagcacttagtggtgattcagtaagggtcttctttgtaaagcagcagaaacagactcaggctgacttaaaaggaaatttatgcaaacatttgaaggtagatcctagagtcactgggagggctagtgaatcttgtgtggggtccacagccaggaagaatgcctcaaatcacaccataaacaggtctgaagaggatgctactgccactgccaaacactaggtgccatcagccctgttgtcagcatcgctcaaccactgccccagccccttggtctcactgccattgctccacccccagagaaggagaagctcacatccccactactctgggtcactggctctccattccagggcatgggcaagtgtgcctggcttaggctgcgtgccagtgcctcagctgcacggcaggccaggaaagcggctcccaggccttgtgtctctcccagactctgggcaggcaattccccagacatgggaagagcgtcatctgcaccactgaaaattatgaaaaatctccccaccatgatatgatgtctgtgcccttggcatctgctcatgatatattttctcattaacagaaagttattctcagtctgttttgtttttttttttttttttttttttgagacagagtctcgctctgtcgcccaggctggagtgcagtggcacgatcttggctcgctgcaagctccgcctcccgggttcacaccattctcctgcctcagcctcccaagtagctgggactacaggtgcatgttgccatgcccagctaatttttttgtattttttttagtagagacggggtttcactgtgttagtcaggatggtcttgatctcctgacctcgtgatccgcccacctcggcctcccaaagtgctgggattacaggcatgtgccaccacgcccggcctcaatctggttttaacacttcaacagatgtatgtagtttttgtatcaccatagcacctaaaaagtacccccaaagttaaatatactgtcatctctgtgtgtgtgtctgtagtcagtgccaggtttgtatgtgaatttgaggaccttccctagtccccttgtcccccaggcatctcctgctcataggtttggaaatgactgatagaggcttcatctctagtccaagaaatgctggacggtgtatccatcctactgttccatctctctctggtcctggagcttaatgtttatgaaattgttctgaaaaggcaaagaatgagtcaacttccctagaaaaactccccaatgatctgcttttctaaattaaaatccttcatgagcctgtttttattttcagcctaataaatctctctaggtagtaagttgcataagtttactatgccagtggtattttcttgcatttgtccaaaactgtccttcagatattacatgttgctctctgtttcagtattccagcatttaatgaccagttttccaaacccattaaccattacaccctgcagtcagtctattggcagatactacccaaaactgtcagagaagataacagtgtggggccttggatccagacaaacctgggcttacatttccatactgacactcattaaccttgcaagcgtgggcaagttcttcaccccttctgagtctgttctttatctgcccacctgtctcaaagagtacctgggaagtacaaaagaggtaactcatgaagccctcaggcttggaacgtaccaagtccttggtagatatggctcctccctgcttccctctttaaatcacttgtttgttcaagaatttaactgaatgttcttatttgtattagtaggtggcaagtgggagaaaccatcagaaattttggaaatcaaaggacagaactgggaagaacaagtgaatagtctgcctgaagttttcagaaaagctggttttgttatcgaagctttcaccagactaccatacctgtgtgaaggcgacatgtataatgactactacgttctggatgacgctgtctttgttctcaaaccagtataaacacgtggaggtcgaagtcttcagagtccgcaccctccgggatgtgcccttggaagagggtctgtgttcacaattacgtgaagggaggacccttggggaccgccattctaaatatcatgtaggaatttaaaaagccaaaatactaattatttctttgtagtgtgtaaaggaatgtttttaaaagacaaaaacccaactctttgtggatttttatcaactctttactcagagccactctccaatgcaggtcacactccaattatgatggaagatattttttatacttaattgcagtagggactcattcccagacaaagcaatagtcacgacttcatggaaccaatcaatggattgttttttgaagactggcaataaagctgtccattcaattccaaatactggttttaaggtatagccactgatattctttcatgtttagaaattctttctgttattattcaagaaaatgtttttaatcatgctaataaacttttttggagatgactttggcatcatgtttgaattcatataaagctcccctagcattttttattggtttggcttcaggagtacccaaatagtagcattatgagaatgacgcagacaatttgaataggggggaaggaaggcttcagacttgggggaaggggagattattgcaaattgcagtgaacactgagtcagtaaaaaaaaaaaacagaaacaaaaacccagcctcattcagatacagaacttcagggacccctccccccacccccccagttaatgctgctgtgaaaaatgcaaaataacctggttctgactttgtgatcactcatgtcccatacactgaactttgtttttttctggacaatctcaggttctcagaattgaaacattcagttttgtctactgacaaaatgcaactaaaaatgttttaattcaacttcttactctacacttatatacctctctcccagagcttggctcttccctgaaatccttaaaggagtttattatttgccaagaatatggtttgatgaagaccgtgtcagactcatgcattctggaatccgtgagtgcctccaaccataaacccagaaatgctgccatagaggaacccattagcaagatcaataaccatcgtggatattccaaagagcagagcatttaacccagaatctgaaatctcagtaataacagaaatgtcaatatgagattgtggttattaacaatatgttatcctcactactttatttcttttttcatccaggtgtttcattaagtattctcatttatatgctcatagaagtcatcagatcaacacattcactccaacacctgggtataaaggcgaattaaaacctgaagaattactttattattcattaagaactgcattcccacatcctcacaccaatatcttccactgttactgtgcagtcataataagagttgggttatgtgatttatgcaaaattgttattggtgtgttctaatgatttttttccaggaattcaagtaagtgaagtacaaatacttagcaccatagattgtaaaaatagaaagaggaaatgagaaaacttaatgtcgttcttgtacagttgagttttgcttctttataaactgtctgttaaaatcaggggttgctgttagactgtcaagcagaagtgatggatgttcaaggaggcaggttgccccaaagtgttttctaactttcaagtagagaactttatgctctaataagaaaaatacaactcattcttaaccacccccccaaaacagagaaaacacatacatttatgcattttaaagataaaaagtagtttctcaaaaaaatctgaagttctctgaaaaccagcttattaaaagtgctgttttgtggtgaaaattgaaaccaaatccactcacatttcctatcgggtcttgaaattcttggtggtgtgtcaccattccactagatggcagtgttgcttactgagtgtcaatggcttttttccccgtaaatggaatcatgtttttctcccccaaagtacaataaagctgccttgtctgcaccattcctcgtgtaagtgcttcatatcaagttaagactgtactagagaaattaagaagagctttatttgtggtaaaagcaagctaaccaattgaccttaaaggttgaaatgcaagccacacctctgattcctagctccctgcacctgcattttaagctcctaaagtgctcagaccactgatctcagagaaggggaggaaaggaggtacagtgcccttagtcatttatcccttgtacagagtagttaaaagcagtactgtattttctgccatccagtgtgacctgtcatcagtttttacatggttggcttttaacagaaaaaagttgagttggaaaataaagtgtagatgtttcaagtcttcctgagcaaagctttgttttcacttggttctgagtatagtattaataggctatactgcgtatgttatttacagtattaatgaagcaagatgttttcattaattgcttcccactacttggttactgatggaggtgttacatgatcctttttctccagcaatgtcagtatagtatcatgggcttccagtgactaaagtgacctaccatgttagtgcagatgcttaagcacccccagttaccttatatccagtgcttccgccggctagaagatagtgcatggaatcagggcagcctggactgagttgtactgtctaggagtgcactgagcacaaaactgggctcataagtaacttgagacaaatcaggactatgttgcctaggctggtcttaaactcctggcctcaagtgatccttctaccttggcctcccaaagtgttgggactgcaggtgttagccactgtccctggcctagcactccctttatcttgcaaaactgaaactatgttcataaacacaactctccattgtctccaccccaccctctagcaactatcattctactttctgtccctttgactactctaggtagtcatgatccgccccatgatccagtcacctcccatataattggaattacacagtatttgcctttttgtgaccggcttattcttctttttttttttttcctgagacagagtctcactctgttgcccaggctggagtgcagtgatgcaatctcagctcacttcaacctttgcctcctgggttcaatcaatcctgccttagcctcctgagtagctaggattacaggcgtgcaccaccactcctggctaattttgtatttttagtagagatggggtttcgccatgttggccagattggtctcgaactcctggccttgtgatccggcctcctaaagtgccaggattacaggcgtgagccaccgcgcccggcccatgactggcttatttcacttagcacagtgccctcagggttcaccgatgtagagggtgtcagagtttccttcctctcttttttttttttttttttttttttgagacggagtctctttctgtcccccaggctggagttcagtggtgtgatctcggctcactgcagcctctggctgctgggttcaagccattctcctgcctcagcctcctgagtagctgagattacaggcgcctgccaccatgcttggctaatttttgtatttttagtagagacggttacaccatgttggccaggctggtctcaaaactcctgacctcaggtgatctacctgcctcggcttcccaaagtgctgggattataggcgtgagccaccgcaccggccagaatttccttcctttttaaggctgaataatctattgtatggatagaccatagtttgcttatccattagtctgttggtgaactcttggattgctactaccttttagctgtctgaataaccctgctgtgaacatgagtatacaagtatcttgtgaccctgcttttaattcctttgggtatataaccagaagtgaaattactggatcatgtggtaattctatttttaattatttgaggaaccacaatgctgttttctgcaccatttaacatttttgccaacagttcacaaccgttccaatgtctccacatcttcaccaacattatcttgttttgttttgggatggagtcttgctctgttgcccaggctggagcgcagggcatgatctcggctcactgcaaactccatctcttgggttcaagtgattctcctgcctcagcctcccgagtagctgggattacaggcacctaccattacacttggctaatttttatatttttggtggagatggggttttggggtttcgccatgttggccaggctggtctcgaactcctgacctcaggtgatctgcctgccttggcctcccaaagtgctgggattacaggtgtgagccaccatgtccagcctgttttgtttttttagtagtagccatcctaatcggtgtaaggtggtagcttgtggttttgatttgcatttccctaatgactagtgcatcatttgtttttataatacaacttgtatggcatttggcttcatttactagtaaattgtgctttgtagcttgctatctatatcagtatcactgaattggactcagtattcagtgataacaaaatacttctttttcactgtgaaattgtatacttttggagaacagggagaatattattacataaccgaacttaagaattccctctggatttgggtcagtatgctgtattcacatgaattaaataatatgcttttgttagaaagtcactttaaaattactttcaatacatgtaaaatgaaaagtaagtattttttctctcaagtaaatgcccatgtaaattgggatgtcttatatacctgtacttcttaagttctggaaaataagaacagatagagtgcccaaatgctattttcttatatcctgtttaggattcaacacagaacgctggttttaaacgactgtgaactctcaacacttttccaaatgctagagttcaagtgaatacattggcaattctttttttttttttttttttttttgagttggagccttcctctgtcgcccaggctggagtgcagtggtgcaatcttggctcactgcaacctccacctcccaggttcaagtgattctcctgcctcaacctctcaagtagctgggattataggcatgtgccactatgccctgctaatttttctatttttagtagagatggggttttgccatgttggtcaggctggtctcagactcttgacctcaggtcatccacccgcctcagcctcccaaagtgctgggattataggtgtgagccacctcgcccagcctccatcttgtttttattatttatagggtggccatgactgatcgtaaagccctactggtttttccattataagtaacacgtttgtattagtcctttctcacactgctataaaaacacacttaagactgggtaatttataaagaaaagaggtttaattggctcatggttctgcaggctgtataggcttctgcttctagggaggcctcaggaaacttacaatcatggtggaaagtgaaggggaagcctgcatgtcttacatggtggaaggagaactaagagagaaccaaggagaaggtaccacacacttttaaacaactgagcactcactcactatcacgaaagcagtattgagggggaagtcagccccatgatccaatcacctcccaccagacccctcccccaacactgggattacaattccacacaagatttgggtggggacacaaagccaaaccatatcaacgttcatcgcagaaaaagtataaaatgaaaattaactttacttaccccataaacttgagagaaccactactgacagtttggtttatgccttccagacttttttttttctgtgcatgtatatatacacacatttataaatgtttaaacattaaaatatgtaaaaatgaaaaggtccttttattgttctgagatgagtcatgtgagactcctagacacctatattctaaatcaaaaattgacaaaggatggaagccatttcctgtcatttaaagcttgaggttaagcttttttttttttttttttttttttgagaaagagtctcactgtgtcacccaggctggagtggtggcatgatcttggctcactgcaagctctgcctcccgggttcataccattctcctgcctcagccttctgagtagctgggactacaggcgcccgtcaccacgcctggctaattttttgtatttttagtagagacggggtttcactgtattagccagatggtctcgatctcctaaccttgtgatctgcccgtctcagcctcccaaagtgctgggattgcaagcatgagccactgtgcccggctgaggttaagctttttatttaaaggattaaacaaagaccctggggataaaaggatgtttttgaggatgctggacattagcattatataaattactatcagatgggcagcagaatgctgcaattggtcatttctgaagataatgttttaattgtgccactgacaaactaatgttagcgttgggcatttcaatgattactttgaaatattacgggtattagatgtgtttcgttaaatgtgaaggattgcaaggaaacttcttgagtccacaactattttcattaggaaagatgcaaaacagttatgcataatcctatcatgcaaagctaatattttaatgcattgcctaccagattttttttaatttttttttttgaggcagagtctcattctcttgcccaggctggagtgcagtggcatgatctcagctcactgcagcctctgcctctcgggttcaagggattctcctaccttagcctcctgagtagctgggattacaggacgtgcgccaccatgcaagctcatttttgtatttttagtagagatggggttttgccctgttggccaggctggtctcaaactcttgacctcaagtgatccacccacctcagcctcccaaagtgttggaattagaggtctgagccaccccacccagccttgccttctagttttttgttttgttttgctttgtttttgagatggagtcttgctctgttgtccaggtgggagggcagtggtgccatctcagatcactgcaactgccacctccccagctcatgcaattctcctgcctcagcctcccaagtaacagggattacaggtgcccacgaccatgcctggctaatttttgtaattttagtagagacgaggtttcaccatgttggccaggctggtctcaaactcttgacctcaagtgatcagcctgccttggcctcccaaagtgctgggattacaggtgtgaggctccacacccagcccctagcttctaggttcaataaaagttcaaatacatctatttcttaccattggcttttttgttttggatataaaattatttccttgtgctaattatgtggtctttgttaagaacaattttaatgactgtgtaatccacagcgtttatgtatccatttatttaagcatttcattattggtggacatttaggatgaatttttttctaccactctgtgtatgtatacatctattataggtcatactattatttttattatggaaaattccaagtacataaaaaagaaaggtaataatgaatcctccccaaccagcctcagcaattatcaacacatggcccaccttgtttcatccctactcccactactccttggttccactattgccaagcaaatcccagatgtctcatttcagttttgtaaatatataactgtaaaagataaccactctgaaaagatagccacattacaattattcattaagaaacccggcagggtgcgatggctcacgcctgtaatcccagcactttgggagccgaggccggcggatcacctgaggtcaggagtttgagaccagcctagccaacatggagaaacccggcctctgctaaaaatacaaaaaaataagcggggcgtagtgatgggcgcttgtaatcctctttacttgggaggctgaagcgggagaatcgcttgaacctgggggcggaggttccagtgagccgagatcgcgccattgcactccagcctgggcgacagagcgagactgtctcaaaaaaaaagaaaaaagaaatgaaagaaacccagccattaaatatccagcgaccacattgctccaattttcttataattttttttttttttttttt
